United States Patent Application Publication US 2021/0170017 A1 - sequence listing, part 11

SEQ ID NO: 15476 - RNA, 1877 nt, Artificial Sequence
  mRNA product Design b-2 comprising derived and/or modified sequence from HRSV(Memphis-37)__AIY60640.1__F_DSCav1_mut3 (opt3)
gggagagccucugcuggaguccggggaguggcguuggcugcuagagcgaagcuuaccauggagcugcccauccucaagaccaacgccauuacaacuauacuugcugcagugacgcugugcuucgccagcucccagaauaucaccgaagaguuuuaccaaucuacauguucagcggucaguaaaggcuauuugggggcuuuaagaacuggaugguacaccagcguuauuacaaucgaacuguccaacauuaaggagaucaaaugcaaugguaccgacgccaaggugaaacuaauaaagcaggaacucgauaaguauaaaaacgcaguaacugaccugcagcuucugaugcagucuacuccugccgcuggcucggggucagcaaucuguagcggaauugccgugugcaaggucuugcaccucgagggcgaggugaauaaaaucaagaacgcucugcugaguaccaauaaagccguugugucccucucuaacggugucagcguguuaacguucaagguacuggaucuuaagaauuacauugacaaacaauugcugccaauccuaaacaagcaguccuguucaauaccgaauauugaaacuguuaucgaguuucagcagaaaaacaauaggcuccuggaaauuacccgggaguucagugugaacgcgggggucacaacucccgugagcaccuauaugcuuacaaauucugagcuguugucccucaucaacgauaugccuaucaccaacgaccaaaagaaacugaugucaaauaacgugcagauuguccgccagcagagcuacaguauaaugugcaucauuaaggaagagguuuuagcauaugugguacaacugccacucuacggagugaucgauacgcccuguuggaaacuucauacuucuccucugugcacaaccaauacuaaggaaggcuccaacauauguuugacacgaaccgaccguggcugguacugcgauaaugccgggagcgucucguuuuucccacaggcugagacguguaaggugcagucuaacagaguuuucugcgacaccaugaacucccuaacacugcccucagaagugaaucucugcaauauugauaucuucaacccuaaauaugacuguaagaucaugacaaguaaaaccgaugucagcuccucugugauuacaagccugggagccaucguaucaugcuacgguaagacuaaauguaccgcaaguaauaagaacaggggcauuauaaagacauuuuccaaugggugcgacuauguuagcaacaaaggaguggacaccgucucugugggcaauacucuuuacugugucaacaagcaagagggucagucacuguaugugaaaggggagccaaucauuaacuucuacgauccguugguuuuucccagugacgaauuugaugcuagcaucucccaggugaaugagaagaucaaccagucucucgccuuuauucggaaaucggacgaacuguuacacaauguaaacgucggaaagagcacgacaaauauaaugaucaccacuauuaucauugugaucauaguuauccugcuacuccugauugcggugggccuuuucuuguauugcaaggcccgcuccaccccugucacacugucaaaagaucaacucaguggcaucaacaauauugcauucucuaacugaggacuaguguccaccugucccuccugggcugcuggauugucucguuuuccugccaaauaaacaggaucagcgcuuuacagaucuaaaaaaaaaaaaaaaaaaaaaaaaaaaaaaaaaaaaaaaaaaaaaaaaaaaaaaaaaaaaaaaaugcaucccccccccccccccccccccccccccccccaaaggcucuuuucagagccaccagaauu

SEQ ID NO: 15477 - RNA, 1877 nt, Artificial Sequence
  mRNA product Design b-2 comprising derived and/or modified sequence from HRSV(Memphis-37)__AIY60640.1__F_DSCav1_mut3 (opt4)
gggagagccucugcuggaguccggggaguggcguuggcugcuagagcgaagcuuaccauggagcugcccauccugaagaccaacgccaucaccaccauccuggccgccgugacccugugcuucgccagcagccagaacaucaccgaggaguucuaccagagcaccugcagcgccgugagcaagggcuaccugggcgcccugagaaccggcugguacaccagcgugaucaccaucgagcugagcaacaucaaggagaucaagugcaacggcaccgacgccaaggugaagcugaucaagcaggagcuggacaaguacaagaacgccgugaccgaccugcagcugcugaugcagagcacccccgccgccggcagcggcagcgccaucugcagcggcaucgccgugugcaaggugcugcaccuggagggcgaggugaacaagaucaagaacgcccugcugagcaccaacaaggccguggugagccugagcaacggcgugagcgugcugaccuucaaggugcuggaccugaagaacuacaucgacaagcagcugcugcccauccugaacaagcagagcugcagcauccccaacaucgagaccgugaucgaguuccagcagaagaacaacagacugcuggagaucaccagagaguucagcgugaacgccggcgugaccacccccgugagcaccuacaugcugaccaacagcgagcugcugagccugaucaacgacaugcccaucaccaacgaccagaagaagcugaugagcaacaacgugcagaucgugagacagcagagcuacagcaucaugugcaucaucaaggaggaggugcuggccuacguggugcagcugccccuguacggcgugaucgacacccccugcuggaagcugcacaccagcccccugugcaccaccaacaccaaggagggcagcaacaucugccugaccagaaccgacagaggcugguacugcgacaacgccggcagcgugagcuucuucccccaggccgagaccugcaaggugcagagcaacagaguguucugcgacaccaugaacagccugacccugcccagcgaggugaaccugugcaacaucgacaucuucaaccccaaguacgacugcaagaucaugaccagcaagaccgacgugagcagcagcgugaucaccagccugggcgccaucgugagcugcuacggcaagaccaagugcaccgccagcaacaagaacagaggcaucaucaagaccuucagcaacggcugcgacuacgugagcaacaagggcguggacaccgugagcgugggcaacacccuguacugcgugaacaagcaggagggccagagccuguacgugaagggcgagcccaucaucaacuucuacgacccccugguguuccccagcgacgaguucgacgccagcaucagccaggugaacgagaagaucaaccagagccuggccuucaucagaaagagcgacgagcugcugcacaacgugaacgugggcaagagcaccaccaacaucaugaucaccaccaucaucaucgugaucaucgugauccugcugcugcugaucgccgugggccuguuccuguacugcaaggccagaagcacccccgugacccugagcaaggaccagcugagcggcaucaacaacaucgccuucagcaacugaggacuaguguccaccugucccuccugggcugcuggauugucucguuuuccugccaaauaaacaggaucagcgcuuuacagaucuaaaaaaaaaaaaaaaaaaaaaaaaaaaaaaaaaaaaaaaaaaaaaaaaaaaaaaaaaaaaaaaaugcaucccccccccccccccccccccccccccccccaaaggcucuuuucagagccaccagaauu

SEQ ID NO: 15478 - RNA, 1877 nt, Artificial Sequence
  mRNA product Design b-2 comprising derived and/or modified sequence from HRSV(Memphis-37)__AIY60640.1__F_DSCav1_mut3 (opt5)
gggagagccucugcuggaguccggggaguggcguuggcugcuagagcgaagcuuaccauggagcugcccauccucaagaccaacgccauuacaacgauccuggcugccgugacccuuugcuucgcgagcucccagaauauuacagaagaguuuuaccaaucuaccuguagcgcugucuccaaaggcuaucugggggcccucagaacaggaugguacaccucuguuaucacaauugaacugagcaacaucaaggagaucaaaugcaauggcaccgacgccaaggugaaacuuauuaagcaggaacuggauaaguauaaaaacgcugugacggaccuccagcugcugaugcaguccaccccugccgcugggucuggaagcgccaucuguuccggcauugcggucugcaaggugcuccaccuggagggggagguuaauaaaaucaagaacgcccuucugagcacaaauaaagcuguggucucucucuccaacggagugagcguucugaccuucaaggugcuugaucugaagaauuacauugacaaacaacuccugccgauccugaacaagcagucuuguuccauucccaauaucgaaacagucaucgaguuucagcagaaaaacaaucggcuccuggaaauuacccgcgaguucagcgugaacgccggcgugacgacaccugucucuaccuauaugcuuacaaauuccgagcugcucagccugaucaacgauaugcccauuaccaacgaccaaaagaaacuuauguccaauaacguucagaucgugagacagcagucuuacagcauuaugugcaucaucaaggaagaggugcuggcuuaugucgugcaacucccucuguacggcguuauugauacccccuguuggaaacugcauacauccccucucugcacgaccaauacaaaggaagggagcaacaucugucugacccggacagaccgcggaugguacugcgauaaugccggcucuguguccuuuuucccgcaggcggagaccuguaagguccagagcaacagaguguuuugcgacacgaugaacucucuuacacugcccagcgaaguuaaucucugcaauauugauaucuucaacccuaaauaugacuguaagauuaugaccuccaaaaccgaugugucuagcuccgucaucacaagccugggggccaucgugucuugcuacggaaagaccaaauguacagcuuccaauaagaaccggggcauuaucaagacguuuagcaaugggugcgacuaugucucuaacaaaggaguggacaccguuuccgugggcaauacacuuuacugugucaacaagcaagagggccagagccuguaugugaaaggggagcccauuaucaacuucuacgauccucucguuuuucccuccgacgaguucgaugccucuauuagccaggugaaugaaaagaucaaccagucccuggcuuuuauucgcaaaucugacgaacugcuccacaaugucaacgugggaaagagcaccacaaauaucaugaucaccacgauuaucauugugaucauuguuauccugcuucugcucaucgccgucggccuguuccuguauugcaaggccagauccaccccggugacacuuagcaaagaucaacucucugggauuaacaauaucgcuuucuccaacugaggacuaguguccaccugucccuccugggcugcuggauugucucguuuuccugccaaauaaacaggaucagcgcuuuacagaucuaaaaaaaaaaaaaaaaaaaaaaaaaaaaaaaaaaaaaaaaaaaaaaaaaaaaaaaaaaaaaaaaugcaucccccccccccccccccccccccccccccccaaaggcucuuuucagagccaccagaauu

SEQ ID NO: 15479 - RNA, 1877 nt, Artificial Sequence
  mRNA product Design b-2 comprising derived and/or modified sequence from HRSV(Memphis-37)__AIY60640.1__F_DSCav1_mut3 (opt6)
gggagagccucugcuggaguccggggaguggcguuggcugcuagagcgaagcuuaccauggaauuaccaauacuaaaaacaaaugccaucaccaccauccuggccgccguaacauuaugcuucgcaaguucacaaaauauaacagaagaauuuuaucaaucaacuugcagcgccguaucaaaaggcuacuuaggcgcacuacguacaggaugguacacaucaguaauaaccauagaacuauccaauauuaaagaaauaaaaugcaauggaacagacgcaaaaguuaaacuaauaaaacaagaauuagacaaauacaaaaacgcaguaaccgaccuucaauuacuaaugcaaucuacccccgcugcagguuccggaucagcaauauguucaggaauugcaguaugcaaaguccuacacuuagaaggagaaguaaacaaaauaaaaaacgcacuauuaagcaccaauaaagcagucguaucauuauccaacggcguuucaguacuaacauuuaaaguacuugaccuaaaaaacuauauagacaaacaacuacuucccauccuuaacaaacaaagcugcucaauaccuaauaucgaaacaguaauagaauuucaacaaaaaaacaaucgauuauuagaaaucacacgagaauuuucugucaacgcaggagucaccacacccguaucuacuuauauguuaaccaacucugaauuauuaucacuaaucaaugacaugccaauaacaaacgaucaaaaaaaauuaaugucaaauaacguacaaauaguaagacaacaaucauacucaauaaugugcauuauaaaagaagaaguacuagccuauguuguacaacucccacucuacggcguaauagacacaccaugcuggaaauuacacacuucaccacuaugcacaacaaacacaaaagaaggaucaaacaucugccuaaccagaaccgauagaggaugguauugcgacaaugccggaucaguuucauucuucccacaagcagaaacaugcaaaguacaauccaacagaguuuucugugacacaaugaacucgcuaacauuacccagcgaaguaaaccucugcaacauagacauauucaacccaaaauacgauugcaaaauaaugacuucuaaaacagauguuuccucaagcgucauaacgaguuuaggagcaauaguaagcuguuacggaaaaaccaaauguaccgcaucaaacaaaaaccgaggaauaauaaaaaccuuuucaaacggaugcgauuacgucuccaacaaaggagucgacacaguaucaguuggcaauacucuuuacugcguaaauaaacaagaaggacaaucacuauacguaaaaggcgaaccaauaauaaacuucuacgacccccucgucuucccuucagaugaauuugacgcaagcaucucacaaguuaaugaaaaaauaaaucaauccuuagcauucauacgaaaaucagacgaacuauuacacaacguaaacguaggaaaaucaacgacaaacauaaugauaacaacuaucauuauagucauaauagucauacuacuacuauuaauagccguaggcuuauuccuauacugcaaagcaagaucuacuccaguaacacucucaaaagaccaauuaucuggaauaaauaacauagcauucucuaauuaaggacuaguguccaccugucccuccugggcugcuggauugucucguuuuccugccaaauaaacaggaucagcgcuuuacagaucuaaaaaaaaaaaaaaaaaaaaaaaaaaaaaaaaaaaaaaaaaaaaaaaaaaaaaaaaaaaaaaaaugcaucccccccccccccccccccccccccccccccaaaggcucuuuucagagccaccagaauu

SEQ ID NO: 15480 - RNA, 1877 nt, Artificial Sequence
  mRNA product Design b-2 comprising derived and/or modified sequence from HRSV(Memphis-37)__AIY60640.1__F_DSCav1_mut3 (opt11)
gggagagccucugcuggaguccggggaguggcguuggcugcuagagcgaagcuuaccauggaacuccccauccucaaaaccaacgccauuaccacgauccucgccgcagucacccucugcuucgccuccucacaaaacaucacagaagaauuuuaccaaaguaccugcuccgccgucagcaaaggauaccucggcgcccuccgcaccggcugguacacauccgucauaaccaucgaacucagcaacaucaaagaaaucaaauguaacggaaccgacgccaaaguaaaacuaauaaaacaagaacucgacaaauacaagaacgccgucaccgaccuccaacuccucaugcaaucuacccccgccgccggcucagguagcgccaucugcagcgguauugccgucugcaaaguacuccaccuagaaggagaagucaauaaaaucaaaaacgcccuacucuccaccaacaaggcagucgucagccucuccaacggcgucucagucuuaaccuucaaagugcucgaccucaaaaauuacauagacaaacaacuacuccccauucucaacaaacaauccugcuccauacccaacauagaaaccgucauugaauuucaacagaaaaacaaccgccuccucgaaaucacgcgcgaguucagugucaacgccggcgucaccaccccagucucgacauacaugcucacaaacucagaacuccucucguuaaucaacgacaugccaauaaccaacgaccaaaagaaacuaauguccaacaacguucaaauaguucgccaacaaucauacuccauaaugugcaucaucaaagaagaaguccucgccuacguuguacaauuaccccucuacggcgucaucgacacaccaugcuggaaacuccacacaucgccccucugcaccaccaacaccaaagaaggcagcaacauuugccucacccggacagaccgcggcugguacugcgacaaugcaggcagcgucucauucuucccacaagccgaaaccugcaaaguccaaagcaaccgugucuucugcgacacaaugaacucccuuacccucccaagcgaaguaaaccucugcaauauugacaucuucaaccccaaauacgacugcaaaaucaugaccuccaaaaccgacgucuccucaucagucaucaccucccuuggcgccauugucuccuguuacgguaaaaccaaaugcaccgccuccaacaaaaaccgcggcaucaucaaaaccuucucuaacggcugcgacuacgucucaaacaaaggcgucgacacugucuccgucggcaacacccuauacugcgucaacaagcaagaaggacagucccuauacguaaaaggugaaccaauuaucaacuucuacgacccccuagucuucccauccgacgaguucgaugccuccaucucccaaguaaaugaaaagaucaaucaaagccuggccuucauccgcaaauccgacgaacuacuccacaaugucaacgucggaaaaucaacaacaaacaucaugaucaccaccaucaucaucgucaucauaguaauccuccuacugcucaucgccgucggucucuuccuauacugcaaagcccguucuacuccagucacccucuccaaagaccaacuaucaggaaucaacaacaucgccuucagcaacuaaggacuaguguccaccugucccuccugggcugcuggauugucucguuuuccugccaaauaaacaggaucagcgcuuuacagaucuaaaaaaaaaaaaaaaaaaaaaaaaaaaaaaaaaaaaaaaaaaaaaaaaaaaaaaaaaaaaaaaaugcaucccccccccccccccccccccccccccccccaaaggcucuuuucagagccaccagaauu

SEQ ID NO: 15481 - RNA, 1897 nt, Artificial Sequence
  mRNA product Design b-3 comprising derived and/or modified sequence from HRSV(Memphis-37)__AIY60640.1__F_DSCav1_mut3 (opt1)
gggagagucccgcagucggcguccagcggcucugcuuguucgugugugugucguugcaggccuuauucaagcuuaccauggagcugcccauccucaagaccaacgccaucaccacgauccuggccgcggugacccugugcuucgccagcucccagaacaucaccgaggaguucuaccagagcacgugcuccgccgucagcaagggcuaccucggcgcccugcgcaccgggugguacaccagcgugaucaccaucgagcuguccaacaucaaggagaucaagugcaacggcaccgacgccaaggugaagcucaucaagcaggagcuggacaaguacaagaacgcggucacggaccugcagcuccugaugcagagcaccccggccgccggcuccgggagcgcgaucugcuccggcaucgccgucugcaaggugcugcaccucgagggcgaggugaacaagaucaagaacgcccugcuguccaccaacaaggccgucgugagccucuccaacggggugagcguccugaccuucaaggugcuggaccucaagaacuacaucgacaagcagcugcugcccauccugaacaagcagagcugcuccauccccaacaucgagaccgucaucgaguuccagcagaagaacaaccgccuccuggagaucacgcgggaguucagcgugaacgcgggcgugaccacccccgucuccaccuacaugcugacgaacagcgagcuccugucccugaucaacgacaugccgaucaccaacgaccagaagaagcucaugagcaacaacgugcagaucgugcgccagcaguccuacagcaucaugugcaucaucaaggaggagguccuggccuacguggugcagcugccccucuacggggucaucgacacccccugcuggaagcugcacaccagcccccugugcacgaccaacaccaaggagggcuccaacaucugccucacccggacggaccgcgggugguacugcgacaacgccggcagcguguccuucuucccgcaggccgagaccugcaagguccagagcaaccggguguucugcgacaccaugaacucccugacccugcccagcgaggugaaccucugcaacaucgacaucuucaaccccaaguacgacugcaagaucaugacguccaagaccgacgucagcuccagcgugaucaccucccugggcgccaucgugagcugcuacgggaagaccaagugcacggcgagcaacaagaaccgcggcaucaucaagaccuucuccaacgggugcgacuacgucagcaacaagggcguggacaccguguccgucggcaacacccuguacugcgugaacaagcaggagggccagagccucuacgugaagggggagcccaucaucaacuucuacgacccgcuggucuuccccuccgacgaguucgacgccagcaucucccaggugaacgagaagaucaaccagagccuggccuucauccggaaguccgacgagcuccugcacaacgugaacgucggcaagagcaccacgaacaucaugaucaccaccaucaucaucgugaucaucgugauccugcugcuccugaucgccgucgggcuguuccucuacugcaaggcccgcuccacccccgugacgcugagcaaggaccagcuguccgggaucaacaacaucgcguucagcaacugaggacuaguguccaccugucccuccugggcugcuggauugucucguuuuccugccaaauaaacaggaucagcgcuuuacagaucuaaaaaaaaaaaaaaaaaaaaaaaaaaaaaaaaaaaaaaaaaaaaaaaaaaaaaaaaaaaaaaaaugcaucccccccccccccccccccccccccccccccaaaggcucuuuucagagccaccagaauu

SEQ ID NO: 15482 - RNA, 1897 nt, Artificial Sequence
  mRNA product Design b-3 comprising derived and/or modified sequence from HRSV(Memphis-37)__AIY60640.1__F_DSCav1_mut3 (opt1)
gggagagucccgcagucggcguccagcggcucugcuuguucgugugugugucguugcaggccuuauucaagcuuaccauggagcugcccauccucaagaccaacgccaucaccacgauccuggccgcggugacccugugcuucgccagcucccagaacaucaccgaggaguucuaccagagcacgugcuccgccgucagcaagggcuaccucggggcccugcgcaccggcugguacaccuccgugaucaccaucgagcugagcaacaucaaggagaucaagugcaacgggaccgacgccaaggugaagcucaucaagcaggagcuggacaaguacaagaacgcggucacggaccugcagcuccugaugcaguccaccccggccgccggcagcggguccgccaucugcagcggcaucgcggugugcaaggugcugcaccucgagggcgaggucaacaagaucaagaacgcccugcuguccaccaacaaggccguggugagccucuccaacggggucagcgugcugaccuucaaggugcuggaccucaagaacuacaucgacaagcagcugcugcccauccucaacaagcaguccugcagcauccccaacaucgagacggucaucgaguuccagcagaagaacaaccggcugcuggagaucacccgcgaguucuccgugaacgccggcgugaccacccccgucagcacguacaugcucaccaacuccgagcugcugagccucaucaacgacaugccgaucaccaacgaccagaagaagcugaugagcaacaacgugcagaucgugcggcagcaguccuacagcaucaugugcaucaucaaggaggagguccuggccuacguggugcagcucccccuguacggggucaucgacacccccugcuggaagcugcacacgagcccccucugcaccaccaacaccaaggagggcuccaacaucugccugacgcgcaccgaccgggggugguacugcgacaacgcgggcuccgugagcuucuucccgcaggccgagaccugcaaggugcaguccaaccgcgucuucugcgacaccaugaacagccugacgcuccccuccgaggugaaccugugcaacaucgacaucuucaaccccaaguacgacugcaagaucaugaccagcaagaccgacgucuccagcuccgugaucaccagccugggcgccaucguguccugcuacgggaagacgaagugcaccgccagcaacaagaaccggggcaucaucaagaccuucuccaacgggugcgacuacgucagcaacaagggcguggacaccguguccgucggcaacacgcucuacugcgugaacaagcaggaggggcagagccuguacgugaagggcgagcccaucaucaacuucuacgacccgcuggucuuccccagcgacgaguucgacgccuccaucagccaggugaacgagaagaucaaccagucccucgcguucauccgcaagagcgacgagcugcugcacaacgugaacgucgggaaguccaccaccaacaucaugaucaccaccaucaucaucgugaucaucgugauccuccugcugcucaucgccgucggccuguuccuguacugcaaggcccggagcacgcccgugacccuguccaaggaccagcucagcgggaucaacaacaucgccuucuccaacugaggacuaguguccaccugucccuccugggcugcuggauugucucguuuuccugccaaauaaacaggaucagcgcuuuacagaucuaaaaaaaaaaaaaaaaaaaaaaaaaaaaaaaaaaaaaaaaaaaaaaaaaaaaaaaaaaaaaaaaugcaucccccccccccccccccccccccccccccccaaaggcucuuuucagagccaccagaauu

SEQ ID NO: 15483 - RNA, 1897 nt, Artificial Sequence
  mRNA product Design b-3 comprising derived and/or modified sequence from HRSV(Memphis-37)__AIY60640.1__F_DSCav1_mut3 (opt2)
gggagagucccgcagucggcguccagcggcucugcuuguucgugugugugucguugcaggccuuauucaagcuuaccauggagcuccccauccucaagaccaacgccaucaccaccauccucgccgccgucacccucugcuucgccuccucccagaacaucaccgaggaguucuaccaguccaccugcuccgccgucuccaagggcuaccucggcgcccuccgcaccggcugguacaccuccgucaucaccaucgagcucuccaacaucaaggagaucaagugcaacggcaccgacgccaaggucaagcucaucaagcaggagcucgacaaguacaagaacgccgucaccgaccuccagcuccucaugcaguccacccccgccgccggcuccggcuccgccaucugcuccggcaucgccgucugcaagguccuccaccucgagggcgaggucaacaagaucaagaacgcccuccucuccaccaacaaggccgucgucucccucuccaacggcgucuccguccucaccuucaagguccucgaccucaagaacuacaucgacaagcagcuccuccccauccucaacaagcaguccugcuccauccccaacaucgagaccgucaucgaguuccagcagaagaacaaccgccuccucgagaucacccgcgaguucuccgucaacgccggcgucaccacccccgucuccaccuacaugcucaccaacuccgagcuccucucccucaucaacgacaugcccaucaccaacgaccagaagaagcucauguccaacaacguccagaucguccgccagcaguccuacuccaucaugugcaucaucaaggaggagguccucgccuacgucguccagcucccccucuacggcgucaucgacacccccugcuggaagcuccacaccuccccccucugcaccaccaacaccaaggagggcuccaacaucugccucacccgcaccgaccgcggcugguacugcgacaacgccggcuccgucuccuucuucccccaggccgagaccugcaagguccaguccaaccgcgucuucugcgacaccaugaacucccucacccuccccuccgaggucaaccucugcaacaucgacaucuucaaccccaaguacgacugcaagaucaugaccuccaagaccgacgucuccuccuccgucaucaccucccucggcgccaucgucuccugcuacggcaagaccaagugcaccgccuccaacaagaaccgcggcaucaucaagaccuucuccaacggcugcgacuacgucuccaacaagggcgucgacaccgucuccgucggcaacacccucuacugcgucaacaagcaggagggccagucccucuacgucaagggcgagcccaucaucaacuucuacgacccccucgucuuccccuccgacgaguucgacgccuccaucucccaggucaacgagaagaucaaccagucccucgccuucauccgcaaguccgacgagcuccuccacaacgucaacgucggcaaguccaccaccaacaucaugaucaccaccaucaucaucgucaucaucgucauccuccuccuccucaucgccgucggccucuuccucuacugcaaggcccgcuccacccccgucacccucuccaaggaccagcucuccggcaucaacaacaucgccuucuccaacugaggacuaguguccaccugucccuccugggcugcuggauugucucguuuuccugccaaauaaacaggaucagcgcuuuacagaucuaaaaaaaaaaaaaaaaaaaaaaaaaaaaaaaaaaaaaaaaaaaaaaaaaaaaaaaaaaaaaaaaugcaucccccccccccccccccccccccccccccccaaaggcucuuuucagagccaccagaauu

SEQ ID NO: 15484 - RNA, 1897 nt, Artificial Sequence
  mRNA product Design b-3 comprising derived and/or modified sequence from HRSV(Memphis-37)__AIY60640.1__F_DSCav1_mut3 (opt3)
gggagagucccgcagucggcguccagcggcucugcuuguucgugugugugucguugcaggccuuauucaagcuuaccauggagcugcccauccucaagaccaacgccauuacaacuauacuugcugcagugacgcugugcuucgccagcucccagaauaucaccgaagaguuuuaccaaucuacauguucagcggucaguaaaggcuauuugggggcuuuaagaacuggaugguacaccagcguuauuacaaucgaacuguccaacauuaaggagaucaaaugcaaugguaccgacgccaaggugaaacuaauaaagcaggaacucgauaaguauaaaaacgcaguaacugaccugcagcuucugaugcagucuacuccugccgcuggcucggggucagcaaucuguagcggaauugccgugugcaaggucuugcaccucgagggcgaggugaauaaaaucaagaacgcucugcugaguaccaauaaagccguugugucccucucuaacggugucagcguguuaacguucaagguacuggaucuuaagaauuacauugacaaacaauugcugccaauccuaaacaagcaguccuguucaauaccgaauauugaaacuguuaucgaguuucagcagaaaaacaauaggcuccuggaaauuacccgggaguucagugugaacgcgggggucacaacucccgugagcaccuauaugcuuacaaauucugagcuguugucccucaucaacgauaugccuaucaccaacgaccaaaagaaacugaugucaaauaacgugcagauuguccgccagcagagcuacaguauaaugugcaucauuaaggaagagguuuuagcauaugugguacaacugccacucuacggagugaucgauacgcccuguuggaaacuucauacuucuccucugugcacaaccaauacuaaggaaggcuccaacauauguuugacacgaaccgaccguggcugguacugcgauaaugccgggagcgucucguuuuucccacaggcugagacguguaaggugcagucuaacagaguuuucugcgacaccaugaacucccuaacacugcccucagaagugaaucucugcaauauugauaucuucaacccuaaauaugacuguaagaucaugacaaguaaaaccgaugucagcuccucugugauuacaagccugggagccaucguaucaugcuacgguaagacuaaauguaccgcaaguaauaagaacaggggcauuauaaagacauuuuccaaugggugcgacuauguuagcaacaaaggaguggacaccgucucugugggcaauacucuuuacugugucaacaagcaagagggucagucacuguaugugaaaggggagccaaucauuaacuucuacgauccguugguuuuucccagugacgaauuugaugcuagcaucucccaggugaaugagaagaucaaccagucucucgccuuuauucggaaaucggacgaacuguuacacaauguaaacgucggaaagagcacgacaaauauaaugaucaccacuauuaucauugugaucauaguuauccugcuacuccugauugcggugggccuuuucuuguauugcaaggcccgcuccaccccugucacacugucaaaagaucaacucaguggcaucaacaauauugcauucucuaacugaggacuaguguccaccugucccuccugggcugcuggauugucucguuuuccugccaaauaaacaggaucagcgcuuuacagaucuaaaaaaaaaaaaaaaaaaaaaaaaaaaaaaaaaaaaaaaaaaaaaaaaaaaaaaaaaaaaaaaaugcaucccccccccccccccccccccccccccccccaaaggcucuuuucagagccaccagaauu

SEQ ID NO: 15485 - RNA, 1897 nt, Artificial Sequence
  mRNA product Design b-3 comprising derived and/or modified sequence from HRSV(Memphis-37)__AIY60640.1__F_DSCav1_mut3 (opt4)
gggagagucccgcagucggcguccagcggcucugcuuguucgugugugugucguugcaggccuuauucaagcuuaccauggagcugcccauccugaagaccaacgccaucaccaccauccuggccgccgugacccugugcuucgccagcagccagaacaucaccgaggaguucuaccagagcaccugcagcgccgugagcaagggcuaccugggcgcccugagaaccggcugguacaccagcgugaucaccaucgagcugagcaacaucaaggagaucaagugcaacggcaccgacgccaaggugaagcugaucaagcaggagcuggacaaguacaagaacgccgugaccgaccugcagcugcugaugcagagcacccccgccgccggcagcggcagcgccaucugcagcggcaucgccgugugcaaggugcugcaccuggagggcgaggugaacaagaucaagaacgcccugcugagcaccaacaaggccguggugagccugagcaacggcgugagcgugcugaccuucaaggugcuggaccugaagaacuacaucgacaagcagcugcugcccauccugaacaagcagagcugcagcauccccaacaucgagaccgugaucgaguuccagcagaagaacaacagacugcuggagaucaccagagaguucagcgugaacgccggcgugaccacccccgugagcaccuacaugcugaccaacagcgagcugcugagccugaucaacgacaugcccaucaccaacgaccagaagaagcugaugagcaacaacgugcagaucgugagacagcagagcuacagcaucaugugcaucaucaaggaggaggugcuggccuacguggugcagcugccccuguacggcgugaucgacacccccugcuggaagcugcacaccagcccccugugcaccaccaacaccaaggagggcagcaacaucugccugaccagaaccgacagaggcugguacugcgacaacgccggcagcgugagcuucuucccccaggccgagaccugcaaggugcagagcaacagaguguucugcgacaccaugaacagccugacccugcccagcgaggugaaccugugcaacaucgacaucuucaaccccaaguacgacugcaagaucaugaccagcaagaccgacgugagcagcagcgugaucaccagccugggcgccaucgugagcugcuacggcaagaccaagugcaccgccagcaacaagaacagaggcaucaucaagaccuucagcaacggcugcgacuacgugagcaacaagggcguggacaccgugagcgugggcaacacccuguacugcgugaacaagcaggagggccagagccuguacgugaagggcgagcccaucaucaacuucuacgacccccugguguuccccagcgacgaguucgacgccagcaucagccaggugaacgagaagaucaaccagagccuggccuucaucagaaagagcgacgagcugcugcacaacgugaacgugggcaagagcaccaccaacaucaugaucaccaccaucaucaucgugaucaucgugauccugcugcugcugaucgccgugggccuguuccuguacugcaaggccagaagcacccccgugacccugagcaaggaccagcugagcggcaucaacaacaucgccuucagcaacugaggacuaguguccaccugucccuccugggcugcuggauugucucguuuuccugccaaauaaacaggaucagcgcuuuacagaucuaaaaaaaaaaaaaaaaaaaaaaaaaaaaaaaaaaaaaaaaaaaaaaaaaaaaaaaaaaaaaaaaugcaucccccccccccccccccccccccccccccccaaaggcucuuuucagagccaccagaauu

SEQ ID NO: 15486 - RNA, 1897 nt, Artificial Sequence
  mRNA product Design b-3 comprising derived and/or modified sequence from HRSV(Memphis-37)__AIY60640.1__F_DSCav1_mut3 (opt5)
gggagagucccgcagucggcguccagcggcucugcuuguucgugugugugucguugcaggccuuauucaagcuuaccauggagcugcccauccucaagaccaacgccauuacaacgauccuggcugccgugacccuuugcuucgcgagcucccagaauauuacagaagaguuuuaccaaucuaccuguagcgcugucuccaaaggcuaucugggggcccucagaacaggaugguacaccucuguuaucacaauugaacugagcaacaucaaggagaucaaaugcaauggcaccgacgccaaggugaaacuuauuaagcaggaacuggauaaguauaaaaacgcugugacggaccuccagcugcugaugcaguccaccccugccgcugggucuggaagcgccaucuguuccggcauugcggucugcaaggugcuccaccuggagggggagguuaauaaaaucaagaacgcccuucugagcacaaauaaagcuguggucucucucuccaacggagugagcguucugaccuucaaggugcuugaucugaagaauuacauugacaaacaacuccugccgauccugaacaagcagucuuguuccauucccaauaucgaaacagucaucgaguuucagcagaaaaacaaucggcuccuggaaauuacccgcgaguucagcgugaacgccggcgugacgacaccugucucuaccuauaugcuuacaaauuccgagcugcucagccugaucaacgauaugcccauuaccaacgaccaaaagaaacuuauguccaauaacguucagaucgugagacagcagucuuacagcauuaugugcaucaucaaggaagaggugcuggcuuaugucgugcaacucccucuguacggcguuauugauacccccuguuggaaacugcauacauccccucucugcacgaccaauacaaaggaagggagcaacaucugucugacccggacagaccgcggaugguacugcgauaaugccggcucuguguccuuuuucccgcaggcggagaccuguaagguccagagcaacagaguguuuugcgacacgaugaacucucuuacacugcccagcgaaguuaaucucugcaauauugauaucuucaacccuaaauaugacuguaagauuaugaccuccaaaaccgaugugucuagcuccgucaucacaagccugggggccaucgugucuugcuacggaaagaccaaauguacagcuuccaauaagaaccggggcauuaucaagacguuuagcaaugggugcgacuaugucucuaacaaaggaguggacaccguuuccgugggcaauacacuuuacugugucaacaagcaagagggccagagccuguaugugaaaggggagcccauuaucaacuucuacgauccucucguuuuucccuccgacgaguucgaugccucuauuagccaggugaaugaaaagaucaaccagucccuggcuuuuauucgcaaaucugacgaacugcuccacaaugucaacgugggaaagagcaccacaaauaucaugaucaccacgauuaucauugugaucauuguuauccugcuucugcucaucgccgucggccuguuccuguauugcaaggccagauccaccccggugacacuuagcaaagaucaacucucugggauuaacaauaucgcuuucuccaacugaggacuaguguccaccugucccuccugggcugcuggauugucucguuuuccugccaaauaaacaggaucagcgcuuuacagaucuaaaaaaaaaaaaaaaaaaaaaaaaaaaaaaaaaaaaaaaaaaaaaaaaaaaaaaaaaaaaaaaaugcaucccccccccccccccccccccccccccccccaaaggcucuuuucagagccaccagaauu

SEQ ID NO: 15487 - RNA, 1897 nt, Artificial Sequence
  mRNA product Design b-3 comprising derived and/or modified sequence from HRSV(Memphis-37)__AIY60640.1__F_DSCav1_mut3 (opt6)
gggagagucccgcagucggcguccagcggcucugcuuguucgugugugugucguugcaggccuuauucaagcuuaccauggaauuaccaauacuaaaaacaaaugccaucaccaccauccuggccgccguaacauuaugcuucgcaaguucacaaaauauaacagaagaauuuuaucaaucaacuugcagcgccguaucaaaaggcuacuuaggcgcacuacguacaggaugguacacaucaguaauaaccauagaacuauccaauauuaaagaaauaaaaugcaauggaacagacgcaaaaguuaaacuaauaaaacaagaauuagacaaauacaaaaacgcaguaaccgaccuucaauuacuaaugcaaucuacccccgcugcagguuccggaucagcaauauguucaggaauugcaguaugcaaaguccuacacuuagaaggagaaguaaacaaaauaaaaaacgcacuauuaagcaccaauaaagcagucguaucauuauccaacggcguuucaguacuaacauuuaaaguacuugaccuaaaaaacuauauagacaaacaacuacuucccauccuuaacaaacaaagcugcucaauaccuaauaucgaaacaguaauagaauuucaacaaaaaaacaaucgauuauuagaaaucacacgagaauuuucugucaacgcaggagucaccacacccguaucuacuuauauguuaaccaacucugaauuauuaucacuaaucaaugacaugccaauaacaaacgaucaaaaaaaauuaaugucaaauaacguacaaauaguaagacaacaaucauacucaauaaugugcauuauaaaagaagaaguacuagccuauguuguacaacucccacucuacggcguaauagacacaccaugcuggaaauuacacacuucaccacuaugcacaacaaacacaaaagaaggaucaaacaucugccuaaccagaaccgauagaggaugguauugcgacaaugccggaucaguuucauucuucccacaagcagaaacaugcaaaguacaauccaacagaguuuucugugacacaaugaacucgcuaacauuacccagcgaaguaaaccucugcaacauagacauauucaacccaaaauacgauugcaaaauaaugacuucuaaaacagauguuuccucaagcgucauaacgaguuuaggagcaauaguaagcuguuacggaaaaaccaaauguaccgcaucaaacaaaaaccgaggaauaauaaaaaccuuuucaaacggaugcgauuacgucuccaacaaaggagucgacacaguaucaguuggcaauacucuuuacugcguaaauaaacaagaaggacaaucacuauacguaaaaggcgaaccaauaauaaacuucuacgacccccucgucuucccuucagaugaauuugacgcaagcaucucacaaguuaaugaaaaaauaaaucaauccuuagcauucauacgaaaaucagacgaacuauuacacaacguaaacguaggaaaaucaacgacaaacauaaugauaacaacuaucauuauagucauaauagucauacuacuacuauuaauagccguaggcuuauuccuauacugcaaagcaagaucuacuccaguaacacucucaaaagaccaauuaucuggaauaaauaacauagcauucucuaauuaaggacuaguguccaccugucccuccugggcugcuggauugucucguuuuccugccaaauaaacaggaucagcgcuuuacagaucuaaaaaaaaaaaaaaaaaaaaaaaaaaaaaaaaaaaaaaaaaaaaaaaaaaaaaaaaaaaaaaaaugcaucccccccccccccccccccccccccccccccaaaggcucuuuucagagccaccagaauu

SEQ ID NO: 15488 - RNA, 1897 nt, Artificial Sequence
  mRNA product Design b-3 comprising derived and/or modified sequence from HRSV(Memphis-37)__AIY60640.1__F_DSCav1_mut3 (opt11)
gggagagucccgcagucggcguccagcggcucugcuuguucgugugugugucguugcaggccuuauucaagcuuaccauggaacuccccauccucaaaaccaacgccauuaccacgauccucgccgcagucacccucugcuucgccuccucacaaaacaucacagaagaauuuuaccaaaguaccugcuccgccgucagcaaaggauaccucggcgcccuccgcaccggcugguacacauccgucauaaccaucgaacucagcaacaucaaagaaaucaaauguaacggaaccgacgccaaaguaaaacuaauaaaacaagaacucgacaaauacaagaacgccgucaccgaccuccaacuccucaugcaaucuacccccgccgccggcucagguagcgccaucugcagcgguauugccgucugcaaaguacuccaccuagaaggagaagucaauaaaaucaaaaacgcccuacucuccaccaacaaggcagucgucagccucuccaacggcgucucagucuuaaccuucaaagugcucgaccucaaaaauuacauagacaaacaacuacuccccauucucaacaaacaauccugcuccauacccaacauagaaaccgucauugaauuucaacagaaaaacaaccgccuccucgaaaucacgcgcgaguucagugucaacgccggcgucaccaccccagucucgacauacaugcucacaaacucagaacuccucucguuaaucaacgacaugccaauaaccaacgaccaaaagaaacuaauguccaacaacguucaaauaguucgccaacaaucauacuccauaaugugcaucaucaaagaagaaguccucgccuacguuguacaauuaccccucuacggcgucaucgacacaccaugcuggaaacuccacacaucgccccucugcaccaccaacaccaaagaaggcagcaacauuugccucacccggacagaccgcggcugguacugcgacaaugcaggcagcgucucauucuucccacaagccgaaaccugcaaaguccaaagcaaccgugucuucugcgacacaaugaacucccuuacccucccaagcgaaguaaaccucugcaauauugacaucuucaaccccaaauacgacugcaaaaucaugaccuccaaaaccgacgucuccucaucagucaucaccucccuuggcgccauugucuccuguuacgguaaaaccaaaugcaccgccuccaacaaaaaccgcggcaucaucaaaaccuucucuaacggcugcgacuacgucucaaacaaaggcgucgacacugucuccgucggcaacacccuauacugcgucaacaagcaagaaggacagucccuauacguaaaaggugaaccaauuaucaacuucuacgacccccuagucuucccauccgacgaguucgaugccuccaucucccaaguaaaugaaaagaucaaucaaagccuggccuucauccgcaaauccgacgaacuacuccacaaugucaacgucggaaaaucaacaacaaacaucaugaucaccaccaucaucaucgucaucauaguaauccuccuacugcucaucgccgucggucucuuccuauacugcaaagcccguucuacuccagucacccucuccaaagaccaacuaucaggaaucaacaacaucgccuucagcaacuaaggacuaguguccaccugucccuccugggcugcuggauugucucguuuuccugccaaauaaacaggaucagcgcuuuacagaucuaaaaaaaaaaaaaaaaaaaaaaaaaaaaaaaaaaaaaaaaaaaaaaaaaaaaaaaaaaaaaaaaugcaucccccccccccccccccccccccccccccccaaaggcucuuuucagagccaccagaauu

SEQ ID NO: 15489 - RNA, 1948 nt, Artificial Sequence
  mRNA product Design b-4 comprising derived and/or modified sequence from HRSV(Memphis-37)__AIY60640.1__F_DSCav1_mut3 (opt1)
gggagagucccgcagucggcguccagcggcucugcuuguucgugugugugucguugcaggccuuauucaagcuuaccauggagcugcccauccucaagaccaacgccaucaccacgauccuggccgcggugacccugugcuucgccagcucccagaacaucaccgaggaguucuaccagagcacgugcuccgccgucagcaagggcuaccucggcgcccugcgcaccgggugguacaccagcgugaucaccaucgagcuguccaacaucaaggagaucaagugcaacggcaccgacgccaaggugaagcucaucaagcaggagcuggacaaguacaagaacgcggucacggaccugcagcuccugaugcagagcaccccggccgccggcuccgggagcgcgaucugcuccggcaucgccgucugcaaggugcugcaccucgagggcgaggugaacaagaucaagaacgcccugcuguccaccaacaaggccgucgugagccucuccaacggggugagcguccugaccuucaaggugcuggaccucaagaacuacaucgacaagcagcugcugcccauccugaacaagcagagcugcuccauccccaacaucgagaccgucaucgaguuccagcagaagaacaaccgccuccuggagaucacgcgggaguucagcgugaacgcgggcgugaccacccccgucuccaccuacaugcugacgaacagcgagcuccugucccugaucaacgacaugccgaucaccaacgaccagaagaagcucaugagcaacaacgugcagaucgugcgccagcaguccuacagcaucaugugcaucaucaaggaggagguccuggccuacguggugcagcugccccucuacggggucaucgacacccccugcuggaagcugcacaccagcccccugugcacgaccaacaccaaggagggcuccaacaucugccucacccggacggaccgcgggugguacugcgacaacgccggcagcguguccuucuucccgcaggccgagaccugcaagguccagagcaaccggguguucugcgacaccaugaacucccugacccugcccagcgaggugaaccucugcaacaucgacaucuucaaccccaaguacgacugcaagaucaugacguccaagaccgacgucagcuccagcgugaucaccucccugggcgccaucgugagcugcuacgggaagaccaagugcacggcgagcaacaagaaccgcggcaucaucaagaccuucuccaacgggugcgacuacgucagcaacaagggcguggacaccguguccgucggcaacacccuguacugcgugaacaagcaggagggccagagccucuacgugaagggggagcccaucaucaacuucuacgacccgcuggucuuccccuccgacgaguucgacgccagcaucucccaggugaacgagaagaucaaccagagccuggccuucauccggaaguccgacgagcuccugcacaacgugaacgucggcaagagcaccacgaacaucaugaucaccaccaucaucaucgugaucaucgugauccugcugcuccugaucgccgucgggcuguuccucuacugcaaggcccgcuccacccccgugacgcugagcaaggaccagcuguccgggaucaacaacaucgcguucagcaacugaggacuaguaauaaggaaacuguaugaaugucugugggcaggaagugaagagauccuucuguaaagguuuuuggaauuaugucugcugaauaauaaacuuuuuugaaauaauaaaucugguagaaaaaugagaucuaaaaaaaaaaaaaaaaaaaaaaaaaaaaaaaaaaaaaaaaaaaaaaaaaaaaaaaaaaaaaaaaugcaucccccccccccccccccccccccccccccccaaaggcucuuuucagagccaccagaauu

SEQ ID NO: 15490 - RNA, 1948 nt, Artificial Sequence
  mRNA product Design b-4 comprising derived and/or modified sequence from HRSV(Memphis-37)__AIY60640.1__F_DSCav1_mut3 (opt1)
gggagagucccgcagucggcguccagcggcucugcuuguucgugugugugucguugcaggccuuauucaagcuuaccauggagcugcccauccucaagaccaacgccaucaccacgauccuggccgcggugacccugugcuucgccagcucccagaacaucaccgaggaguucuaccagagcacgugcuccgccgucagcaagggcuaccucggggcccugcgcaccggcugguacaccuccgugaucaccaucgagcugagcaacaucaaggagaucaagugcaacgggaccgacgccaaggugaagcucaucaagcaggagcuggacaaguacaagaacgcggucacggaccugcagcuccugaugcaguccaccccggccgccggcagcggguccgccaucugcagcggcaucgcggugugcaaggugcugcaccucgagggcgaggucaacaagaucaagaacgcccugcuguccaccaacaaggccguggugagccucuccaacggggucagcgugcugaccuucaaggugcuggaccucaagaacuacaucgacaagcagcugcugcccauccucaacaagcaguccugcagcauccccaacaucgagacggucaucgaguuccagcagaagaacaaccggcugcuggagaucacccgcgaguucuccgugaacgccggcgugaccacccccgucagcacguacaugcucaccaacuccgagcugcugagccucaucaacgacaugccgaucaccaacgaccagaagaagcugaugagcaacaacgugcagaucgugcggcagcaguccuacagcaucaugugcaucaucaaggaggagguccuggccuacguggugcagcucccccuguacggggucaucgacacccccugcuggaagcugcacacgagcccccucugcaccaccaacaccaaggagggcuccaacaucugccugacgcgcaccgaccgggggugguacugcgacaacgcgggcuccgugagcuucuucccgcaggccgagaccugcaaggugcaguccaaccgcgucuucugcgacaccaugaacagccugacgcuccccuccgaggugaaccugugcaacaucgacaucuucaaccccaaguacgacugcaagaucaugaccagcaagaccgacgucuccagcuccgugaucaccagccugggcgccaucguguccugcuacgggaagacgaagugcaccgccagcaacaagaaccggggcaucaucaagaccuucuccaacgggugcgacuacgucagcaacaagggcguggacaccguguccgucggcaacacgcucuacugcgugaacaagcaggaggggcagagccuguacgugaagggcgagcccaucaucaacuucuacgacccgcuggucuuccccagcgacgaguucgacgccuccaucagccaggugaacgagaagaucaaccagucccucgcguucauccgcaagagcgacgagcugcugcacaacgugaacgucgggaaguccaccaccaacaucaugaucaccaccaucaucaucgugaucaucgugauccuccugcugcucaucgccgucggccuguuccuguacugcaaggcccggagcacgcccgugacccuguccaaggaccagcucagcgggaucaacaacaucgccuucuccaacugaggacuaguaauaaggaaacuguaugaaugucugugggcaggaagugaagagauccuucuguaaagguuuuuggaauuaugucugcugaauaauaaacuuuuuugaaauaauaaaucugguagaaaaaugagaucuaaaaaaaaaaaaaaaaaaaaaaaaaaaaaaaaaaaaaaaaaaaaaaaaaaaaaaaaaaaaaaaaugcaucccccccccccccccccccccccccccccccaaaggcucuuuucagagccaccagaauu

SEQ ID NO: 15491 - RNA, 1948 nt, Artificial Sequence
  mRNA product Design b-4 comprising derived and/or modified sequence from HRSV(Memphis-37)__AIY60640.1__F_DSCav1_mut3 (opt2)
gggagagucccgcagucggcguccagcggcucugcuuguucgugugugugucguugcaggccuuauucaagcuuaccauggagcuccccauccucaagaccaacgccaucaccaccauccucgccgccgucacccucugcuucgccuccucccagaacaucaccgaggaguucuaccaguccaccugcuccgccgucuccaagggcuaccucggcgcccuccgcaccggcugguacaccuccgucaucaccaucgagcucuccaacaucaaggagaucaagugcaacggcaccgacgccaaggucaagcucaucaagcaggagcucgacaaguacaagaacgccgucaccgaccuccagcuccucaugcaguccacccccgccgccggcuccggcuccgccaucugcuccggcaucgccgucugcaagguccuccaccucgagggcgaggucaacaagaucaagaacgcccuccucuccaccaacaaggccgucgucucccucuccaacggcgucuccguccucaccuucaagguccucgaccucaagaacuacaucgacaagcagcuccuccccauccucaacaagcaguccugcuccauccccaacaucgagaccgucaucgaguuccagcagaagaacaaccgccuccucgagaucacccgcgaguucuccgucaacgccggcgucaccacccccgucuccaccuacaugcucaccaacuccgagcuccucucccucaucaacgacaugcccaucaccaacgaccagaagaagcucauguccaacaacguccagaucguccgccagcaguccuacuccaucaugugcaucaucaaggaggagguccucgccuacgucguccagcucccccucuacggcgucaucgacacccccugcuggaagcuccacaccuccccccucugcaccaccaacaccaaggagggcuccaacaucugccucacccgcaccgaccgcggcugguacugcgacaacgccggcuccgucuccuucuucccccaggccgagaccugcaagguccaguccaaccgcgucuucugcgacaccaugaacucccucacccuccccuccgaggucaaccucugcaacaucgacaucuucaaccccaaguacgacugcaagaucaugaccuccaagaccgacgucuccuccuccgucaucaccucccucggcgccaucgucuccugcuacggcaagaccaagugcaccgccuccaacaagaaccgcggcaucaucaagaccuucuccaacggcugcgacuacgucuccaacaagggcgucgacaccgucuccgucggcaacacccucuacugcgucaacaagcaggagggccagucccucuacgucaagggcgagcccaucaucaacuucuacgacccccucgucuuccccuccgacgaguucgacgccuccaucucccaggucaacgagaagaucaaccagucccucgccuucauccgcaaguccgacgagcuccuccacaacgucaacgucggcaaguccaccaccaacaucaugaucaccaccaucaucaucgucaucaucgucauccuccuccuccucaucgccgucggccucuuccucuacugcaaggcccgcuccacccccgucacccucuccaaggaccagcucuccggcaucaacaacaucgccuucuccaacugaggacuaguaauaaggaaacuguaugaaugucugugggcaggaagugaagagauccuucuguaaagguuuuuggaauuaugucugcugaauaauaaacuuuuuugaaauaauaaaucugguagaaaaaugagaucuaaaaaaaaaaaaaaaaaaaaaaaaaaaaaaaaaaaaaaaaaaaaaaaaaaaaaaaaaaaaaaaaugcaucccccccccccccccccccccccccccccccaaaggcucuuuucagagccaccagaauu

SEQ ID NO: 15492 - RNA, 1948 nt, Artificial Sequence
  mRNA product Design b-4 comprising derived and/or modified sequence from HRSV(Memphis-37)__AIY60640.1__F_DSCav1_mut3 (opt3)
gggagagucccgcagucggcguccagcggcucugcuuguucgugugugugucguugcaggccuuauucaagcuuaccauggagcugcccauccucaagaccaacgccauuacaacuauacuugcugcagugacgcugugcuucgccagcucccagaauaucaccgaagaguuuuaccaaucuacauguucagcggucaguaaaggcuauuugggggcuuuaagaacuggaugguacaccagcguuauuacaaucgaacuguccaacauuaaggagaucaaaugcaaugguaccgacgccaaggugaaacuaauaaagcaggaacucgauaaguauaaaaacgcaguaacugaccugcagcuucugaugcagucuacuccugccgcuggcucggggucagcaaucuguagcggaauugccgugugcaaggucuugcaccucgagggcgaggugaauaaaaucaagaacgcucugcugaguaccaauaaagccguugugucccucucuaacggugucagcguguuaacguucaagguacuggaucuuaagaauuacauugacaaacaauugcugccaauccuaaacaagcaguccuguucaauaccgaauauugaaacuguuaucgaguuucagcagaaaaacaauaggcuccuggaaauuacccgggaguucagugugaacgcgggggucacaacucccgugagcaccuauaugcuuacaaauucugagcuguugucccucaucaacgauaugccuaucaccaacgaccaaaagaaacugaugucaaauaacgugcagauuguccgccagcagagcuacaguauaaugugcaucauuaaggaagagguuuuagcauaugugguacaacugccacucuacggagugaucgauacgcccuguuggaaacuucauacuucuccucugugcacaaccaauacuaaggaaggcuccaacauauguuugacacgaaccgaccguggcugguacugcgauaaugccgggagcgucucguuuuucccacaggcugagacguguaaggugcagucuaacagaguuuucugcgacaccaugaacucccuaacacugcccucagaagugaaucucugcaauauugauaucuucaacccuaaauaugacuguaagaucaugacaaguaaaaccgaugucagcuccucugugauuacaagccugggagccaucguaucaugcuacgguaagacuaaauguaccgcaaguaauaagaacaggggcauuauaaagacauuuuccaaugggugcgacuauguuagcaacaaaggaguggacaccgucucugugggcaauacucuuuacugugucaacaagcaagagggucagucacuguaugugaaaggggagccaaucauuaacuucuacgauccguugguuuuucccagugacgaauuugaugcuagcaucucccaggugaaugagaagaucaaccagucucucgccuuuauucggaaaucggacgaacuguuacacaauguaaacgucggaaagagcacgacaaauauaaugaucaccacuauuaucauugugaucauaguuauccugcuacuccugauugcggugggccuuuucuuguauugcaaggcccgcuccaccccugucacacugucaaaagaucaacucaguggcaucaacaauauugcauucucuaacugaggacuaguaauaaggaaacuguaugaaugucugugggcaggaagugaagagauccuucuguaaagguuuuuggaauuaugucugcugaauaauaaacuuuuuugaaauaauaaaucugguagaaaaaugagaucuaaaaaaaaaaaaaaaaaaaaaaaaaaaaaaaaaaaaaaaaaaaaaaaaaaaaaaaaaaaaaaaaugcaucccccccccccccccccccccccccccccccaaaggcucuuuucagagccaccagaauu

SEQ ID NO: 15493 - RNA, 1948 nt, Artificial Sequence
  mRNA product Design b-4 comprising derived and/or modified sequence from HRSV(Memphis-37)__AIY60640.1__F_DSCav1_mut3 (opt4)
gggagagucccgcagucggcguccagcggcucugcuuguucgugugugugucguugcaggccuuauucaagcuuaccauggagcugcccauccugaagaccaacgccaucaccaccauccuggccgccgugacccugugcuucgccagcagccagaacaucaccgaggaguucuaccagagcaccugcagcgccgugagcaagggcuaccugggcgcccugagaaccggcugguacaccagcgugaucaccaucgagcugagcaacaucaaggagaucaagugcaacggcaccgacgccaaggugaagcugaucaagcaggagcuggacaaguacaagaacgccgugaccgaccugcagcugcugaugcagagcacccccgccgccggcagcggcagcgccaucugcagcggcaucgccgugugcaaggugcugcaccuggagggcgaggugaacaagaucaagaacgcccugcugagcaccaacaaggccguggugagccugagcaacggcgugagcgugcugaccuucaaggugcuggaccugaagaacuacaucgacaagcagcugcugcccauccugaacaagcagagcugcagcauccccaacaucgagaccgugaucgaguuccagcagaagaacaacagacugcuggagaucaccagagaguucagcgugaacgccggcgugaccacccccgugagcaccuacaugcugaccaacagcgagcugcugagccugaucaacgacaugcccaucaccaacgaccagaagaagcugaugagcaacaacgugcagaucgugagacagcagagcuacagcaucaugugcaucaucaaggaggaggugcuggccuacguggugcagcugccccuguacggcgugaucgacacccccugcuggaagcugcacaccagcccccugugcaccaccaacaccaaggagggcagcaacaucugccugaccagaaccgacagaggcugguacugcgacaacgccggcagcgugagcuucuucccccaggccgagaccugcaaggugcagagcaacagaguguucugcgacaccaugaacagccugacccugcccagcgaggugaaccugugcaacaucgacaucuucaaccccaaguacgacugcaagaucaugaccagcaagaccgacgugagcagcagcgugaucaccagccugggcgccaucgugagcugcuacggcaagaccaagugcaccgccagcaacaagaacagaggcaucaucaagaccuucagcaacggcugcgacuacgugagcaacaagggcguggacaccgugagcgugggcaacacccuguacugcgugaacaagcaggagggccagagccuguacgugaagggcgagcccaucaucaacuucuacgacccccugguguuccccagcgacgaguucgacgccagcaucagccaggugaacgagaagaucaaccagagccuggccuucaucagaaagagcgacgagcugcugcacaacgugaacgugggcaagagcaccaccaacaucaugaucaccaccaucaucaucgugaucaucgugauccugcugcugcugaucgccgugggccuguuccuguacugcaaggccagaagcacccccgugacccugagcaaggaccagcugagcggcaucaacaacaucgccuucagcaacugaggacuaguaauaaggaaacuguaugaaugucugugggcaggaagugaagagauccuucuguaaagguuuuuggaauuaugucugcugaauaauaaacuuuuuugaaauaauaaaucugguagaaaaaugagaucuaaaaaaaaaaaaaaaaaaaaaaaaaaaaaaaaaaaaaaaaaaaaaaaaaaaaaaaaaaaaaaaaugcaucccccccccccccccccccccccccccccccaaaggcucuuuucagagccaccagaauu

SEQ ID NO: 15494 - RNA, 1948 nt, Artificial Sequence
  mRNA product Design b-4 comprising derived and/or modified sequence from HRSV(Memphis-37)__AIY60640.1__F_DSCav1_mut3 (opt5)
gggagagucccgcagucggcguccagcggcucugcuuguucgugugugugucguugcaggccuuauucaagcuuaccauggagcugcccauccucaagaccaacgccauuacaacgauccuggcugccgugacccuuugcuucgcgagcucccagaauauuacagaagaguuuuaccaaucuaccuguagcgcugucuccaaaggcuaucugggggcccucagaacaggaugguacaccucuguuaucacaauugaacugagcaacaucaaggagaucaaaugcaauggcaccgacgccaaggugaaacuuauuaagcaggaacuggauaaguauaaaaacgcugugacggaccuccagcugcugaugcaguccaccccugccgcugggucuggaagcgccaucuguuccggcauugcggucugcaaggugcuccaccuggagggggagguuaauaaaaucaagaacgcccuucugagcacaaauaaagcuguggucucucucuccaacggagugagcguucugaccuucaaggugcuugaucugaagaauuacauugacaaacaacuccugccgauccugaacaagcagucuuguuccauucccaauaucgaaacagucaucgaguuucagcagaaaaacaaucggcuccuggaaauuacccgcgaguucagcgugaacgccggcgugacgacaccugucucuaccuauaugcuuacaaauuccgagcugcucagccugaucaacgauaugcccauuaccaacgaccaaaagaaacuuauguccaauaacguucagaucgugagacagcagucuuacagcauuaugugcaucaucaaggaagaggugcuggcuuaugucgugcaacucccucuguacggcguuauugauacccccuguuggaaacugcauacauccccucucugcacgaccaauacaaaggaagggagcaacaucugucugacccggacagaccgcggaugguacugcgauaaugccggcucuguguccuuuuucccgcaggcggagaccuguaagguccagagcaacagaguguuuugcgacacgaugaacucucuuacacugcccagcgaaguuaaucucugcaauauugauaucuucaacccuaaauaugacuguaagauuaugaccuccaaaaccgaugugucuagcuccgucaucacaagccugggggccaucgugucuugcuacggaaagaccaaauguacagcuuccaauaagaaccggggcauuaucaagacguuuagcaaugggugcgacuaugucucuaacaaaggaguggacaccguuuccgugggcaauacacuuuacugugucaacaagcaagagggccagagccuguaugugaaaggggagcccauuaucaacuucuacgauccucucguuuuucccuccgacgaguucgaugccucuauuagccaggugaaugaaaagaucaaccagucccuggcuuuuauucgcaaaucugacgaacugcuccacaaugucaacgugggaaagagcaccacaaauaucaugaucaccacgauuaucauugugaucauuguuauccugcuucugcucaucgccgucggccuguuccuguauugcaaggccagauccaccccggugacacuuagcaaagaucaacucucugggauuaacaauaucgcuuucuccaacugaggacuaguaauaaggaaacuguaugaaugucugugggcaggaagugaagagauccuucuguaaagguuuuuggaauuaugucugcugaauaauaaacuuuuuugaaauaauaaaucugguagaaaaaugagaucuaaaaaaaaaaaaaaaaaaaaaaaaaaaaaaaaaaaaaaaaaaaaaaaaaaaaaaaaaaaaaaaaugcaucccccccccccccccccccccccccccccccaaaggcucuuuucagagccaccagaauu

SEQ ID NO: 15495 - RNA, 1948 nt, Artificial Sequence
  mRNA product Design b-4 comprising derived and/or modified sequence from HRSV(Memphis-37)__AIY60640.1__F_DSCav1_mut3 (opt6)
gggagagucccgcagucggcguccagcggcucugcuuguucgugugugugucguugcaggccuuauucaagcuuaccauggaauuaccaauacuaaaaacaaaugccaucaccaccauccuggccgccguaacauuaugcuucgcaaguucacaaaauauaacagaagaauuuuaucaaucaacuugcagcgccguaucaaaaggcuacuuaggcgcacuacguacaggaugguacacaucaguaauaaccauagaacuauccaauauuaaagaaauaaaaugcaauggaacagacgcaaaaguuaaacuaauaaaacaagaauuagacaaauacaaaaacgcaguaaccgaccuucaauuacuaaugcaaucuacccccgcugcagguuccggaucagcaauauguucaggaauugcaguaugcaaaguccuacacuuagaaggagaaguaaacaaaauaaaaaacgcacuauuaagcaccaauaaagcagucguaucauuauccaacggcguuucaguacuaacauuuaaaguacuugaccuaaaaaacuauauagacaaacaacuacuucccauccuuaacaaacaaagcugcucaauaccuaauaucgaaacaguaauagaauuucaacaaaaaaacaaucgauuauuagaaaucacacgagaauuuucugucaacgcaggagucaccacacccguaucuacuuauauguuaaccaacucugaauuauuaucacuaaucaaugacaugccaauaacaaacgaucaaaaaaaauuaaugucaaauaacguacaaauaguaagacaacaaucauacucaauaaugugcauuauaaaagaagaaguacuagccuauguuguacaacucccacucuacggcguaauagacacaccaugcuggaaauuacacacuucaccacuaugcacaacaaacacaaaagaaggaucaaacaucugccuaaccagaaccgauagaggaugguauugcgacaaugccggaucaguuucauucuucccacaagcagaaacaugcaaaguacaauccaacagaguuuucugugacacaaugaacucgcuaacauuacccagcgaaguaaaccucugcaacauagacauauucaacccaaaauacgauugcaaaauaaugacuucuaaaacagauguuuccucaagcgucauaacgaguuuaggagcaauaguaagcuguuacggaaaaaccaaauguaccgcaucaaacaaaaaccgaggaauaauaaaaaccuuuucaaacggaugcgauuacgucuccaacaaaggagucgacacaguaucaguuggcaauacucuuuacugcguaaauaaacaagaaggacaaucacuauacguaaaaggcgaaccaauaauaaacuucuacgacccccucgucuucccuucagaugaauuugacgcaagcaucucacaaguuaaugaaaaaauaaaucaauccuuagcauucauacgaaaaucagacgaacuauuacacaacguaaacguaggaaaaucaacgacaaacauaaugauaacaacuaucauuauagucauaauagucauacuacuacuauuaauagccguaggcuuauuccuauacugcaaagcaagaucuacuccaguaacacucucaaaagaccaauuaucuggaauaaauaacauagcauucucuaauuaaggacuaguaauaaggaaacuguaugaaugucugugggcaggaagugaagagauccuucuguaaagguuuuuggaauuaugucugcugaauaauaaacuuuuuugaaauaauaaaucugguagaaaaaugagaucuaaaaaaaaaaaaaaaaaaaaaaaaaaaaaaaaaaaaaaaaaaaaaaaaaaaaaaaaaaaaaaaaugcaucccccccccccccccccccccccccccccccaaaggcucuuuucagagccaccagaauu

SEQ ID NO: 15496 - RNA, 1948 nt, Artificial Sequence
  mRNA product Design b-4 comprising derived and/or modified sequence from HRSV(Memphis-37)__AIY60640.1__F_DSCav1_mut3 (opt11)
gggagagucccgcagucggcguccagcggcucugcuuguucgugugugugucguugcaggccuuauucaagcuuaccauggaacuccccauccucaaaaccaacgccauuaccacgauccucgccgcagucacccucugcuucgccuccucacaaaacaucacagaagaauuuuaccaaaguaccugcuccgccgucagcaaaggauaccucggcgcccuccgcaccggcugguacacauccgucauaaccaucgaacucagcaacaucaaagaaaucaaauguaacggaaccgacgccaaaguaaaacuaauaaaacaagaacucgacaaauacaagaacgccgucaccgaccuccaacuccucaugcaaucuacccccgccgccggcucagguagcgccaucugcagcgguauugccgucugcaaaguacuccaccuagaaggagaagucaauaaaaucaaaaacgcccuacucuccaccaacaaggcagucgucagccucuccaacggcgucucagucuuaaccuucaaagugcucgaccucaaaaauuacauagacaaacaacuacuccccauucucaacaaacaauccugcuccauacccaacauagaaaccgucauugaauuucaacagaaaaacaaccgccuccucgaaaucacgcgcgaguucagugucaacgccggcgucaccaccccagucucgacauacaugcucacaaacucagaacuccucucguuaaucaacgacaugccaauaaccaacgaccaaaagaaacuaauguccaacaacguucaaauaguucgccaacaaucauacuccauaaugugcaucaucaaagaagaaguccucgccuacguuguacaauuaccccucuacggcgucaucgacacaccaugcuggaaacuccacacaucgccccucugcaccaccaacaccaaagaaggcagcaacauuugccucacccggacagaccgcggcugguacugcgacaaugcaggcagcgucucauucuucccacaagccgaaaccugcaaaguccaaagcaaccgugucuucugcgacacaaugaacucccuuacccucccaagcgaaguaaaccucugcaauauugacaucuucaaccccaaauacgacugcaaaaucaugaccuccaaaaccgacgucuccucaucagucaucaccucccuuggcgccauugucuccuguuacgguaaaaccaaaugcaccgccuccaacaaaaaccgcggcaucaucaaaaccuucucuaacggcugcgacuacgucucaaacaaaggcgucgacacugucuccgucggcaacacccuauacugcgucaacaagcaagaaggacagucccuauacguaaaaggugaaccaauuaucaacuucuacgacccccuagucuucccauccgacgaguucgaugccuccaucucccaaguaaaugaaaagaucaaucaaagccuggccuucauccgcaaauccgacgaacuacuccacaaugucaacgucggaaaaucaacaacaaacaucaugaucaccaccaucaucaucgucaucauaguaauccuccuacugcucaucgccgucggucucuuccuauacugcaaagcccguucuacuccagucacccucuccaaagaccaacuaucaggaaucaacaacaucgccuucagcaacuaaggacuaguaauaaggaaacuguaugaaugucugugggcaggaagugaagagauccuucuguaaagguuuuuggaauuaugucugcugaauaauaaacuuuuuugaaauaauaaaucugguagaaaaaugagaucuaaaaaaaaaaaaaaaaaaaaaaaaaaaaaaaaaaaaaaaaaaaaaaaaaaaaaaaaaaaaaaaaugcaucccccccccccccccccccccccccccccccaaaggcucuuuucagagccaccagaauu

SEQ ID NO: 15497 - RNA, 2010 nt, Artificial Sequence
  mRNA product Design b-5 comprising derived and/or modified sequence from HRSV(Memphis-37)__AIY60640.1__F_DSCav1_mut3 (opt1)
gggagacuccugucgggcggaaguaggaggaguagaguuuaaaaacaguacucuuuuuccgguucgggacguaguugaagcaacgacaagccggauaaccgcucuugagacaggaagcuuaccauggagcugcccauccucaagaccaacgccaucaccacgauccuggccgcggugacccugugcuucgccagcucccagaacaucaccgaggaguucuaccagagcacgugcuccgccgucagcaagggcuaccucggcgcccugcgcaccgggugguacaccagcgugaucaccaucgagcuguccaacaucaaggagaucaagugcaacggcaccgacgccaaggugaagcucaucaagcaggagcuggacaaguacaagaacgcggucacggaccugcagcuccugaugcagagcaccccggccgccggcuccgggagcgcgaucugcuccggcaucgccgucugcaaggugcugcaccucgagggcgaggugaacaagaucaagaacgcccugcuguccaccaacaaggccgucgugagccucuccaacggggugagcguccugaccuucaaggugcuggaccucaagaacuacaucgacaagcagcugcugcccauccugaacaagcagagcugcuccauccccaacaucgagaccgucaucgaguuccagcagaagaacaaccgccuccuggagaucacgcgggaguucagcgugaacgcgggcgugaccacccccgucuccaccuacaugcugacgaacagcgagcuccugucccugaucaacgacaugccgaucaccaacgaccagaagaagcucaugagcaacaacgugcagaucgugcgccagcaguccuacagcaucaugugcaucaucaaggaggagguccuggccuacguggugcagcugccccucuacggggucaucgacacccccugcuggaagcugcacaccagcccccugugcacgaccaacaccaaggagggcuccaacaucugccucacccggacggaccgcgggugguacugcgacaacgccggcagcguguccuucuucccgcaggccgagaccugcaagguccagagcaaccggguguucugcgacaccaugaacucccugacccugcccagcgaggugaaccucugcaacaucgacaucuucaaccccaaguacgacugcaagaucaugacguccaagaccgacgucagcuccagcgugaucaccucccugggcgccaucgugagcugcuacgggaagaccaagugcacggcgagcaacaagaaccgcggcaucaucaagaccuucuccaacgggugcgacuacgucagcaacaagggcguggacaccguguccgucggcaacacccuguacugcgugaacaagcaggagggccagagccucuacgugaagggggagcccaucaucaacuucuacgacccgcuggucuuccccuccgacgaguucgacgccagcaucucccaggugaacgagaagaucaaccagagccuggccuucauccggaaguccgacgagcuccugcacaacgugaacgucggcaagagcaccacgaacaucaugaucaccaccaucaucaucgugaucaucgugauccugcugcuccugaucgccgucgggcuguuccucuacugcaaggcccgcuccacccccgugacgcugagcaaggaccagcuguccgggaucaacaacaucgcguucagcaacugaggacuaguacuggcugcaucucccuuuccucuguccuccauccuucucccaggauggugaagggggaccugguacccagugauccccaccccaggauccuaaaucaugacuuaccugcuaauaaaaacucauuggaaaagugagaagaucuaaaaaaaaaaaaaaaaaaaaaaaaaaaaaaaaaaaaaaaaaaaaaaaaaaaaaaaaaaaaaaaaugcaucccccccccccccccccccccccccccccccaaaggcucuuuucagagccaccagaauu

SEQ ID NO: 15498 - RNA, 2010 nt, Artificial Sequence
  mRNA product Design b-5 comprising derived and/or modified sequence from HRSV(Memphis-37)__AIY60640.1__F_DSCav1_mut3 (opt1)
gggagacuccugucgggcggaaguaggaggaguagaguuuaaaaacaguacucuuuuuccgguucgggacguaguugaagcaacgacaagccggauaaccgcucuugagacaggaagcuuaccauggagcugcccauccucaagaccaacgccaucaccacgauccuggccgcggugacccugugcuucgccagcucccagaacaucaccgaggaguucuaccagagcacgugcuccgccgucagcaagggcuaccucggggcccugcgcaccggcugguacaccuccgugaucaccaucgagcugagcaacaucaaggagaucaagugcaacgggaccgacgccaaggugaagcucaucaagcaggagcuggacaaguacaagaacgcggucacggaccugcagcuccugaugcaguccaccccggccgccggcagcggguccgccaucugcagcggcaucgcggugugcaaggugcugcaccucgagggcgaggucaacaagaucaagaacgcccugcuguccaccaacaaggccguggugagccucuccaacggggucagcgugcugaccuucaaggugcuggaccucaagaacuacaucgacaagcagcugcugcccauccucaacaagcaguccugcagcauccccaacaucgagacggucaucgaguuccagcagaagaacaaccggcugcuggagaucacccgcgaguucuccgugaacgccggcgugaccacccccgucagcacguacaugcucaccaacuccgagcugcugagccucaucaacgacaugccgaucaccaacgaccagaagaagcugaugagcaacaacgugcagaucgugcggcagcaguccuacagcaucaugugcaucaucaaggaggagguccuggccuacguggugcagcucccccuguacggggucaucgacacccccugcuggaagcugcacacgagcccccucugcaccaccaacaccaaggagggcuccaacaucugccugacgcgcaccgaccgggggugguacugcgacaacgcgggcuccgugagcuucuucccgcaggccgagaccugcaaggugcaguccaaccgcgucuucugcgacaccaugaacagccugacgcuccccuccgaggugaaccugugcaacaucgacaucuucaaccccaaguacgacugcaagaucaugaccagcaagaccgacgucuccagcuccgugaucaccagccugggcgccaucguguccugcuacgggaagacgaagugcaccgccagcaacaagaaccggggcaucaucaagaccuucuccaacgggugcgacuacgucagcaacaagggcguggacaccguguccgucggcaacacgcucuacugcgugaacaagcaggaggggcagagccuguacgugaagggcgagcccaucaucaacuucuacgacccgcuggucuuccccagcgacgaguucgacgccuccaucagccaggugaacgagaagaucaaccagucccucgcguucauccgcaagagcgacgagcugcugcacaacgugaacgucgggaaguccaccaccaacaucaugaucaccaccaucaucaucgugaucaucgugauccuccugcugcucaucgccgucggccuguuccuguacugcaaggcccggagcacgcccgugacccuguccaaggaccagcucagcgggaucaacaacaucgccuucuccaacugaggacuaguacuggcugcaucucccuuuccucuguccuccauccuucucccaggauggugaagggggaccugguacccagugauccccaccccaggauccuaaaucaugacuuaccugcuaauaaaaacucauuggaaaagugagaagaucuaaaaaaaaaaaaaaaaaaaaaaaaaaaaaaaaaaaaaaaaaaaaaaaaaaaaaaaaaaaaaaaaugcaucccccccccccccccccccccccccccccccaaaggcucuuuucagagccaccagaauu

SEQ ID NO: 15499 - RNA, 2010 nt, Artificial Sequence
  mRNA product Design b-5 comprising derived and/or modified sequence from HRSV(Memphis-37)__AIY60640.1__F_DSCav1_mut3 (opt2)
gggagacuccugucgggcggaaguaggaggaguagaguuuaaaaacaguacucuuuuuccgguucgggacguaguugaagcaacgacaagccggauaaccgcucuugagacaggaagcuuaccauggagcuccccauccucaagaccaacgccaucaccaccauccucgccgccgucacccucugcuucgccuccucccagaacaucaccgaggaguucuaccaguccaccugcuccgccgucuccaagggcuaccucggcgcccuccgcaccggcugguacaccuccgucaucaccaucgagcucuccaacaucaaggagaucaagugcaacggcaccgacgccaaggucaagcucaucaagcaggagcucgacaaguacaagaacgccgucaccgaccuccagcuccucaugcaguccacccccgccgccggcuccggcuccgccaucugcuccggcaucgccgucugcaagguccuccaccucgagggcgaggucaacaagaucaagaacgcccuccucuccaccaacaaggccgucgucucccucuccaacggcgucuccguccucaccuucaagguccucgaccucaagaacuacaucgacaagcagcuccuccccauccucaacaagcaguccugcuccauccccaacaucgagaccgucaucgaguuccagcagaagaacaaccgccuccucgagaucacccgcgaguucuccgucaacgccggcgucaccacccccgucuccaccuacaugcucaccaacuccgagcuccucucccucaucaacgacaugcccaucaccaacgaccagaagaagcucauguccaacaacguccagaucguccgccagcaguccuacuccaucaugugcaucaucaaggaggagguccucgccuacgucguccagcucccccucuacggcgucaucgacacccccugcuggaagcuccacaccuccccccucugcaccaccaacaccaaggagggcuccaacaucugccucacccgcaccgaccgcggcugguacugcgacaacgccggcuccgucuccuucuucccccaggccgagaccugcaagguccaguccaaccgcgucuucugcgacaccaugaacucccucacccuccccuccgaggucaaccucugcaacaucgacaucuucaaccccaaguacgacugcaagaucaugaccuccaagaccgacgucuccuccuccgucaucaccucccucggcgccaucgucuccugcuacggcaagaccaagugcaccgccuccaacaagaaccgcggcaucaucaagaccuucuccaacggcugcgacuacgucuccaacaagggcgucgacaccgucuccgucggcaacacccucuacugcgucaacaagcaggagggccagucccucuacgucaagggcgagcccaucaucaacuucuacgacccccucgucuuccccuccgacgaguucgacgccuccaucucccaggucaacgagaagaucaaccagucccucgccuucauccgcaaguccgacgagcuccuccacaacgucaacgucggcaaguccaccaccaacaucaugaucaccaccaucaucaucgucaucaucgucauccuccuccuccucaucgccgucggccucuuccucuacugcaaggcccgcuccacccccgucacccucuccaaggaccagcucuccggcaucaacaacaucgccuucuccaacugaggacuaguacuggcugcaucucccuuuccucuguccuccauccuucucccaggauggugaagggggaccugguacccagugauccccaccccaggauccuaaaucaugacuuaccugcuaauaaaaacucauuggaaaagugagaagaucuaaaaaaaaaaaaaaaaaaaaaaaaaaaaaaaaaaaaaaaaaaaaaaaaaaaaaaaaaaaaaaaaugcaucccccccccccccccccccccccccccccccaaaggcucuuuucagagccaccagaauu

SEQ ID NO: 15500 - RNA, 2010 nt, Artificial Sequence
  mRNA product Design b-5 comprising derived and/or modified sequence from HRSV(Memphis-37)__AIY60640.1__F_DSCav1_mut3 (opt3)
gggagacuccugucgggcggaaguaggaggaguagaguuuaaaaacaguacucuuuuuccgguucgggacguaguugaagcaacgacaagccggauaaccgcucuugagacaggaagcuuaccauggagcugcccauccucaagaccaacgccauuacaacuauacuugcugcagugacgcugugcuucgccagcucccagaauaucaccgaagaguuuuaccaaucuacauguucagcggucaguaaaggcuauuugggggcuuuaagaacuggaugguacaccagcguuauuacaaucgaacuguccaacauuaaggagaucaaaugcaaugguaccgacgccaaggugaaacuaauaaagcaggaacucgauaaguauaaaaacgcaguaacugaccugcagcuucugaugcagucuacuccugccgcuggcucggggucagcaaucuguagcggaauugccgugugcaaggucuugcaccucgagggcgaggugaauaaaaucaagaacgcucugcugaguaccaauaaagccguugugucccucucuaacggugucagcguguuaacguucaagguacuggaucuuaagaauuacauugacaaacaauugcugccaauccuaaacaagcaguccuguucaauaccgaauauugaaacuguuaucgaguuucagcagaaaaacaauaggcuccuggaaauuacccgggaguucagugugaacgcgggggucacaacucccgugagcaccuauaugcuuacaaauucugagcuguugucccucaucaacgauaugccuaucaccaacgaccaaaagaaacugaugucaaauaacgugcagauuguccgccagcagagcuacaguauaaugugcaucauuaaggaagagguuuuagcauaugugguacaacugccacucuacggagugaucgauacgcccuguuggaaacuucauacuucuccucugugcacaaccaauacuaaggaaggcuccaacauauguuugacacgaaccgaccguggcugguacugcgauaaugccgggagcgucucguuuuucccacaggcugagacguguaaggugcagucuaacagaguuuucugcgacaccaugaacucccuaacacugcccucagaagugaaucucugcaauauugauaucuucaacccuaaauaugacuguaagaucaugacaaguaaaaccgaugucagcuccucugugauuacaagccugggagccaucguaucaugcuacgguaagacuaaauguaccgcaaguaauaagaacaggggcauuauaaagacauuuuccaaugggugcgacuauguuagcaacaaaggaguggacaccgucucugugggcaauacucuuuacugugucaacaagcaagagggucagucacuguaugugaaaggggagccaaucauuaacuucuacgauccguugguuuuucccagugacgaauuugaugcuagcaucucccaggugaaugagaagaucaaccagucucucgccuuuauucggaaaucggacgaacuguuacacaauguaaacgucggaaagagcacgacaaauauaaugaucaccacuauuaucauugugaucauaguuauccugcuacuccugauugcggugggccuuuucuuguauugcaaggcccgcuccaccccugucacacugucaaaagaucaacucaguggcaucaacaauauugcauucucuaacugaggacuaguacuggcugcaucucccuuuccucuguccuccauccuucucccaggauggugaagggggaccugguacccagugauccccaccccaggauccuaaaucaugacuuaccugcuaauaaaaacucauuggaaaagugagaagaucuaaaaaaaaaaaaaaaaaaaaaaaaaaaaaaaaaaaaaaaaaaaaaaaaaaaaaaaaaaaaaaaaugcaucccccccccccccccccccccccccccccccaaaggcucuuuucagagccaccagaauu

SEQ ID NO: 15501 - RNA, 2010 nt, Artificial Sequence
  mRNA product Design b-5 comprising derived and/or modified sequence from HRSV(Memphis-37)__AIY60640.1__F_DSCav1_mut3 (opt4)
gggagacuccugucgggcggaaguaggaggaguagaguuuaaaaacaguacucuuuuuccgguucgggacguaguugaagcaacgacaagccggauaaccgcucuugagacaggaagcuuaccauggagcugcccauccugaagaccaacgccaucaccaccauccuggccgccgugacccugugcuucgccagcagccagaacaucaccgaggaguucuaccagagcaccugcagcgccgugagcaagggcuaccugggcgcccugagaaccggcugguacaccagcgugaucaccaucgagcugagcaacaucaaggagaucaagugcaacggcaccgacgccaaggugaagcugaucaagcaggagcuggacaaguacaagaacgccgugaccgaccugcagcugcugaugcagagcacccccgccgccggcagcggcagcgccaucugcagcggcaucgccgugugcaaggugcugcaccuggagggcgaggugaacaagaucaagaacgcccugcugagcaccaacaaggccguggugagccugagcaacggcgugagcgugcugaccuucaaggugcuggaccugaagaacuacaucgacaagcagcugcugcccauccugaacaagcagagcugcagcauccccaacaucgagaccgugaucgaguuccagcagaagaacaacagacugcuggagaucaccagagaguucagcgugaacgccggcgugaccacccccgugagcaccuacaugcugaccaacagcgagcugcugagccugaucaacgacaugcccaucaccaacgaccagaagaagcugaugagcaacaacgugcagaucgugagacagcagagcuacagcaucaugugcaucaucaaggaggaggugcuggccuacguggugcagcugccccuguacggcgugaucgacacccccugcuggaagcugcacaccagcccccugugcaccaccaacaccaaggagggcagcaacaucugccugaccagaaccgacagaggcugguacugcgacaacgccggcagcgugagcuucuucccccaggccgagaccugcaaggugcagagcaacagaguguucugcgacaccaugaacagccugacccugcccagcgaggugaaccugugcaacaucgacaucuucaaccccaaguacgacugcaagaucaugaccagcaagaccgacgugagcagcagcgugaucaccagccugggcgccaucgugagcugcuacggcaagaccaagugcaccgccagcaacaagaacagaggcaucaucaagaccuucagcaacggcugcgacuacgugagcaacaagggcguggacaccgugagcgugggcaacacccuguacugcgugaacaagcaggagggccagagccuguacgugaagggcgagcccaucaucaacuucuacgacccccugguguuccccagcgacgaguucgacgccagcaucagccaggugaacgagaagaucaaccagagccuggccuucaucagaaagagcgacgagcugcugcacaacgugaacgugggcaagagcaccaccaacaucaugaucaccaccaucaucaucgugaucaucgugauccugcugcugcugaucgccgugggccuguuccuguacugcaaggccagaagcacccccgugacccugagcaaggaccagcugagcggcaucaacaacaucgccuucagcaacugaggacuaguacuggcugcaucucccuuuccucuguccuccauccuucucccaggauggugaagggggaccugguacccagugauccccaccccaggauccuaaaucaugacuuaccugcuaauaaaaacucauuggaaaagugagaagaucuaaaaaaaaaaaaaaaaaaaaaaaaaaaaaaaaaaaaaaaaaaaaaaaaaaaaaaaaaaaaaaaaugcaucccccccccccccccccccccccccccccccaaaggcucuuuucagagccaccagaauu

SEQ ID NO: 15502 - RNA, 2010 nt, Artificial Sequence
  mRNA product Design b-5 comprising derived and/or modified sequence from HRSV(Memphis-37)__AIY60640.1__F_DSCav1_mut3 (opt5)
gggagacuccugucgggcggaaguaggaggaguagaguuuaaaaacaguacucuuuuuccgguucgggacguaguugaagcaacgacaagccggauaaccgcucuugagacaggaagcuuaccauggagcugcccauccucaagaccaacgccauuacaacgauccuggcugccgugacccuuugcuucgcgagcucccagaauauuacagaagaguuuuaccaaucuaccuguagcgcugucuccaaaggcuaucugggggcccucagaacaggaugguacaccucuguuaucacaauugaacugagcaacaucaaggagaucaaaugcaauggcaccgacgccaaggugaaacuuauuaagcaggaacuggauaaguauaaaaacgcugugacggaccuccagcugcugaugcaguccaccccugccgcugggucuggaagcgccaucuguuccggcauugcggucugcaaggugcuccaccuggagggggagguuaauaaaaucaagaacgcccuucugagcacaaauaaagcuguggucucucucuccaacggagugagcguucugaccuucaaggugcuugaucugaagaauuacauugacaaacaacuccugccgauccugaacaagcagucuuguuccauucccaauaucgaaacagucaucgaguuucagcagaaaaacaaucggcuccuggaaauuacccgcgaguucagcgugaacgccggcgugacgacaccugucucuaccuauaugcuuacaaauuccgagcugcucagccugaucaacgauaugcccauuaccaacgaccaaaagaaacuuauguccaauaacguucagaucgugagacagcagucuuacagcauuaugugcaucaucaaggaagaggugcuggcuuaugucgugcaacucccucuguacggcguuauugauacccccuguuggaaacugcauacauccccucucugcacgaccaauacaaaggaagggagcaacaucugucugacccggacagaccgcggaugguacugcgauaaugccggcucuguguccuuuuucccgcaggcggagaccuguaagguccagagcaacagaguguuuugcgacacgaugaacucucuuacacugcccagcgaaguuaaucucugcaauauugauaucuucaacccuaaauaugacuguaagauuaugaccuccaaaaccgaugugucuagcuccgucaucacaagccugggggccaucgugucuugcuacggaaagaccaaauguacagcuuccaauaagaaccggggcauuaucaagacguuuagcaaugggugcgacuaugucucuaacaaaggaguggacaccguuuccgugggcaauacacuuuacugugucaacaagcaagagggccagagccuguaugugaaaggggagcccauuaucaacuucuacgauccucucguuuuucccuccgacgaguucgaugccucuauuagccaggugaaugaaaagaucaaccagucccuggcuuuuauucgcaaaucugacgaacugcuccacaaugucaacgugggaaagagcaccacaaauaucaugaucaccacgauuaucauugugaucauuguuauccugcuucugcucaucgccgucggccuguuccuguauugcaaggccagauccaccccggugacacuuagcaaagaucaacucucugggauuaacaauaucgcuuucuccaacugaggacuaguacuggcugcaucucccuuuccucuguccuccauccuucucccaggauggugaagggggaccugguacccagugauccccaccccaggauccuaaaucaugacuuaccugcuaauaaaaacucauuggaaaagugagaagaucuaaaaaaaaaaaaaaaaaaaaaaaaaaaaaaaaaaaaaaaaaaaaaaaaaaaaaaaaaaaaaaaaugcaucccccccccccccccccccccccccccccccaaaggcucuuuucagagccaccagaauu

SEQ ID NO: 15503 - RNA, 2010 nt, Artificial Sequence
  mRNA product Design b-5 comprising derived and/or modified sequence from HRSV(Memphis-37)__AIY60640.1__F_DSCav1_mut3 (opt6)
gggagacuccugucgggcggaaguaggaggaguagaguuuaaaaacaguacucuuuuuccgguucgggacguaguugaagcaacgacaagccggauaaccgcucuugagacaggaagcuuaccauggaauuaccaauacuaaaaacaaaugccaucaccaccauccuggccgccguaacauuaugcuucgcaaguucacaaaauauaacagaagaauuuuaucaaucaacuugcagcgccguaucaaaaggcuacuuaggcgcacuacguacaggaugguacacaucaguaauaaccauagaacuauccaauauuaaagaaauaaaaugcaauggaacagacgcaaaaguuaaacuaauaaaacaagaauuagacaaauacaaaaacgcaguaaccgaccuucaauuacuaaugcaaucuacccccgcugcagguuccggaucagcaauauguucaggaauugcaguaugcaaaguccuacacuuagaaggagaaguaaacaaaauaaaaaacgcacuauuaagcaccaauaaagcagucguaucauuauccaacggcguuucaguacuaacauuuaaaguacuugaccuaaaaaacuauauagacaaacaacuacuucccauccuuaacaaacaaagcugcucaauaccuaauaucgaaacaguaauagaauuucaacaaaaaaacaaucgauuauuagaaaucacacgagaauuuucugucaacgcaggagucaccacacccguaucuacuuauauguuaaccaacucugaauuauuaucacuaaucaaugacaugccaauaacaaacgaucaaaaaaaauuaaugucaaauaacguacaaauaguaagacaacaaucauacucaauaaugugcauuauaaaagaagaaguacuagccuauguuguacaacucccacucuacggcguaauagacacaccaugcuggaaauuacacacuucaccacuaugcacaacaaacacaaaagaaggaucaaacaucugccuaaccagaaccgauagaggaugguauugcgacaaugccggaucaguuucauucuucccacaagcagaaacaugcaaaguacaauccaacagaguuuucugugacacaaugaacucgcuaacauuacccagcgaaguaaaccucugcaacauagacauauucaacccaaaauacgauugcaaaauaaugacuucuaaaacagauguuuccucaagcgucauaacgaguuuaggagcaauaguaagcuguuacggaaaaaccaaauguaccgcaucaaacaaaaaccgaggaauaauaaaaaccuuuucaaacggaugcgauuacgucuccaacaaaggagucgacacaguaucaguuggcaauacucuuuacugcguaaauaaacaagaaggacaaucacuauacguaaaaggcgaaccaauaauaaacuucuacgacccccucgucuucccuucagaugaauuugacgcaagcaucucacaaguuaaugaaaaaauaaaucaauccuuagcauucauacgaaaaucagacgaacuauuacacaacguaaacguaggaaaaucaacgacaaacauaaugauaacaacuaucauuauagucauaauagucauacuacuacuauuaauagccguaggcuuauuccuauacugcaaagcaagaucuacuccaguaacacucucaaaagaccaauuaucuggaauaaauaacauagcauucucuaauuaaggacuaguacuggcugcaucucccuuuccucuguccuccauccuucucccaggauggugaagggggaccugguacccagugauccccaccccaggauccuaaaucaugacuuaccugcuaauaaaaacucauuggaaaagugagaagaucuaaaaaaaaaaaaaaaaaaaaaaaaaaaaaaaaaaaaaaaaaaaaaaaaaaaaaaaaaaaaaaaaugcaucccccccccccccccccccccccccccccccaaaggcucuuuucagagccaccagaauu

SEQ ID NO: 15504 - RNA, 2010 nt, Artificial Sequence
  mRNA product Design b-5 comprising derived and/or modified sequence from HRSV(Memphis-37)__AIY60640.1__F_DSCav1_mut3 (opt11)
gggagacuccugucgggcggaaguaggaggaguagaguuuaaaaacaguacucuuuuuccgguucgggacguaguugaagcaacgacaagccggauaaccgcucuugagacaggaagcuuaccauggaacuccccauccucaaaaccaacgccauuaccacgauccucgccgcagucacccucugcuucgccuccucacaaaacaucacagaagaauuuuaccaaaguaccugcuccgccgucagcaaaggauaccucggcgcccuccgcaccggcugguacacauccgucauaaccaucgaacucagcaacaucaaagaaaucaaauguaacggaaccgacgccaaaguaaaacuaauaaaacaagaacucgacaaauacaagaacgccgucaccgaccuccaacuccucaugcaaucuacccccgccgccggcucagguagcgccaucugcagcgguauugccgucugcaaaguacuccaccuagaaggagaagucaauaaaaucaaaaacgcccuacucuccaccaacaaggcagucgucagccucuccaacggcgucucagucuuaaccuucaaagugcucgaccucaaaaauuacauagacaaacaacuacuccccauucucaacaaacaauccugcuccauacccaacauagaaaccgucauugaauuucaacagaaaaacaaccgccuccucgaaaucacgcgcgaguucagugucaacgccggcgucaccaccccagucucgacauacaugcucacaaacucagaacuccucucguuaaucaacgacaugccaauaaccaacgaccaaaagaaacuaauguccaacaacguucaaauaguucgccaacaaucauacuccauaaugugcaucaucaaagaagaaguccucgccuacguuguacaauuaccccucuacggcgucaucgacacaccaugcuggaaacuccacacaucgccccucugcaccaccaacaccaaagaaggcagcaacauuugccucacccggacagaccgcggcugguacugcgacaaugcaggcagcgucucauucuucccacaagccgaaaccugcaaaguccaaagcaaccgugucuucugcgacacaaugaacucccuuacccucccaagcgaaguaaaccucugcaauauugacaucuucaaccccaaauacgacugcaaaaucaugaccuccaaaaccgacgucuccucaucagucaucaccucccuuggcgccauugucuccuguuacgguaaaaccaaaugcaccgccuccaacaaaaaccgcggcaucaucaaaaccuucucuaacggcugcgacuacgucucaaacaaaggcgucgacacugucuccgucggcaacacccuauacugcgucaacaagcaagaaggacagucccuauacguaaaaggugaaccaauuaucaacuucuacgacccccuagucuucccauccgacgaguucgaugccuccaucucccaaguaaaugaaaagaucaaucaaagccuggccuucauccgcaaauccgacgaacuacuccacaaugucaacgucggaaaaucaacaacaaacaucaugaucaccaccaucaucaucgucaucauaguaauccuccuacugcucaucgccgucggucucuuccuauacugcaaagcccguucuacuccagucacccucuccaaagaccaacuaucaggaaucaacaacaucgccuucagcaacuaaggacuaguacuggcugcaucucccuuuccucuguccuccauccuucucccaggauggugaagggggaccugguacccagugauccccaccccaggauccuaaaucaugacuuaccugcuaauaaaaacucauuggaaaagugagaagaucuaaaaaaaaaaaaaaaaaaaaaaaaaaaaaaaaaaaaaaaaaaaaaaaaaaaaaaaaaaaaaaaaugcaucccccccccccccccccccccccccccccccaaaggcucuuuucagagccaccagaauu

SEQ ID NO: 15505 - RNA, 1916 nt, Artificial Sequence
  mRNA product Design c-1 comprising derived and/or modified sequence from HRSV(Memphis-37)__AIY60640.1__F_DSCav1_mut3 (opt1)
gggagaguccgcucagccagguugcagaagcggcuuagcguguguccuaaucuucucucugcguguagguaggccugugccgcaaacaagcuuaccauggagcugcccauccucaagaccaacgccaucaccacgauccuggccgcggugacccugugcuucgccagcucccagaacaucaccgaggaguucuaccagagcacgugcuccgccgucagcaagggcuaccucggcgcccugcgcaccgggugguacaccagcgugaucaccaucgagcuguccaacaucaaggagaucaagugcaacggcaccgacgccaaggugaagcucaucaagcaggagcuggacaaguacaagaacgcggucacggaccugcagcuccugaugcagagcaccccggccgccggcuccgggagcgcgaucugcuccggcaucgccgucugcaaggugcugcaccucgagggcgaggugaacaagaucaagaacgcccugcuguccaccaacaaggccgucgugagccucuccaacggggugagcguccugaccuucaaggugcuggaccucaagaacuacaucgacaagcagcugcugcccauccugaacaagcagagcugcuccauccccaacaucgagaccgucaucgaguuccagcagaagaacaaccgccuccuggagaucacgcgggaguucagcgugaacgcgggcgugaccacccccgucuccaccuacaugcugacgaacagcgagcuccugucccugaucaacgacaugccgaucaccaacgaccagaagaagcucaugagcaacaacgugcagaucgugcgccagcaguccuacagcaucaugugcaucaucaaggaggagguccuggccuacguggugcagcugccccucuacggggucaucgacacccccugcuggaagcugcacaccagcccccugugcacgaccaacaccaaggagggcuccaacaucugccucacccggacggaccgcgggugguacugcgacaacgccggcagcguguccuucuucccgcaggccgagaccugcaagguccagagcaaccggguguucugcgacaccaugaacucccugacccugcccagcgaggugaaccucugcaacaucgacaucuucaaccccaaguacgacugcaagaucaugacguccaagaccgacgucagcuccagcgugaucaccucccugggcgccaucgugagcugcuacgggaagaccaagugcacggcgagcaacaagaaccgcggcaucaucaagaccuucuccaacgggugcgacuacgucagcaacaagggcguggacaccguguccgucggcaacacccuguacugcgugaacaagcaggagggccagagccucuacgugaagggggagcccaucaucaacuucuacgacccgcuggucuuccccuccgacgaguucgacgccagcaucucccaggugaacgagaagaucaaccagagccuggccuucauccggaaguccgacgagcuccugcacaacgugaacgucggcaagagcaccacgaacaucaugaucaccaccaucaucaucgugaucaucgugauccugcugcuccugaucgccgucgggcuguuccucuacugcaaggcccgcuccacccccgugacgcugagcaaggaccagcuguccgggaucaacaacaucgcguucagcaacugaggacuaguguccaccugucccuccugggcugcuggauugucucguuuuccugccaaauaaacaggaucagcgcuuuacagaucuaaaaaaaaaaaaaaaaaaaaaaaaaaaaaaaaaaaaaaaaaaaaaaaaaaaaaaaaaaaaaaaaugcaucccccccccccccccccccccccccccccccaaaggcucuuuucagagccaccagaauu

SEQ ID NO: 15506 - RNA, 1916 nt, Artificial Sequence
  mRNA product Design c-1 comprising derived and/or modified sequence from HRSV(Memphis-37)__AIY60640.1__F_DSCav1_mut3 (opt1)
gggagaguccgcucagccagguugcagaagcggcuuagcguguguccuaaucuucucucugcguguagguaggccugugccgcaaacaagcuuaccauggagcugcccauccucaagaccaacgccaucaccacgauccuggccgcggugacccugugcuucgccagcucccagaacaucaccgaggaguucuaccagagcacgugcuccgccgucagcaagggcuaccucggggcccugcgcaccggcugguacaccuccgugaucaccaucgagcugagcaacaucaaggagaucaagugcaacgggaccgacgccaaggugaagcucaucaagcaggagcuggacaaguacaagaacgcggucacggaccugcagcuccugaugcaguccaccccggccgccggcagcggguccgccaucugcagcggcaucgcggugugcaaggugcugcaccucgagggcgaggucaacaagaucaagaacgcccugcuguccaccaacaaggccguggugagccucuccaacggggucagcgugcugaccuucaaggugcuggaccucaagaacuacaucgacaagcagcugcugcccauccucaacaagcaguccugcagcauccccaacaucgagacggucaucgaguuccagcagaagaacaaccggcugcuggagaucacccgcgaguucuccgugaacgccggcgugaccacccccgucagcacguacaugcucaccaacuccgagcugcugagccucaucaacgacaugccgaucaccaacgaccagaagaagcugaugagcaacaacgugcagaucgugcggcagcaguccuacagcaucaugugcaucaucaaggaggagguccuggccuacguggugcagcucccccuguacggggucaucgacacccccugcuggaagcugcacacgagcccccucugcaccaccaacaccaaggagggcuccaacaucugccugacgcgcaccgaccgggggugguacugcgacaacgcgggcuccgugagcuucuucccgcaggccgagaccugcaaggugcaguccaaccgcgucuucugcgacaccaugaacagccugacgcuccccuccgaggugaaccugugcaacaucgacaucuucaaccccaaguacgacugcaagaucaugaccagcaagaccgacgucuccagcuccgugaucaccagccugggcgccaucguguccugcuacgggaagacgaagugcaccgccagcaacaagaaccggggcaucaucaagaccuucuccaacgggugcgacuacgucagcaacaagggcguggacaccguguccgucggcaacacgcucuacugcgugaacaagcaggaggggcagagccuguacgugaagggcgagcccaucaucaacuucuacgacccgcuggucuuccccagcgacgaguucgacgccuccaucagccaggugaacgagaagaucaaccagucccucgcguucauccgcaagagcgacgagcugcugcacaacgugaacgucgggaaguccaccaccaacaucaugaucaccaccaucaucaucgugaucaucgugauccuccugcugcucaucgccgucggccuguuccuguacugcaaggcccggagcacgcccgugacccuguccaaggaccagcucagcgggaucaacaacaucgccuucuccaacugaggacuaguguccaccugucccuccugggcugcuggauugucucguuuuccugccaaauaaacaggaucagcgcuuuacagaucuaaaaaaaaaaaaaaaaaaaaaaaaaaaaaaaaaaaaaaaaaaaaaaaaaaaaaaaaaaaaaaaaugcaucccccccccccccccccccccccccccccccaaaggcucuuuucagagccaccagaauu

SEQ ID NO: 15507 - RNA, 1916 nt, Artificial Sequence
  mRNA product Design c-1 comprising derived and/or modified sequence from HRSV(Memphis-37)__AIY60640.1__F_DSCav1_mut3 (opt2)
gggagaguccgcucagccagguugcagaagcggcuuagcguguguccuaaucuucucucugcguguagguaggccugugccgcaaacaagcuuaccauggagcuccccauccucaagaccaacgccaucaccaccauccucgccgccgucacccucugcuucgccuccucccagaacaucaccgaggaguucuaccaguccaccugcuccgccgucuccaagggcuaccucggcgcccuccgcaccggcugguacaccuccgucaucaccaucgagcucuccaacaucaaggagaucaagugcaacggcaccgacgccaaggucaagcucaucaagcaggagcucgacaaguacaagaacgccgucaccgaccuccagcuccucaugcaguccacccccgccgccggcuccggcuccgccaucugcuccggcaucgccgucugcaagguccuccaccucgagggcgaggucaacaagaucaagaacgcccuccucuccaccaacaaggccgucgucucccucuccaacggcgucuccguccucaccuucaagguccucgaccucaagaacuacaucgacaagcagcuccuccccauccucaacaagcaguccugcuccauccccaacaucgagaccgucaucgaguuccagcagaagaacaaccgccuccucgagaucacccgcgaguucuccgucaacgccggcgucaccacccccgucuccaccuacaugcucaccaacuccgagcuccucucccucaucaacgacaugcccaucaccaacgaccagaagaagcucauguccaacaacguccagaucguccgccagcaguccuacuccaucaugugcaucaucaaggaggagguccucgccuacgucguccagcucccccucuacggcgucaucgacacccccugcuggaagcuccacaccuccccccucugcaccaccaacaccaaggagggcuccaacaucugccucacccgcaccgaccgcggcugguacugcgacaacgccggcuccgucuccuucuucccccaggccgagaccugcaagguccaguccaaccgcgucuucugcgacaccaugaacucccucacccuccccuccgaggucaaccucugcaacaucgacaucuucaaccccaaguacgacugcaagaucaugaccuccaagaccgacgucuccuccuccgucaucaccucccucggcgccaucgucuccugcuacggcaagaccaagugcaccgccuccaacaagaaccgcggcaucaucaagaccuucuccaacggcugcgacuacgucuccaacaagggcgucgacaccgucuccgucggcaacacccucuacugcgucaacaagcaggagggccagucccucuacgucaagggcgagcccaucaucaacuucuacgacccccucgucuuccccuccgacgaguucgacgccuccaucucccaggucaacgagaagaucaaccagucccucgccuucauccgcaaguccgacgagcuccuccacaacgucaacgucggcaaguccaccaccaacaucaugaucaccaccaucaucaucgucaucaucgucauccuccuccuccucaucgccgucggccucuuccucuacugcaaggcccgcuccacccccgucacccucuccaaggaccagcucuccggcaucaacaacaucgccuucuccaacugaggacuaguguccaccugucccuccugggcugcuggauugucucguuuuccugccaaauaaacaggaucagcgcuuuacagaucuaaaaaaaaaaaaaaaaaaaaaaaaaaaaaaaaaaaaaaaaaaaaaaaaaaaaaaaaaaaaaaaaugcaucccccccccccccccccccccccccccccccaaaggcucuuuucagagccaccagaauu

SEQ ID NO: 15508 - RNA, 1916 nt, Artificial Sequence
  mRNA product Design c-1 comprising derived and/or modified sequence from HRSV(Memphis-37)__AIY60640.1__F_DSCav1_mut3 (opt3)
gggagaguccgcucagccagguugcagaagcggcuuagcguguguccuaaucuucucucugcguguagguaggccugugccgcaaacaagcuuaccauggagcugcccauccucaagaccaacgccauuacaacuauacuugcugcagugacgcugugcuucgccagcucccagaauaucaccgaagaguuuuaccaaucuacauguucagcggucaguaaaggcuauuugggggcuuuaagaacuggaugguacaccagcguuauuacaaucgaacuguccaacauuaaggagaucaaaugcaaugguaccgacgccaaggugaaacuaauaaagcaggaacucgauaaguauaaaaacgcaguaacugaccugcagcuucugaugcagucuacuccugccgcuggcucggggucagcaaucuguagcggaauugccgugugcaaggucuugcaccucgagggcgaggugaauaaaaucaagaacgcucugcugaguaccaauaaagccguugugucccucucuaacggugucagcguguuaacguucaagguacuggaucuuaagaauuacauugacaaacaauugcugccaauccuaaacaagcaguccuguucaauaccgaauauugaaacuguuaucgaguuucagcagaaaaacaauaggcuccuggaaauuacccgggaguucagugugaacgcgggggucacaacucccgugagcaccuauaugcuuacaaauucugagcuguugucccucaucaacgauaugccuaucaccaacgaccaaaagaaacugaugucaaauaacgugcagauuguccgccagcagagcuacaguauaaugugcaucauuaaggaagagguuuuagcauaugugguacaacugccacucuacggagugaucgauacgcccuguuggaaacuucauacuucuccucugugcacaaccaauacuaaggaaggcuccaacauauguuugacacgaaccgaccguggcugguacugcgauaaugccgggagcgucucguuuuucccacaggcugagacguguaaggugcagucuaacagaguuuucugcgacaccaugaacucccuaacacugcccucagaagugaaucucugcaauauugauaucuucaacccuaaauaugacuguaagaucaugacaaguaaaaccgaugucagcuccucugugauuacaagccugggagccaucguaucaugcuacgguaagacuaaauguaccgcaaguaauaagaacaggggcauuauaaagacauuuuccaaugggugcgacuauguuagcaacaaaggaguggacaccgucucugugggcaauacucuuuacugugucaacaagcaagagggucagucacuguaugugaaaggggagccaaucauuaacuucuacgauccguugguuuuucccagugacgaauuugaugcuagcaucucccaggugaaugagaagaucaaccagucucucgccuuuauucggaaaucggacgaacuguuacacaauguaaacgucggaaagagcacgacaaauauaaugaucaccacuauuaucauugugaucauaguuauccugcuacuccugauugcggugggccuuuucuuguauugcaaggcccgcuccaccccugucacacugucaaaagaucaacucaguggcaucaacaauauugcauucucuaacugaggacuaguguccaccugucccuccugggcugcuggauugucucguuuuccugccaaauaaacaggaucagcgcuuuacagaucuaaaaaaaaaaaaaaaaaaaaaaaaaaaaaaaaaaaaaaaaaaaaaaaaaaaaaaaaaaaaaaaaugcaucccccccccccccccccccccccccccccccaaaggcucuuuucagagccaccagaauu

SEQ ID NO: 15509 - RNA, 1916 nt, Artificial Sequence
  mRNA product Design c-1 comprising derived and/or modified sequence from HRSV(Memphis-37)__AIY60640.1__F_DSCav1_mut3 (opt4)
gggagaguccgcucagccagguugcagaagcggcuuagcguguguccuaaucuucucucugcguguagguaggccugugccgcaaacaagcuuaccauggagcugcccauccugaagaccaacgccaucaccaccauccuggccgccgugacccugugcuucgccagcagccagaacaucaccgaggaguucuaccagagcaccugcagcgccgugagcaagggcuaccugggcgcccugagaaccggcugguacaccagcgugaucaccaucgagcugagcaacaucaaggagaucaagugcaacggcaccgacgccaaggugaagcugaucaagcaggagcuggacaaguacaagaacgccgugaccgaccugcagcugcugaugcagagcacccccgccgccggcagcggcagcgccaucugcagcggcaucgccgugugcaaggugcugcaccuggagggcgaggugaacaagaucaagaacgcccugcugagcaccaacaaggccguggugagccugagcaacggcgugagcgugcugaccuucaaggugcuggaccugaagaacuacaucgacaagcagcugcugcccauccugaacaagcagagcugcagcauccccaacaucgagaccgugaucgaguuccagcagaagaacaacagacugcuggagaucaccagagaguucagcgugaacgccggcgugaccacccccgugagcaccuacaugcugaccaacagcgagcugcugagccugaucaacgacaugcccaucaccaacgaccagaagaagcugaugagcaacaacgugcagaucgugagacagcagagcuacagcaucaugugcaucaucaaggaggaggugcuggccuacguggugcagcugccccuguacggcgugaucgacacccccugcuggaagcugcacaccagcccccugugcaccaccaacaccaaggagggcagcaacaucugccugaccagaaccgacagaggcugguacugcgacaacgccggcagcgugagcuucuucccccaggccgagaccugcaaggugcagagcaacagaguguucugcgacaccaugaacagccugacccugcccagcgaggugaaccugugcaacaucgacaucuucaaccccaaguacgacugcaagaucaugaccagcaagaccgacgugagcagcagcgugaucaccagccugggcgccaucgugagcugcuacggcaagaccaagugcaccgccagcaacaagaacagaggcaucaucaagaccuucagcaacggcugcgacuacgugagcaacaagggcguggacaccgugagcgugggcaacacccuguacugcgugaacaagcaggagggccagagccuguacgugaagggcgagcccaucaucaacuucuacgacccccugguguuccccagcgacgaguucgacgccagcaucagccaggugaacgagaagaucaaccagagccuggccuucaucagaaagagcgacgagcugcugcacaacgugaacgugggcaagagcaccaccaacaucaugaucaccaccaucaucaucgugaucaucgugauccugcugcugcugaucgccgugggccuguuccuguacugcaaggccagaagcacccccgugacccugagcaaggaccagcugagcggcaucaacaacaucgccuucagcaacugaggacuaguguccaccugucccuccugggcugcuggauugucucguuuuccugccaaauaaacaggaucagcgcuuuacagaucuaaaaaaaaaaaaaaaaaaaaaaaaaaaaaaaaaaaaaaaaaaaaaaaaaaaaaaaaaaaaaaaaugcaucccccccccccccccccccccccccccccccaaaggcucuuuucagagccaccagaauu

SEQ ID NO: 15510 - RNA, 1916 nt, Artificial Sequence
  mRNA product Design c-1 comprising derived and/or modified sequence from HRSV(Memphis-37)__AIY60640.1__F_DSCav1_mut3 (opt5)
gggagaguccgcucagccagguugcagaagcggcuuagcguguguccuaaucuucucucugcguguagguaggccugugccgcaaacaagcuuaccauggagcugcccauccucaagaccaacgccauuacaacgauccuggcugccgugacccuuugcuucgcgagcucccagaauauuacagaagaguuuuaccaaucuaccuguagcgcugucuccaaaggcuaucugggggcccucagaacaggaugguacaccucuguuaucacaauugaacugagcaacaucaaggagaucaaaugcaauggcaccgacgccaaggugaaacuuauuaagcaggaacuggauaaguauaaaaacgcugugacggaccuccagcugcugaugcaguccaccccugccgcugggucuggaagcgccaucuguuccggcauugcggucugcaaggugcuccaccuggagggggagguuaauaaaaucaagaacgcccuucugagcacaaauaaagcuguggucucucucuccaacggagugagcguucugaccuucaaggugcuugaucugaagaauuacauugacaaacaacuccugccgauccugaacaagcagucuuguuccauucccaauaucgaaacagucaucgaguuucagcagaaaaacaaucggcuccuggaaauuacccgcgaguucagcgugaacgccggcgugacgacaccugucucuaccuauaugcuuacaaauuccgagcugcucagccugaucaacgauaugcccauuaccaacgaccaaaagaaacuuauguccaauaacguucagaucgugagacagcagucuuacagcauuaugugcaucaucaaggaagaggugcuggcuuaugucgugcaacucccucuguacggcguuauugauacccccuguuggaaacugcauacauccccucucugcacgaccaauacaaaggaagggagcaacaucugucugacccggacagaccgcggaugguacugcgauaaugccggcucuguguccuuuuucccgcaggcggagaccuguaagguccagagcaacagaguguuuugcgacacgaugaacucucuuacacugcccagcgaaguuaaucucugcaauauugauaucuucaacccuaaauaugacuguaagauuaugaccuccaaaaccgaugugucuagcuccgucaucacaagccugggggccaucgugucuugcuacggaaagaccaaauguacagcuuccaauaagaaccggggcauuaucaagacguuuagcaaugggugcgacuaugucucuaacaaaggaguggacaccguuuccgugggcaauacacuuuacugugucaacaagcaagagggccagagccuguaugugaaaggggagcccauuaucaacuucuacgauccucucguuuuucccuccgacgaguucgaugccucuauuagccaggugaaugaaaagaucaaccagucccuggcuuuuauucgcaaaucugacgaacugcuccacaaugucaacgugggaaagagcaccacaaauaucaugaucaccacgauuaucauugugaucauuguuauccugcuucugcucaucgccgucggccuguuccuguauugcaaggccagauccaccccggugacacuuagcaaagaucaacucucugggauuaacaauaucgcuuucuccaacugaggacuaguguccaccugucccuccugggcugcuggauugucucguuuuccugccaaauaaacaggaucagcgcuuuacagaucuaaaaaaaaaaaaaaaaaaaaaaaaaaaaaaaaaaaaaaaaaaaaaaaaaaaaaaaaaaaaaaaaugcaucccccccccccccccccccccccccccccccaaaggcucuuuucagagccaccagaauu

SEQ ID NO: 15511 - RNA, 1916 nt, Artificial Sequence
  mRNA product Design c-1 comprising derived and/or modified sequence from HRSV(Memphis-37)__AIY60640.1__F_DSCav1_mut3 (opt6)
gggagaguccgcucagccagguugcagaagcggcuuagcguguguccuaaucuucucucugcguguagguaggccugugccgcaaacaagcuuaccauggaauuaccaauacuaaaaacaaaugccaucaccaccauccuggccgccguaacauuaugcuucgcaaguucacaaaauauaacagaagaauuuuaucaaucaacuugcagcgccguaucaaaaggcuacuuaggcgcacuacguacaggaugguacacaucaguaauaaccauagaacuauccaauauuaaagaaauaaaaugcaauggaacagacgcaaaaguuaaacuaauaaaacaagaauuagacaaauacaaaaacgcaguaaccgaccuucaauuacuaaugcaaucuacccccgcugcagguuccggaucagcaauauguucaggaauugcaguaugcaaaguccuacacuuagaaggagaaguaaacaaaauaaaaaacgcacuauuaagcaccaauaaagcagucguaucauuauccaacggcguuucaguacuaacauuuaaaguacuugaccuaaaaaacuauauagacaaacaacuacuucccauccuuaacaaacaaagcugcucaauaccuaauaucgaaacaguaauagaauuucaacaaaaaaacaaucgauuauuagaaaucacacgagaauuuucugucaacgcaggagucaccacacccguaucuacuuauauguuaaccaacucugaauuauuaucacuaaucaaugacaugccaauaacaaacgaucaaaaaaaauuaaugucaaauaacguacaaauaguaagacaacaaucauacucaauaaugugcauuauaaaagaagaaguacuagccuauguuguacaacucccacucuacggcguaauagacacaccaugcuggaaauuacacacuucaccacuaugcacaacaaacacaaaagaaggaucaaacaucugccuaaccagaaccgauagaggaugguauugcgacaaugccggaucaguuucauucuucccacaagcagaaacaugcaaaguacaauccaacagaguuuucugugacacaaugaacucgcuaacauuacccagcgaaguaaaccucugcaacauagacauauucaacccaaaauacgauugcaaaauaaugacuucuaaaacagauguuuccucaagcgucauaacgaguuuaggagcaauaguaagcuguuacggaaaaaccaaauguaccgcaucaaacaaaaaccgaggaauaauaaaaaccuuuucaaacggaugcgauuacgucuccaacaaaggagucgacacaguaucaguuggcaauacucuuuacugcguaaauaaacaagaaggacaaucacuauacguaaaaggcgaaccaauaauaaacuucuacgacccccucgucuucccuucagaugaauuugacgcaagcaucucacaaguuaaugaaaaaauaaaucaauccuuagcauucauacgaaaaucagacgaacuauuacacaacguaaacguaggaaaaucaacgacaaacauaaugauaacaacuaucauuauagucauaauagucauacuacuacuauuaauagccguaggcuuauuccuauacugcaaagcaagaucuacuccaguaacacucucaaaagaccaauuaucuggaauaaauaacauagcauucucuaauuaaggacuaguguccaccugucccuccugggcugcuggauugucucguuuuccugccaaauaaacaggaucagcgcuuuacagaucuaaaaaaaaaaaaaaaaaaaaaaaaaaaaaaaaaaaaaaaaaaaaaaaaaaaaaaaaaaaaaaaaugcaucccccccccccccccccccccccccccccccaaaggcucuuuucagagccaccagaauu

SEQ ID NO: 15512 - RNA, 1916 nt, Artificial Sequence
  mRNA product Design c-1 comprising derived and/or modified sequence from HRSV(Memphis-37)__AIY60640.1__F_DSCav1_mut3 (opt11)
gggagaguccgcucagccagguugcagaagcggcuuagcguguguccuaaucuucucucugcguguagguaggccugugccgcaaacaagcuuaccauggaacuccccauccucaaaaccaacgccauuaccacgauccucgccgcagucacccucugcuucgccuccucacaaaacaucacagaagaauuuuaccaaaguaccugcuccgccgucagcaaaggauaccucggcgcccuccgcaccggcugguacacauccgucauaaccaucgaacucagcaacaucaaagaaaucaaauguaacggaaccgacgccaaaguaaaacuaauaaaacaagaacucgacaaauacaagaacgccgucaccgaccuccaacuccucaugcaaucuacccccgccgccggcucagguagcgccaucugcagcgguauugccgucugcaaaguacuccaccuagaaggagaagucaauaaaaucaaaaacgcccuacucuccaccaacaaggcagucgucagccucuccaacggcgucucagucuuaaccuucaaagugcucgaccucaaaaauuacauagacaaacaacuacuccccauucucaacaaacaauccugcuccauacccaacauagaaaccgucauugaauuucaacagaaaaacaaccgccuccucgaaaucacgcgcgaguucagugucaacgccggcgucaccaccccagucucgacauacaugcucacaaacucagaacuccucucguuaaucaacgacaugccaauaaccaacgaccaaaagaaacuaauguccaacaacguucaaauaguucgccaacaaucauacuccauaaugugcaucaucaaagaagaaguccucgccuacguuguacaauuaccccucuacggcgucaucgacacaccaugcuggaaacuccacacaucgccccucugcaccaccaacaccaaagaaggcagcaacauuugccucacccggacagaccgcggcugguacugcgacaaugcaggcagcgucucauucuucccacaagccgaaaccugcaaaguccaaagcaaccgugucuucugcgacacaaugaacucccuuacccucccaagcgaaguaaaccucugcaauauugacaucuucaaccccaaauacgacugcaaaaucaugaccuccaaaaccgacgucuccucaucagucaucaccucccuuggcgccauugucuccuguuacgguaaaaccaaaugcaccgccuccaacaaaaaccgcggcaucaucaaaaccuucucuaacggcugcgacuacgucucaaacaaaggcgucgacacugucuccgucggcaacacccuauacugcgucaacaagcaagaaggacagucccuauacguaaaaggugaaccaauuaucaacuucuacgacccccuagucuucccauccgacgaguucgaugccuccaucucccaaguaaaugaaaagaucaaucaaagccuggccuucauccgcaaauccgacgaacuacuccacaaugucaacgucggaaaaucaacaacaaacaucaugaucaccaccaucaucaucgucaucauaguaauccuccuacugcucaucgccgucggucucuuccuauacugcaaagcccguucuacuccagucacccucuccaaagaccaacuaucaggaaucaacaacaucgccuucagcaacuaaggacuaguguccaccugucccuccugggcugcuggauugucucguuuuccugccaaauaaacaggaucagcgcuuuacagaucuaaaaaaaaaaaaaaaaaaaaaaaaaaaaaaaaaaaaaaaaaaaaaaaaaaaaaaaaaaaaaaaaugcaucccccccccccccccccccccccccccccccaaaggcucuuuucagagccaccagaauu

SEQ ID NO: 15513 - RNA, 2006 nt, Artificial Sequence
  mRNA product Design c-2 comprising derived and/or modified sequence from HRSV(Memphis-37)__AIY60640.1__F_DSCav1_mut3 (opt1)
gggagacuccugucgggcggaaguaggaggaguagaguuuaaaaacaguacucuuuuuccgguucgggacguaguugaagcaacgacaagccggauaaccgcucuugagacaggaagcuuaccauggagcugcccauccucaagaccaacgccaucaccacgauccuggccgcggugacccugugcuucgccagcucccagaacaucaccgaggaguucuaccagagcacgugcuccgccgucagcaagggcuaccucggcgcccugcgcaccgggugguacaccagcgugaucaccaucgagcuguccaacaucaaggagaucaagugcaacggcaccgacgccaaggugaagcucaucaagcaggagcuggacaaguacaagaacgcggucacggaccugcagcuccugaugcagagcaccccggccgccggcuccgggagcgcgaucugcuccggcaucgccgucugcaaggugcugcaccucgagggcgaggugaacaagaucaagaacgcccugcuguccaccaacaaggccgucgugagccucuccaacggggugagcguccugaccuucaaggugcuggaccucaagaacuacaucgacaagcagcugcugcccauccugaacaagcagagcugcuccauccccaacaucgagaccgucaucgaguuccagcagaagaacaaccgccuccuggagaucacgcgggaguucagcgugaacgcgggcgugaccacccccgucuccaccuacaugcugacgaacagcgagcuccugucccugaucaacgacaugccgaucaccaacgaccagaagaagcucaugagcaacaacgugcagaucgugcgccagcaguccuacagcaucaugugcaucaucaaggaggagguccuggccuacguggugcagcugccccucuacggggucaucgacacccccugcuggaagcugcacaccagcccccugugcacgaccaacaccaaggagggcuccaacaucugccucacccggacggaccgcgggugguacugcgacaacgccggcagcguguccuucuucccgcaggccgagaccugcaagguccagagcaaccggguguucugcgacaccaugaacucccugacccugcccagcgaggugaaccucugcaacaucgacaucuucaaccccaaguacgacugcaagaucaugacguccaagaccgacgucagcuccagcgugaucaccucccugggcgccaucgugagcugcuacgggaagaccaagugcacggcgagcaacaagaaccgcggcaucaucaagaccuucuccaacgggugcgacuacgucagcaacaagggcguggacaccguguccgucggcaacacccuguacugcgugaacaagcaggagggccagagccucuacgugaagggggagcccaucaucaacuucuacgacccgcuggucuuccccuccgacgaguucgacgccagcaucucccaggugaacgagaagaucaaccagagccuggccuucauccggaaguccgacgagcuccugcacaacgugaacgucggcaagagcaccacgaacaucaugaucaccaccaucaucaucgugaucaucgugauccugcugcuccugaucgccgucgggcuguuccucuacugcaaggcccgcuccacccccgugacgcugagcaaggaccagcuguccgggaucaacaacaucgcguucagcaacugaggacuaguggaagcauuuuccuggcugauuaaaagaaauuacucagcuauggucaucuguuccuguuagaaggcuaugcagcauauuauauacuaugcgcauguuaugaaaugcauaauaaaaaauuuuaaaaaaucuaaaagaucuaaaaaaaaaaaaaaaaaaaaaaaaaaaaaaaaaaaaaaaaaaaaaaaaaaaaaaaaaaaaaaaaugcaucccccccccccccccccccccccccccccccaaaggcucuuuucagagccaccagaauu

SEQ ID NO: 15514 - RNA, 2006 nt, Artificial Sequence
  mRNA product Design c-2 comprising derived and/or modified sequence from HRSV(Memphis-37)__AIY60640.1__F_DSCav1_mut3 (opt1)
gggagacuccugucgggcggaaguaggaggaguagaguuuaaaaacaguacucuuuuuccgguucgggacguaguugaagcaacgacaagccggauaaccgcucuugagacaggaagcuuaccauggagcugcccauccucaagaccaacgccaucaccacgauccuggccgcggugacccugugcuucgccagcucccagaacaucaccgaggaguucuaccagagcacgugcuccgccgucagcaagggcuaccucggggcccugcgcaccggcugguacaccuccgugaucaccaucgagcugagcaacaucaaggagaucaagugcaacgggaccgacgccaaggugaagcucaucaagcaggagcuggacaaguacaagaacgcggucacggaccugcagcuccugaugcaguccaccccggccgccggcagcggguccgccaucugcagcggcaucgcggugugcaaggugcugcaccucgagggcgaggucaacaagaucaagaacgcccugcuguccaccaacaaggccguggugagccucuccaacggggucagcgugcugaccuucaaggugcuggaccucaagaacuacaucgacaagcagcugcugcccauccucaacaagcaguccugcagcauccccaacaucgagacggucaucgaguuccagcagaagaacaaccggcugcuggagaucacccgcgaguucuccgugaacgccggcgugaccacccccgucagcacguacaugcucaccaacuccgagcugcugagccucaucaacgacaugccgaucaccaacgaccagaagaagcugaugagcaacaacgugcagaucgugcggcagcaguccuacagcaucaugugcaucaucaaggaggagguccuggccuacguggugcagcucccccuguacggggucaucgacacccccugcuggaagcugcacacgagcccccucugcaccaccaacaccaaggagggcuccaacaucugccugacgcgcaccgaccgggggugguacugcgacaacgcgggcuccgugagcuucuucccgcaggccgagaccugcaaggugcaguccaaccgcgucuucugcgacaccaugaacagccugacgcuccccuccgaggugaaccugugcaacaucgacaucuucaaccccaaguacgacugcaagaucaugaccagcaagaccgacgucuccagcuccgugaucaccagccugggcgccaucguguccugcuacgggaagacgaagugcaccgccagcaacaagaaccggggcaucaucaagaccuucuccaacgggugcgacuacgucagcaacaagggcguggacaccguguccgucggcaacacgcucuacugcgugaacaagcaggaggggcagagccuguacgugaagggcgagcccaucaucaacuucuacgacccgcuggucuuccccagcgacgaguucgacgccuccaucagccaggugaacgagaagaucaaccagucccucgcguucauccgcaagagcgacgagcugcugcacaacgugaacgucgggaaguccaccaccaacaucaugaucaccaccaucaucaucgugaucaucgugauccuccugcugcucaucgccgucggccuguuccuguacugcaaggcccggagcacgcccgugacccuguccaaggaccagcucagcgggaucaacaacaucgccuucuccaacugaggacuaguggaagcauuuuccuggcugauuaaaagaaauuacucagcuauggucaucuguuccuguuagaaggcuaugcagcauauuauauacuaugcgcauguuaugaaaugcauaauaaaaaauuuuaaaaaaucuaaaagaucuaaaaaaaaaaaaaaaaaaaaaaaaaaaaaaaaaaaaaaaaaaaaaaaaaaaaaaaaaaaaaaaaugcaucccccccccccccccccccccccccccccccaaaggcucuuuucagagccaccagaauu

SEQ ID NO: 15515 - RNA, 2006 nt, Artificial Sequence
  mRNA product Design c-2 comprising derived and/or modified sequence from HRSV(Memphis-37)__AIY60640.1__F_DSCav1_mut3 (opt2)
gggagacuccugucgggcggaaguaggaggaguagaguuuaaaaacaguacucuuuuuccgguucgggacguaguugaagcaacgacaagccggauaaccgcucuugagacaggaagcuuaccauggagcuccccauccucaagaccaacgccaucaccaccauccucgccgccgucacccucugcuucgccuccucccagaacaucaccgaggaguucuaccaguccaccugcuccgccgucuccaagggcuaccucggcgcccuccgcaccggcugguacaccuccgucaucaccaucgagcucuccaacaucaaggagaucaagugcaacggcaccgacgccaaggucaagcucaucaagcaggagcucgacaaguacaagaacgccgucaccgaccuccagcuccucaugcaguccacccccgccgccggcuccggcuccgccaucugcuccggcaucgccgucugcaagguccuccaccucgagggcgaggucaacaagaucaagaacgcccuccucuccaccaacaaggccgucgucucccucuccaacggcgucuccguccucaccuucaagguccucgaccucaagaacuacaucgacaagcagcuccuccccauccucaacaagcaguccugcuccauccccaacaucgagaccgucaucgaguuccagcagaagaacaaccgccuccucgagaucacccgcgaguucuccgucaacgccggcgucaccacccccgucuccaccuacaugcucaccaacuccgagcuccucucccucaucaacgacaugcccaucaccaacgaccagaagaagcucauguccaacaacguccagaucguccgccagcaguccuacuccaucaugugcaucaucaaggaggagguccucgccuacgucguccagcucccccucuacggcgucaucgacacccccugcuggaagcuccacaccuccccccucugcaccaccaacaccaaggagggcuccaacaucugccucacccgcaccgaccgcggcugguacugcgacaacgccggcuccgucuccuucuucccccaggccgagaccugcaagguccaguccaaccgcgucuucugcgacaccaugaacucccucacccuccccuccgaggucaaccucugcaacaucgacaucuucaaccccaaguacgacugcaagaucaugaccuccaagaccgacgucuccuccuccgucaucaccucccucggcgccaucgucuccugcuacggcaagaccaagugcaccgccuccaacaagaaccgcggcaucaucaagaccuucuccaacggcugcgacuacgucuccaacaagggcgucgacaccgucuccgucggcaacacccucuacugcgucaacaagcaggagggccagucccucuacgucaagggcgagcccaucaucaacuucuacgacccccucgucuuccccuccgacgaguucgacgccuccaucucccaggucaacgagaagaucaaccagucccucgccuucauccgcaaguccgacgagcuccuccacaacgucaacgucggcaaguccaccaccaacaucaugaucaccaccaucaucaucgucaucaucgucauccuccuccuccucaucgccgucggccucuuccucuacugcaaggcccgcuccacccccgucacccucuccaaggaccagcucuccggcaucaacaacaucgccuucuccaacugaggacuaguggaagcauuuuccuggcugauuaaaagaaauuacucagcuauggucaucuguuccuguuagaaggcuaugcagcauauuauauacuaugcgcauguuaugaaaugcauaauaaaaaauuuuaaaaaaucuaaaagaucuaaaaaaaaaaaaaaaaaaaaaaaaaaaaaaaaaaaaaaaaaaaaaaaaaaaaaaaaaaaaaaaaugcaucccccccccccccccccccccccccccccccaaaggcucuuuucagagccaccagaauu

SEQ ID NO: 15516 - RNA, 2006 nt, Artificial Sequence
  mRNA product Design c-2 comprising derived and/or modified sequence from HRSV(Memphis-37)__AIY60640.1__F_DSCav1_mut3 (opt3)
gggagacuccugucgggcggaaguaggaggaguagaguuuaaaaacaguacucuuuuuccgguucgggacguaguugaagcaacgacaagccggauaaccgcucuugagacaggaagcuuaccauggagcugcccauccucaagaccaacgccauuacaacuauacuugcugcagugacgcugugcuucgccagcucccagaauaucaccgaagaguuuuaccaaucuacauguucagcggucaguaaaggcuauuugggggcuuuaagaacuggaugguacaccagcguuauuacaaucgaacuguccaacauuaaggagaucaaaugcaaugguaccgacgccaaggugaaacuaauaaagcaggaacucgauaaguauaaaaacgcaguaacugaccugcagcuucugaugcagucuacuccugccgcuggcucggggucagcaaucuguagcggaauugccgugugcaaggucuugcaccucgagggcgaggugaauaaaaucaagaacgcucugcugaguaccaauaaagccguugugucccucucuaacggugucagcguguuaacguucaagguacuggaucuuaagaauuacauugacaaacaauugcugccaauccuaaacaagcaguccuguucaauaccgaauauugaaacuguuaucgaguuucagcagaaaaacaauaggcuccuggaaauuacccgggaguucagugugaacgcgggggucacaacucccgugagcaccuauaugcuuacaaauucugagcuguugucccucaucaacgauaugccuaucaccaacgaccaaaagaaacugaugucaaauaacgugcagauuguccgccagcagagcuacaguauaaugugcaucauuaaggaagagguuuuagcauaugugguacaacugccacucuacggagugaucgauacgcccuguuggaaacuucauacuucuccucugugcacaaccaauacuaaggaaggcuccaacauauguuugacacgaaccgaccguggcugguacugcgauaaugccgggagcgucucguuuuucccacaggcugagacguguaaggugcagucuaacagaguuuucugcgacaccaugaacucccuaacacugcccucagaagugaaucucugcaauauugauaucuucaacccuaaauaugacuguaagaucaugacaaguaaaaccgaugucagcuccucugugauuacaagccugggagccaucguaucaugcuacgguaagacuaaauguaccgcaaguaauaagaacaggggcauuauaaagacauuuuccaaugggugcgacuauguuagcaacaaaggaguggacaccgucucugugggcaauacucuuuacugugucaacaagcaagagggucagucacuguaugugaaaggggagccaaucauuaacuucuacgauccguugguuuuucccagugacgaauuugaugcuagcaucucccaggugaaugagaagaucaaccagucucucgccuuuauucggaaaucggacgaacuguuacacaauguaaacgucggaaagagcacgacaaauauaaugaucaccacuauuaucauugugaucauaguuauccugcuacuccugauugcggugggccuuuucuuguauugcaaggcccgcuccaccccugucacacugucaaaagaucaacucaguggcaucaacaauauugcauucucuaacugaggacuaguggaagcauuuuccuggcugauuaaaagaaauuacucagcuauggucaucuguuccuguuagaaggcuaugcagcauauuauauacuaugcgcauguuaugaaaugcauaauaaaaaauuuuaaaaaaucuaaaagaucuaaaaaaaaaaaaaaaaaaaaaaaaaaaaaaaaaaaaaaaaaaaaaaaaaaaaaaaaaaaaaaaaugcaucccccccccccccccccccccccccccccccaaaggcucuuuucagagccaccagaauu

SEQ ID NO: 15517 - RNA, 2006 nt, Artificial Sequence
  mRNA product Design c-2 comprising derived and/or modified sequence from HRSV(Memphis-37)__AIY60640.1__F_DSCav1_mut3 (opt4)
gggagacuccugucgggcggaaguaggaggaguagaguuuaaaaacaguacucuuuuuccgguucgggacguaguugaagcaacgacaagccggauaaccgcucuugagacaggaagcuuaccauggagcugcccauccugaagaccaacgccaucaccaccauccuggccgccgugacccugugcuucgccagcagccagaacaucaccgaggaguucuaccagagcaccugcagcgccgugagcaagggcuaccugggcgcccugagaaccggcugguacaccagcgugaucaccaucgagcugagcaacaucaaggagaucaagugcaacggcaccgacgccaaggugaagcugaucaagcaggagcuggacaaguacaagaacgccgugaccgaccugcagcugcugaugcagagcacccccgccgccggcagcggcagcgccaucugcagcggcaucgccgugugcaaggugcugcaccuggagggcgaggugaacaagaucaagaacgcccugcugagcaccaacaaggccguggugagccugagcaacggcgugagcgugcugaccuucaaggugcuggaccugaagaacuacaucgacaagcagcugcugcccauccugaacaagcagagcugcagcauccccaacaucgagaccgugaucgaguuccagcagaagaacaacagacugcuggagaucaccagagaguucagcgugaacgccggcgugaccacccccgugagcaccuacaugcugaccaacagcgagcugcugagccugaucaacgacaugcccaucaccaacgaccagaagaagcugaugagcaacaacgugcagaucgugagacagcagagcuacagcaucaugugcaucaucaaggaggaggugcuggccuacguggugcagcugccccuguacggcgugaucgacacccccugcuggaagcugcacaccagcccccugugcaccaccaacaccaaggagggcagcaacaucugccugaccagaaccgacagaggcugguacugcgacaacgccggcagcgugagcuucuucccccaggccgagaccugcaaggugcagagcaacagaguguucugcgacaccaugaacagccugacccugcccagcgaggugaaccugugcaacaucgacaucuucaaccccaaguacgacugcaagaucaugaccagcaagaccgacgugagcagcagcgugaucaccagccugggcgccaucgugagcugcuacggcaagaccaagugcaccgccagcaacaagaacagaggcaucaucaagaccuucagcaacggcugcgacuacgugagcaacaagggcguggacaccgugagcgugggcaacacccuguacugcgugaacaagcaggagggccagagccuguacgugaagggcgagcccaucaucaacuucuacgacccccugguguuccccagcgacgaguucgacgccagcaucagccaggugaacgagaagaucaaccagagccuggccuucaucagaaagagcgacgagcugcugcacaacgugaacgugggcaagagcaccaccaacaucaugaucaccaccaucaucaucgugaucaucgugauccugcugcugcugaucgccgugggccuguuccuguacugcaaggccagaagcacccccgugacccugagcaaggaccagcugagcggcaucaacaacaucgccuucagcaacugaggacuaguggaagcauuuuccuggcugauuaaaagaaauuacucagcuauggucaucuguuccuguuagaaggcuaugcagcauauuauauacuaugcgcauguuaugaaaugcauaauaaaaaauuuuaaaaaaucuaaaagaucuaaaaaaaaaaaaaaaaaaaaaaaaaaaaaaaaaaaaaaaaaaaaaaaaaaaaaaaaaaaaaaaaugcaucccccccccccccccccccccccccccccccaaaggcucuuuucagagccaccagaauu

SEQ ID NO: 15518 - RNA, 2006 nt, Artificial Sequence
  mRNA product Design c-2 comprising derived and/or modified sequence from HRSV(Memphis-37)__AIY60640.1__F_DSCav1_mut3 (opt5)
gggagacuccugucgggcggaaguaggaggaguagaguuuaaaaacaguacucuuuuuccgguucgggacguaguugaagcaacgacaagccggauaaccgcucuugagacaggaagcuuaccauggagcugcccauccucaagaccaacgccauuacaacgauccuggcugccgugacccuuugcuucgcgagcucccagaauauuacagaagaguuuuaccaaucuaccuguagcgcugucuccaaaggcuaucugggggcccucagaacaggaugguacaccucuguuaucacaauugaacugagcaacaucaaggagaucaaaugcaauggcaccgacgccaaggugaaacuuauuaagcaggaacuggauaaguauaaaaacgcugugacggaccuccagcugcugaugcaguccaccccugccgcugggucuggaagcgccaucuguuccggcauugcggucugcaaggugcuccaccuggagggggagguuaauaaaaucaagaacgcccuucugagcacaaauaaagcuguggucucucucuccaacggagugagcguucugaccuucaaggugcuugaucugaagaauuacauugacaaacaacuccugccgauccugaacaagcagucuuguuccauucccaauaucgaaacagucaucgaguuucagcagaaaaacaaucggcuccuggaaauuacccgcgaguucagcgugaacgccggcgugacgacaccugucucuaccuauaugcuuacaaauuccgagcugcucagccugaucaacgauaugcccauuaccaacgaccaaaagaaacuuauguccaauaacguucagaucgugagacagcagucuuacagcauuaugugcaucaucaaggaagaggugcuggcuuaugucgugcaacucccucuguacggcguuauugauacccccuguuggaaacugcauacauccccucucugcacgaccaauacaaaggaagggagcaacaucugucugacccggacagaccgcggaugguacugcgauaaugccggcucuguguccuuuuucccgcaggcggagaccuguaagguccagagcaacagaguguuuugcgacacgaugaacucucuuacacugcccagcgaaguuaaucucugcaauauugauaucuucaacccuaaauaugacuguaagauuaugaccuccaaaaccgaugugucuagcuccgucaucacaagccugggggccaucgugucuugcuacggaaagaccaaauguacagcuuccaauaagaaccggggcauuaucaagacguuuagcaaugggugcgacuaugucucuaacaaaggaguggacaccguuuccgugggcaauacacuuuacugugucaacaagcaagagggccagagccuguaugugaaaggggagcccauuaucaacuucuacgauccucucguuuuucccuccgacgaguucgaugccucuauuagccaggugaaugaaaagaucaaccagucccuggcuuuuauucgcaaaucugacgaacugcuccacaaugucaacgugggaaagagcaccacaaauaucaugaucaccacgauuaucauugugaucauuguuauccugcuucugcucaucgccgucggccuguuccuguauugcaaggccagauccaccccggugacacuuagcaaagaucaacucucugggauuaacaauaucgcuuucuccaacugaggacuaguggaagcauuuuccuggcugauuaaaagaaauuacucagcuauggucaucuguuccuguuagaaggcuaugcagcauauuauauacuaugcgcauguuaugaaaugcauaauaaaaaauuuuaaaaaaucuaaaagaucuaaaaaaaaaaaaaaaaaaaaaaaaaaaaaaaaaaaaaaaaaaaaaaaaaaaaaaaaaaaaaaaaugcaucccccccccccccccccccccccccccccccaaaggcucuuuucagagccaccagaauu

SEQ ID NO: 15519 - RNA, 2006 nt, Artificial Sequence
  mRNA product Design c-2 comprising derived and/or modified sequence from HRSV(Memphis-37)__AIY60640.1__F_DSCav1_mut3 (opt6)
gggagacuccugucgggcggaaguaggaggaguagaguuuaaaaacaguacucuuuuuccgguucgggacguaguugaagcaacgacaagccggauaaccgcucuugagacaggaagcuuaccauggaauuaccaauacuaaaaacaaaugccaucaccaccauccuggccgccguaacauuaugcuucgcaaguucacaaaauauaacagaagaauuuuaucaaucaacuugcagcgccguaucaaaaggcuacuuaggcgcacuacguacaggaugguacacaucaguaauaaccauagaacuauccaauauuaaagaaauaaaaugcaauggaacagacgcaaaaguuaaacuaauaaaacaagaauuagacaaauacaaaaacgcaguaaccgaccuucaauuacuaaugcaaucuacccccgcugcagguuccggaucagcaauauguucaggaauugcaguaugcaaaguccuacacuuagaaggagaaguaaacaaaauaaaaaacgcacuauuaagcaccaauaaagcagucguaucauuauccaacggcguuucaguacuaacauuuaaaguacuugaccuaaaaaacuauauagacaaacaacuacuucccauccuuaacaaacaaagcugcucaauaccuaauaucgaaacaguaauagaauuucaacaaaaaaacaaucgauuauuagaaaucacacgagaauuuucugucaacgcaggagucaccacacccguaucuacuuauauguuaaccaacucugaauuauuaucacuaaucaaugacaugccaauaacaaacgaucaaaaaaaauuaaugucaaauaacguacaaauaguaagacaacaaucauacucaauaaugugcauuauaaaagaagaaguacuagccuauguuguacaacucccacucuacggcguaauagacacaccaugcuggaaauuacacacuucaccacuaugcacaacaaacacaaaagaaggaucaaacaucugccuaaccagaaccgauagaggaugguauugcgacaaugccggaucaguuucauucuucccacaagcagaaacaugcaaaguacaauccaacagaguuuucugugacacaaugaacucgcuaacauuacccagcgaaguaaaccucugcaacauagacauauucaacccaaaauacgauugcaaaauaaugacuucuaaaacagauguuuccucaagcgucauaacgaguuuaggagcaauaguaagcuguuacggaaaaaccaaauguaccgcaucaaacaaaaaccgaggaauaauaaaaaccuuuucaaacggaugcgauuacgucuccaacaaaggagucgacacaguaucaguuggcaauacucuuuacugcguaaauaaacaagaaggacaaucacuauacguaaaaggcgaaccaauaauaaacuucuacgacccccucgucuucccuucagaugaauuugacgcaagcaucucacaaguuaaugaaaaaauaaaucaauccuuagcauucauacgaaaaucagacgaacuauuacacaacguaaacguaggaaaaucaacgacaaacauaaugauaacaacuaucauuauagucauaauagucauacuacuacuauuaauagccguaggcuuauuccuauacugcaaagcaagaucuacuccaguaacacucucaaaagaccaauuaucuggaauaaauaacauagcauucucuaauuaaggacuaguggaagcauuuuccuggcugauuaaaagaaauuacucagcuauggucaucuguuccuguuagaaggcuaugcagcauauuauauacuaugcgcauguuaugaaaugcauaauaaaaaauuuuaaaaaaucuaaaagaucuaaaaaaaaaaaaaaaaaaaaaaaaaaaaaaaaaaaaaaaaaaaaaaaaaaaaaaaaaaaaaaaaugcaucccccccccccccccccccccccccccccccaaaggcucuuuucagagccaccagaauu

SEQ ID NO: 15520 - RNA, 2006 nt, Artificial Sequence
  mRNA product Design c-2 comprising derived and/or modified sequence from HRSV(Memphis-37)__AIY60640.1__F_DSCav1_mut3 (opt11)
gggagacuccugucgggcggaaguaggaggaguagaguuuaaaaacaguacucuuuuuccgguucgggacguaguugaagcaacgacaagccggauaaccgcucuugagacaggaagcuuaccauggaacuccccauccucaaaaccaacgccauuaccacgauccucgccgcagucacccucugcuucgccuccucacaaaacaucacagaagaauuuuaccaaaguaccugcuccgccgucagcaaaggauaccucggcgcccuccgcaccggcugguacacauccgucauaaccaucgaacucagcaacaucaaagaaaucaaauguaacggaaccgacgccaaaguaaaacuaauaaaacaagaacucgacaaauacaagaacgccgucaccgaccuccaacuccucaugcaaucuacccccgccgccggcucagguagcgccaucugcagcgguauugccgucugcaaaguacuccaccuagaaggagaagucaauaaaaucaaaaacgcccuacucuccaccaacaaggcagucgucagccucuccaacggcgucucagucuuaaccuucaaagugcucgaccucaaaaauuacauagacaaacaacuacuccccauucucaacaaacaauccugcuccauacccaacauagaaaccgucauugaauuucaacagaaaaacaaccgccuccucgaaaucacgcgcgaguucagugucaacgccggcgucaccaccccagucucgacauacaugcucacaaacucagaacuccucucguuaaucaacgacaugccaauaaccaacgaccaaaagaaacuaauguccaacaacguucaaauaguucgccaacaaucauacuccauaaugugcaucaucaaagaagaaguccucgccuacguuguacaauuaccccucuacggcgucaucgacacaccaugcuggaaacuccacacaucgccccucugcaccaccaacaccaaagaaggcagcaacauuugccucacccggacagaccgcggcugguacugcgacaaugcaggcagcgucucauucuucccacaagccgaaaccugcaaaguccaaagcaaccgugucuucugcgacacaaugaacucccuuacccucccaagcgaaguaaaccucugcaauauugacaucuucaaccccaaauacgacugcaaaaucaugaccuccaaaaccgacgucuccucaucagucaucaccucccuuggcgccauugucuccuguuacgguaaaaccaaaugcaccgccuccaacaaaaaccgcggcaucaucaaaaccuucucuaacggcugcgacuacgucucaaacaaaggcgucgacacugucuccgucggcaacacccuauacugcgucaacaagcaagaaggacagucccuauacguaaaaggugaaccaauuaucaacuucuacgacccccuagucuucccauccgacgaguucgaugccuccaucucccaaguaaaugaaaagaucaaucaaagccuggccuucauccgcaaauccgacgaacuacuccacaaugucaacgucggaaaaucaacaacaaacaucaugaucaccaccaucaucaucgucaucauaguaauccuccuacugcucaucgccgucggucucuuccuauacugcaaagcccguucuacuccagucacccucuccaaagaccaacuaucaggaaucaacaacaucgccuucagcaacuaaggacuaguggaagcauuuuccuggcugauuaaaagaaauuacucagcuauggucaucuguuccuguuagaaggcuaugcagcauauuauauacuaugcgcauguuaugaaaugcauaauaaaaaauuuuaaaaaaucuaaaagaucuaaaaaaaaaaaaaaaaaaaaaaaaaaaaaaaaaaaaaaaaaaaaaaaaaaaaaaaaaaaaaaaaugcaucccccccccccccccccccccccccccccccaaaggcucuuuucagagccaccagaauu

SEQ ID NO: 15521 - RNA, 1983 nt, Artificial Sequence
  mRNA product Design c-3 comprising derived and/or modified sequence from HRSV(Memphis-37)__AIY60640.1__F_DSCav1_mut3 (opt1)
gggagaguccgcucagccagguugcagaagcggcuuagcguguguccuaaucuucucucugcguguagguaggccugugccgcaaacaagcuuaccauggagcugcccauccucaagaccaacgccaucaccacgauccuggccgcggugacccugugcuucgccagcucccagaacaucaccgaggaguucuaccagagcacgugcuccgccgucagcaagggcuaccucggcgcccugcgcaccgggugguacaccagcgugaucaccaucgagcuguccaacaucaaggagaucaagugcaacggcaccgacgccaaggugaagcucaucaagcaggagcuggacaaguacaagaacgcggucacggaccugcagcuccugaugcagagcaccccggccgccggcuccgggagcgcgaucugcuccggcaucgccgucugcaaggugcugcaccucgagggcgaggugaacaagaucaagaacgcccugcuguccaccaacaaggccgucgugagccucuccaacggggugagcguccugaccuucaaggugcuggaccucaagaacuacaucgacaagcagcugcugcccauccugaacaagcagagcugcuccauccccaacaucgagaccgucaucgaguuccagcagaagaacaaccgccuccuggagaucacgcgggaguucagcgugaacgcgggcgugaccacccccgucuccaccuacaugcugacgaacagcgagcuccugucccugaucaacgacaugccgaucaccaacgaccagaagaagcucaugagcaacaacgugcagaucgugcgccagcaguccuacagcaucaugugcaucaucaaggaggagguccuggccuacguggugcagcugccccucuacggggucaucgacacccccugcuggaagcugcacaccagcccccugugcacgaccaacaccaaggagggcuccaacaucugccucacccggacggaccgcgggugguacugcgacaacgccggcagcguguccuucuucccgcaggccgagaccugcaagguccagagcaaccggguguucugcgacaccaugaacucccugacccugcccagcgaggugaaccucugcaacaucgacaucuucaaccccaaguacgacugcaagaucaugacguccaagaccgacgucagcuccagcgugaucaccucccugggcgccaucgugagcugcuacgggaagaccaagugcacggcgagcaacaagaaccgcggcaucaucaagaccuucuccaacgggugcgacuacgucagcaacaagggcguggacaccguguccgucggcaacacccuguacugcgugaacaagcaggagggccagagccucuacgugaagggggagcccaucaucaacuucuacgacccgcuggucuuccccuccgacgaguucgacgccagcaucucccaggugaacgagaagaucaaccagagccuggccuucauccggaaguccgacgagcuccugcacaacgugaacgucggcaagagcaccacgaacaucaugaucaccaccaucaucaucgugaucaucgugauccugcugcuccugaucgccgucgggcuguuccucuacugcaaggcccgcuccacccccgugacgcugagcaaggaccagcuguccgggaucaacaacaucgcguucagcaacugaggacuaguacuggcugcaucucccuuuccucuguccuccauccuucucccaggauggugaagggggaccugguacccagugauccccaccccaggauccuaaaucaugacuuaccugcuaauaaaaacucauuggaaaagugagaagaucuaaaaaaaaaaaaaaaaaaaaaaaaaaaaaaaaaaaaaaaaaaaaaaaaaaaaaaaaaaaaaaaaugcaucccccccccccccccccccccccccccccccaaaggcucuuuucagagccaccagaauu

SEQ ID NO: 15522 - RNA, 1983 nt, Artificial Sequence
  mRNA product Design c-3 comprising derived and/or modified sequence from HRSV(Memphis-37)__AIY60640.1__F_DSCav1_mut3 (opt1)
gggagaguccgcucagccagguugcagaagcggcuuagcguguguccuaaucuucucucugcguguagguaggccugugccgcaaacaagcuuaccauggagcugcccauccucaagaccaacgccaucaccacgauccuggccgcggugacccugugcuucgccagcucccagaacaucaccgaggaguucuaccagagcacgugcuccgccgucagcaagggcuaccucggggcccugcgcaccggcugguacaccuccgugaucaccaucgagcugagcaacaucaaggagaucaagugcaacgggaccgacgccaaggugaagcucaucaagcaggagcuggacaaguacaagaacgcggucacggaccugcagcuccugaugcaguccaccccggccgccggcagcggguccgccaucugcagcggcaucgcggugugcaaggugcugcaccucgagggcgaggucaacaagaucaagaacgcccugcuguccaccaacaaggccguggugagccucuccaacggggucagcgugcugaccuucaaggugcuggaccucaagaacuacaucgacaagcagcugcugcccauccucaacaagcaguccugcagcauccccaacaucgagacggucaucgaguuccagcagaagaacaaccggcugcuggagaucacccgcgaguucuccgugaacgccggcgugaccacccccgucagcacguacaugcucaccaacuccgagcugcugagccucaucaacgacaugccgaucaccaacgaccagaagaagcugaugagcaacaacgugcagaucgugcggcagcaguccuacagcaucaugugcaucaucaaggaggagguccuggccuacguggugcagcucccccuguacggggucaucgacacccccugcuggaagcugcacacgagcccccucugcaccaccaacaccaaggagggcuccaacaucugccugacgcgcaccgaccgggggugguacugcgacaacgcgggcuccgugagcuucuucccgcaggccgagaccugcaaggugcaguccaaccgcgucuucugcgacaccaugaacagccugacgcuccccuccgaggugaaccugugcaacaucgacaucuucaaccccaaguacgacugcaagaucaugaccagcaagaccgacgucuccagcuccgugaucaccagccugggcgccaucguguccugcuacgggaagacgaagugcaccgccagcaacaagaaccggggcaucaucaagaccuucuccaacgggugcgacuacgucagcaacaagggcguggacaccguguccgucggcaacacgcucuacugcgugaacaagcaggaggggcagagccuguacgugaagggcgagcccaucaucaacuucuacgacccgcuggucuuccccagcgacgaguucgacgccuccaucagccaggugaacgagaagaucaaccagucccucgcguucauccgcaagagcgacgagcugcugcacaacgugaacgucgggaaguccaccaccaacaucaugaucaccaccaucaucaucgugaucaucgugauccuccugcugcucaucgccgucggccuguuccuguacugcaaggcccggagcacgcccgugacccuguccaaggaccagcucagcgggaucaacaacaucgccuucuccaacugaggacuaguacuggcugcaucucccuuuccucuguccuccauccuucucccaggauggugaagggggaccugguacccagugauccccaccccaggauccuaaaucaugacuuaccugcuaauaaaaacucauuggaaaagugagaagaucuaaaaaaaaaaaaaaaaaaaaaaaaaaaaaaaaaaaaaaaaaaaaaaaaaaaaaaaaaaaaaaaaugcaucccccccccccccccccccccccccccccccaaaggcucuuuucagagccaccagaauu

SEQ ID NO: 15523 - RNA, 1983 nt, Artificial Sequence
  mRNA product Design c-3 comprising derived and/or modified sequence from HRSV(Memphis-37)__AIY60640.1__F_DSCav1_mut3 (opt2)
gggagaguccgcucagccagguugcagaagcggcuuagcguguguccuaaucuucucucugcguguagguaggccugugccgcaaacaagcuuaccauggagcuccccauccucaagaccaacgccaucaccaccauccucgccgccgucacccucugcuucgccuccucccagaacaucaccgaggaguucuaccaguccaccugcuccgccgucuccaagggcuaccucggcgcccuccgcaccggcugguacaccuccgucaucaccaucgagcucuccaacaucaaggagaucaagugcaacggcaccgacgccaaggucaagcucaucaagcaggagcucgacaaguacaagaacgccgucaccgaccuccagcuccucaugcaguccacccccgccgccggcuccggcuccgccaucugcuccggcaucgccgucugcaagguccuccaccucgagggcgaggucaacaagaucaagaacgcccuccucuccaccaacaaggccgucgucucccucuccaacggcgucuccguccucaccuucaagguccucgaccucaagaacuacaucgacaagcagcuccuccccauccucaacaagcaguccugcuccauccccaacaucgagaccgucaucgaguuccagcagaagaacaaccgccuccucgagaucacccgcgaguucuccgucaacgccggcgucaccacccccgucuccaccuacaugcucaccaacuccgagcuccucucccucaucaacgacaugcccaucaccaacgaccagaagaagcucauguccaacaacguccagaucguccgccagcaguccuacuccaucaugugcaucaucaaggaggagguccucgccuacgucguccagcucccccucuacggcgucaucgacacccccugcuggaagcuccacaccuccccccucugcaccaccaacaccaaggagggcuccaacaucugccucacccgcaccgaccgcggcugguacugcgacaacgccggcuccgucuccuucuucccccaggccgagaccugcaagguccaguccaaccgcgucuucugcgacaccaugaacucccucacccuccccuccgaggucaaccucugcaacaucgacaucuucaaccccaaguacgacugcaagaucaugaccuccaagaccgacgucuccuccuccgucaucaccucccucggcgccaucgucuccugcuacggcaagaccaagugcaccgccuccaacaagaaccgcggcaucaucaagaccuucuccaacggcugcgacuacgucuccaacaagggcgucgacaccgucuccgucggcaacacccucuacugcgucaacaagcaggagggccagucccucuacgucaagggcgagcccaucaucaacuucuacgacccccucgucuuccccuccgacgaguucgacgccuccaucucccaggucaacgagaagaucaaccagucccucgccuucauccgcaaguccgacgagcuccuccacaacgucaacgucggcaaguccaccaccaacaucaugaucaccaccaucaucaucgucaucaucgucauccuccuccuccucaucgccgucggccucuuccucuacugcaaggcccgcuccacccccgucacccucuccaaggaccagcucuccggcaucaacaacaucgccuucuccaacugaggacuaguacuggcugcaucucccuuuccucuguccuccauccuucucccaggauggugaagggggaccugguacccagugauccccaccccaggauccuaaaucaugacuuaccugcuaauaaaaacucauuggaaaagugagaagaucuaaaaaaaaaaaaaaaaaaaaaaaaaaaaaaaaaaaaaaaaaaaaaaaaaaaaaaaaaaaaaaaaugcaucccccccccccccccccccccccccccccccaaaggcucuuuucagagccaccagaauu

SEQ ID NO: 15524 - RNA, 1983 nt, Artificial Sequence
  mRNA product Design c-3 comprising derived and/or modified sequence from HRSV(Memphis-37)__AIY60640.1__F_DSCav1_mut3 (opt3)
gggagaguccgcucagccagguugcagaagcggcuuagcguguguccuaaucuucucucugcguguagguaggccugugccgcaaacaagcuuaccauggagcugcccauccucaagaccaacgccauuacaacuauacuugcugcagugacgcugugcuucgccagcucccagaauaucaccgaagaguuuuaccaaucuacauguucagcggucaguaaaggcuauuugggggcuuuaagaacuggaugguacaccagcguuauuacaaucgaacuguccaacauuaaggagaucaaaugcaaugguaccgacgccaaggugaaacuaauaaagcaggaacucgauaaguauaaaaacgcaguaacugaccugcagcuucugaugcagucuacuccugccgcuggcucggggucagcaaucuguagcggaauugccgugugcaaggucuugcaccucgagggcgaggugaauaaaaucaagaacgcucugcugaguaccaauaaagccguugugucccucucuaacggugucagcguguuaacguucaagguacuggaucuuaagaauuacauugacaaacaauugcugccaauccuaaacaagcaguccuguucaauaccgaauauugaaacuguuaucgaguuucagcagaaaaacaauaggcuccuggaaauuacccgggaguucagugugaacgcgggggucacaacucccgugagcaccuauaugcuuacaaauucugagcuguugucccucaucaacgauaugccuaucaccaacgaccaaaagaaacugaugucaaauaacgugcagauuguccgccagcagagcuacaguauaaugugcaucauuaaggaagagguuuuagcauaugugguacaacugccacucuacggagugaucgauacgcccuguuggaaacuucauacuucuccucugugcacaaccaauacuaaggaaggcuccaacauauguuugacacgaaccgaccguggcugguacugcgauaaugccgggagcgucucguuuuucccacaggcugagacguguaaggugcagucuaacagaguuuucugcgacaccaugaacucccuaacacugcccucagaagugaaucucugcaauauugauaucuucaacccuaaauaugacuguaagaucaugacaaguaaaaccgaugucagcuccucugugauuacaagccugggagccaucguaucaugcuacgguaagacuaaauguaccgcaaguaauaagaacaggggcauuauaaagacauuuuccaaugggugcgacuauguuagcaacaaaggaguggacaccgucucugugggcaauacucuuuacugugucaacaagcaagagggucagucacuguaugugaaaggggagccaaucauuaacuucuacgauccguugguuuuucccagugacgaauuugaugcuagcaucucccaggugaaugagaagaucaaccagucucucgccuuuauucggaaaucggacgaacuguuacacaauguaaacgucggaaagagcacgacaaauauaaugaucaccacuauuaucauugugaucauaguuauccugcuacuccugauugcggugggccuuuucuuguauugcaaggcccgcuccaccccugucacacugucaaaagaucaacucaguggcaucaacaauauugcauucucuaacugaggacuaguacuggcugcaucucccuuuccucuguccuccauccuucucccaggauggugaagggggaccugguacccagugauccccaccccaggauccuaaaucaugacuuaccugcuaauaaaaacucauuggaaaagugagaagaucuaaaaaaaaaaaaaaaaaaaaaaaaaaaaaaaaaaaaaaaaaaaaaaaaaaaaaaaaaaaaaaaaugcaucccccccccccccccccccccccccccccccaaaggcucuuuucagagccaccagaauu

SEQ ID NO: 15525 - RNA, 1983 nt, Artificial Sequence
  mRNA product Design c-3 comprising derived and/or modified sequence from HRSV(Memphis-37)__AIY60640.1__F_DSCav1_mut3 (opt4)
gggagaguccgcucagccagguugcagaagcggcuuagcguguguccuaaucuucucucugcguguagguaggccugugccgcaaacaagcuuaccauggagcugcccauccugaagaccaacgccaucaccaccauccuggccgccgugacccugugcuucgccagcagccagaacaucaccgaggaguucuaccagagcaccugcagcgccgugagcaagggcuaccugggcgcccugagaaccggcugguacaccagcgugaucaccaucgagcugagcaacaucaaggagaucaagugcaacggcaccgacgccaaggugaagcugaucaagcaggagcuggacaaguacaagaacgccgugaccgaccugcagcugcugaugcagagcacccccgccgccggcagcggcagcgccaucugcagcggcaucgccgugugcaaggugcugcaccuggagggcgaggugaacaagaucaagaacgcccugcugagcaccaacaaggccguggugagccugagcaacggcgugagcgugcugaccuucaaggugcuggaccugaagaacuacaucgacaagcagcugcugcccauccugaacaagcagagcugcagcauccccaacaucgagaccgugaucgaguuccagcagaagaacaacagacugcuggagaucaccagagaguucagcgugaacgccggcgugaccacccccgugagcaccuacaugcugaccaacagcgagcugcugagccugaucaacgacaugcccaucaccaacgaccagaagaagcugaugagcaacaacgugcagaucgugagacagcagagcuacagcaucaugugcaucaucaaggaggaggugcuggccuacguggugcagcugccccuguacggcgugaucgacacccccugcuggaagcugcacaccagcccccugugcaccaccaacaccaaggagggcagcaacaucugccugaccagaaccgacagaggcugguacugcgacaacgccggcagcgugagcuucuucccccaggccgagaccugcaaggugcagagcaacagaguguucugcgacaccaugaacagccugacccugcccagcgaggugaaccugugcaacaucgacaucuucaaccccaaguacgacugcaagaucaugaccagcaagaccgacgugagcagcagcgugaucaccagccugggcgccaucgugagcugcuacggcaagaccaagugcaccgccagcaacaagaacagaggcaucaucaagaccuucagcaacggcugcgacuacgugagcaacaagggcguggacaccgugagcgugggcaacacccuguacugcgugaacaagcaggagggccagagccuguacgugaagggcgagcccaucaucaacuucuacgacccccugguguuccccagcgacgaguucgacgccagcaucagccaggugaacgagaagaucaaccagagccuggccuucaucagaaagagcgacgagcugcugcacaacgugaacgugggcaagagcaccaccaacaucaugaucaccaccaucaucaucgugaucaucgugauccugcugcugcugaucgccgugggccuguuccuguacugcaaggccagaagcacccccgugacccugagcaaggaccagcugagcggcaucaacaacaucgccuucagcaacugaggacuaguacuggcugcaucucccuuuccucuguccuccauccuucucccaggauggugaagggggaccugguacccagugauccccaccccaggauccuaaaucaugacuuaccugcuaauaaaaacucauuggaaaagugagaagaucuaaaaaaaaaaaaaaaaaaaaaaaaaaaaaaaaaaaaaaaaaaaaaaaaaaaaaaaaaaaaaaaaugcaucccccccccccccccccccccccccccccccaaaggcucuuuucagagccaccagaauu

SEQ ID NO: 15526 - RNA, 1983 nt, Artificial Sequence
  mRNA product Design c-3 comprising derived and/or modified sequence from HRSV(Memphis-37)__AIY60640.1__F_DSCav1_mut3 (opt5)
gggagaguccgcucagccagguugcagaagcggcuuagcguguguccuaaucuucucucugcguguagguaggccugugccgcaaacaagcuuaccauggagcugcccauccucaagaccaacgccauuacaacgauccuggcugccgugacccuuugcuucgcgagcucccagaauauuacagaagaguuuuaccaaucuaccuguagcgcugucuccaaaggcuaucugggggcccucagaacaggaugguacaccucuguuaucacaauugaacugagcaacaucaaggagaucaaaugcaauggcaccgacgccaaggugaaacuuauuaagcaggaacuggauaaguauaaaaacgcugugacggaccuccagcugcugaugcaguccaccccugccgcugggucuggaagcgccaucuguuccggcauugcggucugcaaggugcuccaccuggagggggagguuaauaaaaucaagaacgcccuucugagcacaaauaaagcuguggucucucucuccaacggagugagcguucugaccuucaaggugcuugaucugaagaauuacauugacaaacaacuccugccgauccugaacaagcagucuuguuccauucccaauaucgaaacagucaucgaguuucagcagaaaaacaaucggcuccuggaaauuacccgcgaguucagcgugaacgccggcgugacgacaccugucucuaccuauaugcuuacaaauuccgagcugcucagccugaucaacgauaugcccauuaccaacgaccaaaagaaacuuauguccaauaacguucagaucgugagacagcagucuuacagcauuaugugcaucaucaaggaagaggugcuggcuuaugucgugcaacucccucuguacggcguuauugauacccccuguuggaaacugcauacauccccucucugcacgaccaauacaaaggaagggagcaacaucugucugacccggacagaccgcggaugguacugcgauaaugccggcucuguguccuuuuucccgcaggcggagaccuguaagguccagagcaacagaguguuuugcgacacgaugaacucucuuacacugcccagcgaaguuaaucucugcaauauugauaucuucaacccuaaauaugacuguaagauuaugaccuccaaaaccgaugugucuagcuccgucaucacaagccugggggccaucgugucuugcuacggaaagaccaaauguacagcuuccaauaagaaccggggcauuaucaagacguuuagcaaugggugcgacuaugucucuaacaaaggaguggacaccguuuccgugggcaauacacuuuacugugucaacaagcaagagggccagagccuguaugugaaaggggagcccauuaucaacuucuacgauccucucguuuuucccuccgacgaguucgaugccucuauuagccaggugaaugaaaagaucaaccagucccuggcuuuuauucgcaaaucugacgaacugcuccacaaugucaacgugggaaagagcaccacaaauaucaugaucaccacgauuaucauugugaucauuguuauccugcuucugcucaucgccgucggccuguuccuguauugcaaggccagauccaccccggugacacuuagcaaagaucaacucucugggauuaacaauaucgcuuucuccaacugaggacuaguacuggcugcaucucccuuuccucuguccuccauccuucucccaggauggugaagggggaccugguacccagugauccccaccccaggauccuaaaucaugacuuaccugcuaauaaaaacucauuggaaaagugagaagaucuaaaaaaaaaaaaaaaaaaaaaaaaaaaaaaaaaaaaaaaaaaaaaaaaaaaaaaaaaaaaaaaaugcaucccccccccccccccccccccccccccccccaaaggcucuuuucagagccaccagaauu

SEQ ID NO: 15527 - RNA, 1983 nt, Artificial Sequence
  mRNA product Design c-3 comprising derived and/or modified sequence from HRSV(Memphis-37)__AIY60640.1__F_DSCav1_mut3 (opt6)
gggagaguccgcucagccagguugcagaagcggcuuagcguguguccuaaucuucucucugcguguagguaggccugugccgcaaacaagcuuaccauggaauuaccaauacuaaaaacaaaugccaucaccaccauccuggccgccguaacauuaugcuucgcaaguucacaaaauauaacagaagaauuuuaucaaucaacuugcagcgccguaucaaaaggcuacuuaggcgcacuacguacaggaugguacacaucaguaauaaccauagaacuauccaauauuaaagaaauaaaaugcaauggaacagacgcaaaaguuaaacuaauaaaacaagaauuagacaaauacaaaaacgcaguaaccgaccuucaauuacuaaugcaaucuacccccgcugcagguuccggaucagcaauauguucaggaauugcaguaugcaaaguccuacacuuagaaggagaaguaaacaaaauaaaaaacgcacuauuaagcaccaauaaagcagucguaucauuauccaacggcguuucaguacuaacauuuaaaguacuugaccuaaaaaacuauauagacaaacaacuacuucccauccuuaacaaacaaagcugcucaauaccuaauaucgaaacaguaauagaauuucaacaaaaaaacaaucgauuauuagaaaucacacgagaauuuucugucaacgcaggagucaccacacccguaucuacuuauauguuaaccaacucugaauuauuaucacuaaucaaugacaugccaauaacaaacgaucaaaaaaaauuaaugucaaauaacguacaaauaguaagacaacaaucauacucaauaaugugcauuauaaaagaagaaguacuagccuauguuguacaacucccacucuacggcguaauagacacaccaugcuggaaauuacacacuucaccacuaugcacaacaaacacaaaagaaggaucaaacaucugccuaaccagaaccgauagaggaugguauugcgacaaugccggaucaguuucauucuucccacaagcagaaacaugcaaaguacaauccaacagaguuuucugugacacaaugaacucgcuaacauuacccagcgaaguaaaccucugcaacauagacauauucaacccaaaauacgauugcaaaauaaugacuucuaaaacagauguuuccucaagcgucauaacgaguuuaggagcaauaguaagcuguuacggaaaaaccaaauguaccgcaucaaacaaaaaccgaggaauaauaaaaaccuuuucaaacggaugcgauuacgucuccaacaaaggagucgacacaguaucaguuggcaauacucuuuacugcguaaauaaacaagaaggacaaucacuauacguaaaaggcgaaccaauaauaaacuucuacgacccccucgucuucccuucagaugaauuugacgcaagcaucucacaaguuaaugaaaaaauaaaucaauccuuagcauucauacgaaaaucagacgaacuauuacacaacguaaacguaggaaaaucaacgacaaacauaaugauaacaacuaucauuauagucauaauagucauacuacuacuauuaauagccguaggcuuauuccuauacugcaaagcaagaucuacuccaguaacacucucaaaagaccaauuaucuggaauaaauaacauagcauucucuaauuaaggacuaguacuggcugcaucucccuuuccucuguccuccauccuucucccaggauggugaagggggaccugguacccagugauccccaccccaggauccuaaaucaugacuuaccugcuaauaaaaacucauuggaaaagugagaagaucuaaaaaaaaaaaaaaaaaaaaaaaaaaaaaaaaaaaaaaaaaaaaaaaaaaaaaaaaaaaaaaaaugcaucccccccccccccccccccccccccccccccaaaggcucuuuucagagccaccagaauu

SEQ ID NO: 15528 - RNA, 1983 nt, Artificial Sequence
  mRNA product Design c-3 comprising derived and/or modified sequence from HRSV(Memphis-37)__AIY60640.1__F_DSCav1_mut3 (opt11)
gggagaguccgcucagccagguugcagaagcggcuuagcguguguccuaaucuucucucugcguguagguaggccugugccgcaaacaagcuuaccauggaacuccccauccucaaaaccaacgccauuaccacgauccucgccgcagucacccucugcuucgccuccucacaaaacaucacagaagaauuuuaccaaaguaccugcuccgccgucagcaaaggauaccucggcgcccuccgcaccggcugguacacauccgucauaaccaucgaacucagcaacaucaaagaaaucaaauguaacggaaccgacgccaaaguaaaacuaauaaaacaagaacucgacaaauacaagaacgccgucaccgaccuccaacuccucaugcaaucuacccccgccgccggcucagguagcgccaucugcagcgguauugccgucugcaaaguacuccaccuagaaggagaagucaauaaaaucaaaaacgcccuacucuccaccaacaaggcagucgucagccucuccaacggcgucucagucuuaaccuucaaagugcucgaccucaaaaauuacauagacaaacaacuacuccccauucucaacaaacaauccugcuccauacccaacauagaaaccgucauugaauuucaacagaaaaacaaccgccuccucgaaaucacgcgcgaguucagugucaacgccggcgucaccaccccagucucgacauacaugcucacaaacucagaacuccucucguuaaucaacgacaugccaauaaccaacgaccaaaagaaacuaauguccaacaacguucaaauaguucgccaacaaucauacuccauaaugugcaucaucaaagaagaaguccucgccuacguuguacaauuaccccucuacggcgucaucgacacaccaugcuggaaacuccacacaucgccccucugcaccaccaacaccaaagaaggcagcaacauuugccucacccggacagaccgcggcugguacugcgacaaugcaggcagcgucucauucuucccacaagccgaaaccugcaaaguccaaagcaaccgugucuucugcgacacaaugaacucccuuacccucccaagcgaaguaaaccucugcaauauugacaucuucaaccccaaauacgacugcaaaaucaugaccuccaaaaccgacgucuccucaucagucaucaccucccuuggcgccauugucuccuguuacgguaaaaccaaaugcaccgccuccaacaaaaaccgcggcaucaucaaaaccuucucuaacggcugcgacuacgucucaaacaaaggcgucgacacugucuccgucggcaacacccuauacugcgucaacaagcaagaaggacagucccuauacguaaaaggugaaccaauuaucaacuucuacgacccccuagucuucccauccgacgaguucgaugccuccaucucccaaguaaaugaaaagaucaaucaaagccuggccuucauccgcaaauccgacgaacuacuccacaaugucaacgucggaaaaucaacaacaaacaucaugaucaccaccaucaucaucgucaucauaguaauccuccuacugcucaucgccgucggucucuuccuauacugcaaagcccguucuacuccagucacccucuccaaagaccaacuaucaggaaucaacaacaucgccuucagcaacuaaggacuaguacuggcugcaucucccuuuccucuguccuccauccuucucccaggauggugaagggggaccugguacccagugauccccaccccaggauccuaaaucaugacuuaccugcuaauaaaaacucauuggaaaagugagaagaucuaaaaaaaaaaaaaaaaaaaaaaaaaaaaaaaaaaaaaaaaaaaaaaaaaaaaaaaaaaaaaaaaugcaucccccccccccccccccccccccccccccccaaaggcucuuuucagagccaccagaauu

SEQ ID NO: 15529 - RNA, 1979 nt, Artificial Sequence
  mRNA product Design c-4 comprising derived and/or modified sequence from HRSV(Memphis-37)__AIY60640.1__F_DSCav1_mut3 (opt1)
gggagaguccgcucagccagguugcagaagcggcuuagcguguguccuaaucuucucucugcguguagguaggccugugccgcaaacaagcuuaccauggagcugcccauccucaagaccaacgccaucaccacgauccuggccgcggugacccugugcuucgccagcucccagaacaucaccgaggaguucuaccagagcacgugcuccgccgucagcaagggcuaccucggcgcccugcgcaccgggugguacaccagcgugaucaccaucgagcuguccaacaucaaggagaucaagugcaacggcaccgacgccaaggugaagcucaucaagcaggagcuggacaaguacaagaacgcggucacggaccugcagcuccugaugcagagcaccccggccgccggcuccgggagcgcgaucugcuccggcaucgccgucugcaaggugcugcaccucgagggcgaggugaacaagaucaagaacgcccugcuguccaccaacaaggccgucgugagccucuccaacggggugagcguccugaccuucaaggugcuggaccucaagaacuacaucgacaagcagcugcugcccauccugaacaagcagagcugcuccauccccaacaucgagaccgucaucgaguuccagcagaagaacaaccgccuccuggagaucacgcgggaguucagcgugaacgcgggcgugaccacccccgucuccaccuacaugcugacgaacagcgagcuccugucccugaucaacgacaugccgaucaccaacgaccagaagaagcucaugagcaacaacgugcagaucgugcgccagcaguccuacagcaucaugugcaucaucaaggaggagguccuggccuacguggugcagcugccccucuacggggucaucgacacccccugcuggaagcugcacaccagcccccugugcacgaccaacaccaaggagggcuccaacaucugccucacccggacggaccgcgggugguacugcgacaacgccggcagcguguccuucuucccgcaggccgagaccugcaagguccagagcaaccggguguucugcgacaccaugaacucccugacccugcccagcgaggugaaccucugcaacaucgacaucuucaaccccaaguacgacugcaagaucaugacguccaagaccgacgucagcuccagcgugaucaccucccugggcgccaucgugagcugcuacgggaagaccaagugcacggcgagcaacaagaaccgcggcaucaucaagaccuucuccaacgggugcgacuacgucagcaacaagggcguggacaccguguccgucggcaacacccuguacugcgugaacaagcaggagggccagagccucuacgugaagggggagcccaucaucaacuucuacgacccgcuggucuuccccuccgacgaguucgacgccagcaucucccaggugaacgagaagaucaaccagagccuggccuucauccggaaguccgacgagcuccugcacaacgugaacgucggcaagagcaccacgaacaucaugaucaccaccaucaucaucgugaucaucgugauccugcugcuccugaucgccgucgggcuguuccucuacugcaaggcccgcuccacccccgugacgcugagcaaggaccagcuguccgggaucaacaacaucgcguucagcaacugaggacuaguggaagcauuuuccuggcugauuaaaagaaauuacucagcuauggucaucuguuccuguuagaaggcuaugcagcauauuauauacuaugcgcauguuaugaaaugcauaauaaaaaauuuuaaaaaaucuaaaagaucuaaaaaaaaaaaaaaaaaaaaaaaaaaaaaaaaaaaaaaaaaaaaaaaaaaaaaaaaaaaaaaaaugcaucccccccccccccccccccccccccccccccaaaggcucuuuucagagccaccagaauu

SEQ ID NO: 15530 - RNA, 1979 nt, Artificial Sequence
  mRNA product Design c-4 comprising derived and/or modified sequence from HRSV(Memphis-37)__AIY60640.1__F_DSCav1_mut3 (opt1)
gggagaguccgcucagccagguugcagaagcggcuuagcguguguccuaaucuucucucugcguguagguaggccugugccgcaaacaagcuuaccauggagcugcccauccucaagaccaacgccaucaccacgauccuggccgcggugacccugugcuucgccagcucccagaacaucaccgaggaguucuaccagagcacgugcuccgccgucagcaagggcuaccucggggcccugcgcaccggcugguacaccuccgugaucaccaucgagcugagcaacaucaaggagaucaagugcaacgggaccgacgccaaggugaagcucaucaagcaggagcuggacaaguacaagaacgcggucacggaccugcagcuccugaugcaguccaccccggccgccggcagcggguccgccaucugcagcggcaucgcggugugcaaggugcugcaccucgagggcgaggucaacaagaucaagaacgcccugcuguccaccaacaaggccguggugagccucuccaacggggucagcgugcugaccuucaaggugcuggaccucaagaacuacaucgacaagcagcugcugcccauccucaacaagcaguccugcagcauccccaacaucgagacggucaucgaguuccagcagaagaacaaccggcugcuggagaucacccgcgaguucuccgugaacgccggcgugaccacccccgucagcacguacaugcucaccaacuccgagcugcugagccucaucaacgacaugccgaucaccaacgaccagaagaagcugaugagcaacaacgugcagaucgugcggcagcaguccuacagcaucaugugcaucaucaaggaggagguccuggccuacguggugcagcucccccuguacggggucaucgacacccccugcuggaagcugcacacgagcccccucugcaccaccaacaccaaggagggcuccaacaucugccugacgcgcaccgaccgggggugguacugcgacaacgcgggcuccgugagcuucuucccgcaggccgagaccugcaaggugcaguccaaccgcgucuucugcgacaccaugaacagccugacgcuccccuccgaggugaaccugugcaacaucgacaucuucaaccccaaguacgacugcaagaucaugaccagcaagaccgacgucuccagcuccgugaucaccagccugggcgccaucguguccugcuacgggaagacgaagugcaccgccagcaacaagaaccggggcaucaucaagaccuucuccaacgggugcgacuacgucagcaacaagggcguggacaccguguccgucggcaacacgcucuacugcgugaacaagcaggaggggcagagccuguacgugaagggcgagcccaucaucaacuucuacgacccgcuggucuuccccagcgacgaguucgacgccuccaucagccaggugaacgagaagaucaaccagucccucgcguucauccgcaagagcgacgagcugcugcacaacgugaacgucgggaaguccaccaccaacaucaugaucaccaccaucaucaucgugaucaucgugauccuccugcugcucaucgccgucggccuguuccuguacugcaaggcccggagcacgcccgugacccuguccaaggaccagcucagcgggaucaacaacaucgccuucuccaacugaggacuaguggaagcauuuuccuggcugauuaaaagaaauuacucagcuauggucaucuguuccuguuagaaggcuaugcagcauauuauauacuaugcgcauguuaugaaaugcauaauaaaaaauuuuaaaaaaucuaaaagaucuaaaaaaaaaaaaaaaaaaaaaaaaaaaaaaaaaaaaaaaaaaaaaaaaaaaaaaaaaaaaaaaaugcaucccccccccccccccccccccccccccccccaaaggcucuuuucagagccaccagaauu

SEQ ID NO: 15531 - RNA, 1979 nt, Artificial Sequence
  mRNA product Design c-4 comprising derived and/or modified sequence from HRSV(Memphis-37)__AIY60640.1__F_DSCav1_mut3 (opt2)
gggagaguccgcucagccagguugcagaagcggcuuagcguguguccuaaucuucucucugcguguagguaggccugugccgcaaacaagcuuaccauggagcuccccauccucaagaccaacgccaucaccaccauccucgccgccgucacccucugcuucgccuccucccagaacaucaccgaggaguucuaccaguccaccugcuccgccgucuccaagggcuaccucggcgcccuccgcaccggcugguacaccuccgucaucaccaucgagcucuccaacaucaaggagaucaagugcaacggcaccgacgccaaggucaagcucaucaagcaggagcucgacaaguacaagaacgccgucaccgaccuccagcuccucaugcaguccacccccgccgccggcuccggcuccgccaucugcuccggcaucgccgucugcaagguccuccaccucgagggcgaggucaacaagaucaagaacgcccuccucuccaccaacaaggccgucgucucccucuccaacggcgucuccguccucaccuucaagguccucgaccucaagaacuacaucgacaagcagcuccuccccauccucaacaagcaguccugcuccauccccaacaucgagaccgucaucgaguuccagcagaagaacaaccgccuccucgagaucacccgcgaguucuccgucaacgccggcgucaccacccccgucuccaccuacaugcucaccaacuccgagcuccucucccucaucaacgacaugcccaucaccaacgaccagaagaagcucauguccaacaacguccagaucguccgccagcaguccuacuccaucaugugcaucaucaaggaggagguccucgccuacgucguccagcucccccucuacggcgucaucgacacccccugcuggaagcuccacaccuccccccucugcaccaccaacaccaaggagggcuccaacaucugccucacccgcaccgaccgcggcugguacugcgacaacgccggcuccgucuccuucuucccccaggccgagaccugcaagguccaguccaaccgcgucuucugcgacaccaugaacucccucacccuccccuccgaggucaaccucugcaacaucgacaucuucaaccccaaguacgacugcaagaucaugaccuccaagaccgacgucuccuccuccgucaucaccucccucggcgccaucgucuccugcuacggcaagaccaagugcaccgccuccaacaagaaccgcggcaucaucaagaccuucuccaacggcugcgacuacgucuccaacaagggcgucgacaccgucuccgucggcaacacccucuacugcgucaacaagcaggagggccagucccucuacgucaagggcgagcccaucaucaacuucuacgacccccucgucuuccccuccgacgaguucgacgccuccaucucccaggucaacgagaagaucaaccagucccucgccuucauccgcaaguccgacgagcuccuccacaacgucaacgucggcaaguccaccaccaacaucaugaucaccaccaucaucaucgucaucaucgucauccuccuccuccucaucgccgucggccucuuccucuacugcaaggcccgcuccacccccgucacccucuccaaggaccagcucuccggcaucaacaacaucgccuucuccaacugaggacuaguggaagcauuuuccuggcugauuaaaagaaauuacucagcuauggucaucuguuccuguuagaaggcuaugcagcauauuauauacuaugcgcauguuaugaaaugcauaauaaaaaauuuuaaaaaaucuaaaagaucuaaaaaaaaaaaaaaaaaaaaaaaaaaaaaaaaaaaaaaaaaaaaaaaaaaaaaaaaaaaaaaaaugcaucccccccccccccccccccccccccccccccaaaggcucuuuucagagccaccagaauu

SEQ ID NO: 15532 - RNA, 1979 nt, Artificial Sequence
  mRNA product Design c-4 comprising derived and/or modified sequence from HRSV(Memphis-37)__AIY60640.1__F_DSCav1_mut3 (opt3)
gggagaguccgcucagccagguugcagaagcggcuuagcguguguccuaaucuucucucugcguguagguaggccugugccgcaaacaagcuuaccauggagcugcccauccucaagaccaacgccauuacaacuauacuugcugcagugacgcugugcuucgccagcucccagaauaucaccgaagaguuuuaccaaucuacauguucagcggucaguaaaggcuauuugggggcuuuaagaacuggaugguacaccagcguuauuacaaucgaacuguccaacauuaaggagaucaaaugcaaugguaccgacgccaaggugaaacuaauaaagcaggaacucgauaaguauaaaaacgcaguaacugaccugcagcuucugaugcagucuacuccugccgcuggcucggggucagcaaucuguagcggaauugccgugugcaaggucuugcaccucgagggcgaggugaauaaaaucaagaacgcucugcugaguaccaauaaagccguugugucccucucuaacggugucagcguguuaacguucaagguacuggaucuuaagaauuacauugacaaacaauugcugccaauccuaaacaagcaguccuguucaauaccgaauauugaaacuguuaucgaguuucagcagaaaaacaauaggcuccuggaaauuacccgggaguucagugugaacgcgggggucacaacucccgugagcaccuauaugcuuacaaauucugagcuguugucccucaucaacgauaugccuaucaccaacgaccaaaagaaacugaugucaaauaacgugcagauuguccgccagcagagcuacaguauaaugugcaucauuaaggaagagguuuuagcauaugugguacaacugccacucuacggagugaucgauacgcccuguuggaaacuucauacuucuccucugugcacaaccaauacuaaggaaggcuccaacauauguuugacacgaaccgaccguggcugguacugcgauaaugccgggagcgucucguuuuucccacaggcugagacguguaaggugcagucuaacagaguuuucugcgacaccaugaacucccuaacacugcccucagaagugaaucucugcaauauugauaucuucaacccuaaauaugacuguaagaucaugacaaguaaaaccgaugucagcuccucugugauuacaagccugggagccaucguaucaugcuacgguaagacuaaauguaccgcaaguaauaagaacaggggcauuauaaagacauuuuccaaugggugcgacuauguuagcaacaaaggaguggacaccgucucugugggcaauacucuuuacugugucaacaagcaagagggucagucacuguaugugaaaggggagccaaucauuaacuucuacgauccguugguuuuucccagugacgaauuugaugcuagcaucucccaggugaaugagaagaucaaccagucucucgccuuuauucggaaaucggacgaacuguuacacaauguaaacgucggaaagagcacgacaaauauaaugaucaccacuauuaucauugugaucauaguuauccugcuacuccugauugcggugggccuuuucuuguauugcaaggcccgcuccaccccugucacacugucaaaagaucaacucaguggcaucaacaauauugcauucucuaacugaggacuaguggaagcauuuuccuggcugauuaaaagaaauuacucagcuauggucaucuguuccuguuagaaggcuaugcagcauauuauauacuaugcgcauguuaugaaaugcauaauaaaaaauuuuaaaaaaucuaaaagaucuaaaaaaaaaaaaaaaaaaaaaaaaaaaaaaaaaaaaaaaaaaaaaaaaaaaaaaaaaaaaaaaaugcaucccccccccccccccccccccccccccccccaaaggcucuuuucagagccaccagaauu

SEQ ID NO: 15533 - RNA, 1979 nt, Artificial Sequence
  mRNA product Design c-4 comprising derived and/or modified sequence from HRSV(Memphis-37)__AIY60640.1__F_DSCav1_mut3 (opt4)
gggagaguccgcucagccagguugcagaagcggcuuagcguguguccuaaucuucucucugcguguagguaggccugugccgcaaacaagcuuaccauggagcugcccauccugaagaccaacgccaucaccaccauccuggccgccgugacccugugcuucgccagcagccagaacaucaccgaggaguucuaccagagcaccugcagcgccgugagcaagggcuaccugggcgcccugagaaccggcugguacaccagcgugaucaccaucgagcugagcaacaucaaggagaucaagugcaacggcaccgacgccaaggugaagcugaucaagcaggagcuggacaaguacaagaacgccgugaccgaccugcagcugcugaugcagagcacccccgccgccggcagcggcagcgccaucugcagcggcaucgccgugugcaaggugcugcaccuggagggcgaggugaacaagaucaagaacgcccugcugagcaccaacaaggccguggugagccugagcaacggcgugagcgugcugaccuucaaggugcuggaccugaagaacuacaucgacaagcagcugcugcccauccugaacaagcagagcugcagcauccccaacaucgagaccgugaucgaguuccagcagaagaacaacagacugcuggagaucaccagagaguucagcgugaacgccggcgugaccacccccgugagcaccuacaugcugaccaacagcgagcugcugagccugaucaacgacaugcccaucaccaacgaccagaagaagcugaugagcaacaacgugcagaucgugagacagcagagcuacagcaucaugugcaucaucaaggaggaggugcuggccuacguggugcagcugccccuguacggcgugaucgacacccccugcuggaagcugcacaccagcccccugugcaccaccaacaccaaggagggcagcaacaucugccugaccagaaccgacagaggcugguacugcgacaacgccggcagcgugagcuucuucccccaggccgagaccugcaaggugcagagcaacagaguguucugcgacaccaugaacagccugacccugcccagcgaggugaaccugugcaacaucgacaucuucaaccccaaguacgacugcaagaucaugaccagcaagaccgacgugagcagcagcgugaucaccagccugggcgccaucgugagcugcuacggcaagaccaagugcaccgccagcaacaagaacagaggcaucaucaagaccuucagcaacggcugcgacuacgugagcaacaagggcguggacaccgugagcgugggcaacacccuguacugcgugaacaagcaggagggccagagccuguacgugaagggcgagcccaucaucaacuucuacgacccccugguguuccccagcgacgaguucgacgccagcaucagccaggugaacgagaagaucaaccagagccuggccuucaucagaaagagcgacgagcugcugcacaacgugaacgugggcaagagcaccaccaacaucaugaucaccaccaucaucaucgugaucaucgugauccugcugcugcugaucgccgugggccuguuccuguacugcaaggccagaagcacccccgugacccugagcaaggaccagcugagcggcaucaacaacaucgccuucagcaacugaggacuaguggaagcauuuuccuggcugauuaaaagaaauuacucagcuauggucaucuguuccuguuagaaggcuaugcagcauauuauauacuaugcgcauguuaugaaaugcauaauaaaaaauuuuaaaaaaucuaaaagaucuaaaaaaaaaaaaaaaaaaaaaaaaaaaaaaaaaaaaaaaaaaaaaaaaaaaaaaaaaaaaaaaaugcaucccccccccccccccccccccccccccccccaaaggcucuuuucagagccaccagaauu

SEQ ID NO: 15534 - RNA, 1979 nt, Artificial Sequence
  mRNA product Design c-4 comprising derived and/or modified sequence from HRSV(Memphis-37)__AIY60640.1__F_DSCav1_mut3 (opt5)
gggagaguccgcucagccagguugcagaagcggcuuagcguguguccuaaucuucucucugcguguagguaggccugugccgcaaacaagcuuaccauggagcugcccauccucaagaccaacgccauuacaacgauccuggcugccgugacccuuugcuucgcgagcucccagaauauuacagaagaguuuuaccaaucuaccuguagcgcugucuccaaaggcuaucugggggcccucagaacaggaugguacaccucuguuaucacaauugaacugagcaacaucaaggagaucaaaugcaauggcaccgacgccaaggugaaacuuauuaagcaggaacuggauaaguauaaaaacgcugugacggaccuccagcugcugaugcaguccaccccugccgcugggucuggaagcgccaucuguuccggcauugcggucugcaaggugcuccaccuggagggggagguuaauaaaaucaagaacgcccuucugagcacaaauaaagcuguggucucucucuccaacggagugagcguucugaccuucaaggugcuugaucugaagaauuacauugacaaacaacuccugccgauccugaacaagcagucuuguuccauucccaauaucgaaacagucaucgaguuucagcagaaaaacaaucggcuccuggaaauuacccgcgaguucagcgugaacgccggcgugacgacaccugucucuaccuauaugcuuacaaauuccgagcugcucagccugaucaacgauaugcccauuaccaacgaccaaaagaaacuuauguccaauaacguucagaucgugagacagcagucuuacagcauuaugugcaucaucaaggaagaggugcuggcuuaugucgugcaacucccucuguacggcguuauugauacccccuguuggaaacugcauacauccccucucugcacgaccaauacaaaggaagggagcaacaucugucugacccggacagaccgcggaugguacugcgauaaugccggcucuguguccuuuuucccgcaggcggagaccuguaagguccagagcaacagaguguuuugcgacacgaugaacucucuuacacugcccagcgaaguuaaucucugcaauauugauaucuucaacccuaaauaugacuguaagauuaugaccuccaaaaccgaugugucuagcuccgucaucacaagccugggggccaucgugucuugcuacggaaagaccaaauguacagcuuccaauaagaaccggggcauuaucaagacguuuagcaaugggugcgacuaugucucuaacaaaggaguggacaccguuuccgugggcaauacacuuuacugugucaacaagcaagagggccagagccuguaugugaaaggggagcccauuaucaacuucuacgauccucucguuuuucccuccgacgaguucgaugccucuauuagccaggugaaugaaaagaucaaccagucccuggcuuuuauucgcaaaucugacgaacugcuccacaaugucaacgugggaaagagcaccacaaauaucaugaucaccacgauuaucauugugaucauuguuauccugcuucugcucaucgccgucggccuguuccuguauugcaaggccagauccaccccggugacacuuagcaaagaucaacucucugggauuaacaauaucgcuuucuccaacugaggacuaguggaagcauuuuccuggcugauuaaaagaaauuacucagcuauggucaucuguuccuguuagaaggcuaugcagcauauuauauacuaugcgcauguuaugaaaugcauaauaaaaaauuuuaaaaaaucuaaaagaucuaaaaaaaaaaaaaaaaaaaaaaaaaaaaaaaaaaaaaaaaaaaaaaaaaaaaaaaaaaaaaaaaugcaucccccccccccccccccccccccccccccccaaaggcucuuuucagagccaccagaauu

SEQ ID NO: 15535 - RNA, 1979 nt, Artificial Sequence
  mRNA product Design c-4 comprising derived and/or modified sequence from HRSV(Memphis-37)__AIY60640.1__F_DSCav1_mut3 (opt6)
gggagaguccgcucagccagguugcagaagcggcuuagcguguguccuaaucuucucucugcguguagguaggccugugccgcaaacaagcuuaccauggaauuaccaauacuaaaaacaaaugccaucaccaccauccuggccgccguaacauuaugcuucgcaaguucacaaaauauaacagaagaauuuuaucaaucaacuugcagcgccguaucaaaaggcuacuuaggcgcacuacguacaggaugguacacaucaguaauaaccauagaacuauccaauauuaaagaaauaaaaugcaauggaacagacgcaaaaguuaaacuaauaaaacaagaauuagacaaauacaaaaacgcaguaaccgaccuucaauuacuaaugcaaucuacccccgcugcagguuccggaucagcaauauguucaggaauugcaguaugcaaaguccuacacuuagaaggagaaguaaacaaaauaaaaaacgcacuauuaagcaccaauaaagcagucguaucauuauccaacggcguuucaguacuaacauuuaaaguacuugaccuaaaaaacuauauagacaaacaacuacuucccauccuuaacaaacaaagcugcucaauaccuaauaucgaaacaguaauagaauuucaacaaaaaaacaaucgauuauuagaaaucacacgagaauuuucugucaacgcaggagucaccacacccguaucuacuuauauguuaaccaacucugaauuauuaucacuaaucaaugacaugccaauaacaaacgaucaaaaaaaauuaaugucaaauaacguacaaauaguaagacaacaaucauacucaauaaugugcauuauaaaagaagaaguacuagccuauguuguacaacucccacucuacggcguaauagacacaccaugcuggaaauuacacacuucaccacuaugcacaacaaacacaaaagaaggaucaaacaucugccuaaccagaaccgauagaggaugguauugcgacaaugccggaucaguuucauucuucccacaagcagaaacaugcaaaguacaauccaacagaguuuucugugacacaaugaacucgcuaacauuacccagcgaaguaaaccucugcaacauagacauauucaacccaaaauacgauugcaaaauaaugacuucuaaaacagauguuuccucaagcgucauaacgaguuuaggagcaauaguaagcuguuacggaaaaaccaaauguaccgcaucaaacaaaaaccgaggaauaauaaaaaccuuuucaaacggaugcgauuacgucuccaacaaaggagucgacacaguaucaguuggcaauacucuuuacugcguaaauaaacaagaaggacaaucacuauacguaaaaggcgaaccaauaauaaacuucuacgacccccucgucuucccuucagaugaauuugacgcaagcaucucacaaguuaaugaaaaaauaaaucaauccuuagcauucauacgaaaaucagacgaacuauuacacaacguaaacguaggaaaaucaacgacaaacauaaugauaacaacuaucauuauagucauaauagucauacuacuacuauuaauagccguaggcuuauuccuauacugcaaagcaagaucuacuccaguaacacucucaaaagaccaauuaucuggaauaaauaacauagcauucucuaauuaaggacuaguggaagcauuuuccuggcugauuaaaagaaauuacucagcuauggucaucuguuccuguuagaaggcuaugcagcauauuauauacuaugcgcauguuaugaaaugcauaauaaaaaauuuuaaaaaaucuaaaagaucuaaaaaaaaaaaaaaaaaaaaaaaaaaaaaaaaaaaaaaaaaaaaaaaaaaaaaaaaaaaaaaaaugcaucccccccccccccccccccccccccccccccaaaggcucuuuucagagccaccagaauu

SEQ ID NO: 15536 - RNA, 1979 nt, Artificial Sequence
  mRNA product Design c-4 comprising derived and/or modified sequence from HRSV(Memphis-37)__AIY60640.1__F_DSCav1_mut3 (opt11)
gggagaguccgcucagccagguugcagaagcggcuuagcguguguccuaaucuucucucugcguguagguaggccugugccgcaaacaagcuuaccauggaacuccccauccucaaaaccaacgccauuaccacgauccucgccgcagucacccucugcuucgccuccucacaaaacaucacagaagaauuuuaccaaaguaccugcuccgccgucagcaaaggauaccucggcgcccuccgcaccggcugguacacauccgucauaaccaucgaacucagcaacaucaaagaaaucaaauguaacggaaccgacgccaaaguaaaacuaauaaaacaagaacucgacaaauacaagaacgccgucaccgaccuccaacuccucaugcaaucuacccccgccgccggcucagguagcgccaucugcagcgguauugccgucugcaaaguacuccaccuagaaggagaagucaauaaaaucaaaaacgcccuacucuccaccaacaaggcagucgucagccucuccaacggcgucucagucuuaaccuucaaagugcucgaccucaaaaauuacauagacaaacaacuacuccccauucucaacaaacaauccugcuccauacccaacauagaaaccgucauugaauuucaacagaaaaacaaccgccuccucgaaaucacgcgcgaguucagugucaacgccggcgucaccaccccagucucgacauacaugcucacaaacucagaacuccucucguuaaucaacgacaugccaauaaccaacgaccaaaagaaacuaauguccaacaacguucaaauaguucgccaacaaucauacuccauaaugugcaucaucaaagaagaaguccucgccuacguuguacaauuaccccucuacggcgucaucgacacaccaugcuggaaacuccacacaucgccccucugcaccaccaacaccaaagaaggcagcaacauuugccucacccggacagaccgcggcugguacugcgacaaugcaggcagcgucucauucuucccacaagccgaaaccugcaaaguccaaagcaaccgugucuucugcgacacaaugaacucccuuacccucccaagcgaaguaaaccucugcaauauugacaucuucaaccccaaauacgacugcaaaaucaugaccuccaaaaccgacgucuccucaucagucaucaccucccuuggcgccauugucuccuguuacgguaaaaccaaaugcaccgccuccaacaaaaaccgcggcaucaucaaaaccuucucuaacggcugcgacuacgucucaaacaaaggcgucgacacugucuccgucggcaacacccuauacugcgucaacaagcaagaaggacagucccuauacguaaaaggugaaccaauuaucaacuucuacgacccccuagucuucccauccgacgaguucgaugccuccaucucccaaguaaaugaaaagaucaaucaaagccuggccuucauccgcaaauccgacgaacuacuccacaaugucaacgucggaaaaucaacaacaaacaucaugaucaccaccaucaucaucgucaucauaguaauccuccuacugcucaucgccgucggucucuuccuauacugcaaagcccguucuacuccagucacccucuccaaagaccaacuaucaggaaucaacaacaucgccuucagcaacuaaggacuaguggaagcauuuuccuggcugauuaaaagaaauuacucagcuauggucaucuguuccuguuagaaggcuaugcagcauauuauauacuaugcgcauguuaugaaaugcauaauaaaaaauuuuaaaaaaucuaaaagaucuaaaaaaaaaaaaaaaaaaaaaaaaaaaaaaaaaaaaaaaaaaaaaaaaaaaaaaaaaaaaaaaaugcaucccccccccccccccccccccccccccccccaaaggcucuuuucagagccaccagaauu

SEQ ID NO: 15537 - RNA, 1897 nt, Artificial Sequence
  mRNA product Design c-5 comprising derived and/or modified sequence from HRSV(Memphis-37)__AIY60640.1__F_DSCav1_mut3 (opt1)
gggagagcggcucggccauuuugucccagucaguccggaggcugcggcugcagaaguaccgccugcggaguaacugcaaagaagcuuaccauggagcugcccauccucaagaccaacgccaucaccacgauccuggccgcggugacccugugcuucgccagcucccagaacaucaccgaggaguucuaccagagcacgugcuccgccgucagcaagggcuaccucggcgcccugcgcaccgggugguacaccagcgugaucaccaucgagcuguccaacaucaaggagaucaagugcaacggcaccgacgccaaggugaagcucaucaagcaggagcuggacaaguacaagaacgcggucacggaccugcagcuccugaugcagagcaccccggccgccggcuccgggagcgcgaucugcuccggcaucgccgucugcaaggugcugcaccucgagggcgaggugaacaagaucaagaacgcccugcuguccaccaacaaggccgucgugagccucuccaacggggugagcguccugaccuucaaggugcuggaccucaagaacuacaucgacaagcagcugcugcccauccugaacaagcagagcugcuccauccccaacaucgagaccgucaucgaguuccagcagaagaacaaccgccuccuggagaucacgcgggaguucagcgugaacgcgggcgugaccacccccgucuccaccuacaugcugacgaacagcgagcuccugucccugaucaacgacaugccgaucaccaacgaccagaagaagcucaugagcaacaacgugcagaucgugcgccagcaguccuacagcaucaugugcaucaucaaggaggagguccuggccuacguggugcagcugccccucuacggggucaucgacacccccugcuggaagcugcacaccagcccccugugcacgaccaacaccaaggagggcuccaacaucugccucacccggacggaccgcgggugguacugcgacaacgccggcagcguguccuucuucccgcaggccgagaccugcaagguccagagcaaccggguguucugcgacaccaugaacucccugacccugcccagcgaggugaaccucugcaacaucgacaucuucaaccccaaguacgacugcaagaucaugacguccaagaccgacgucagcuccagcgugaucaccucccugggcgccaucgugagcugcuacgggaagaccaagugcacggcgagcaacaagaaccgcggcaucaucaagaccuucuccaacgggugcgacuacgucagcaacaagggcguggacaccguguccgucggcaacacccuguacugcgugaacaagcaggagggccagagccucuacgugaagggggagcccaucaucaacuucuacgacccgcuggucuuccccuccgacgaguucgacgccagcaucucccaggugaacgagaagaucaaccagagccuggccuucauccggaaguccgacgagcuccugcacaacgugaacgucggcaagagcaccacgaacaucaugaucaccaccaucaucaucgugaucaucgugauccugcugcuccugaucgccgucgggcuguuccucuacugcaaggcccgcuccacccccgugacgcugagcaaggaccagcuguccgggaucaacaacaucgcguucagcaacugaggacuagucccuguucccagagcccacuuuuuuuucuuuuuuugaaauaaaauagccugucuuucagaucuaaaaaaaaaaaaaaaaaaaaaaaaaaaaaaaaaaaaaaaaaaaaaaaaaaaaaaaaaaaaaaaaugcaucccccccccccccccccccccccccccccccaaaggcucuuuucagagccaccagaauu

SEQ ID NO: 15538 - RNA, 1897 nt, Artificial Sequence
  mRNA product Design c-5 comprising derived and/or modified sequence from HRSV(Memphis-37)__AIY60640.1__F_DSCav1_mut3 (opt1)
gggagagcggcucggccauuuugucccagucaguccggaggcugcggcugcagaaguaccgccugcggaguaacugcaaagaagcuuaccauggagcugcccauccucaagaccaacgccaucaccacgauccuggccgcggugacccugugcuucgccagcucccagaacaucaccgaggaguucuaccagagcacgugcuccgccgucagcaagggcuaccucggggcccugcgcaccggcugguacaccuccgugaucaccaucgagcugagcaacaucaaggagaucaagugcaacgggaccgacgccaaggugaagcucaucaagcaggagcuggacaaguacaagaacgcggucacggaccugcagcuccugaugcaguccaccccggccgccggcagcggguccgccaucugcagcggcaucgcggugugcaaggugcugcaccucgagggcgaggucaacaagaucaagaacgcccugcuguccaccaacaaggccguggugagccucuccaacggggucagcgugcugaccuucaaggugcuggaccucaagaacuacaucgacaagcagcugcugcccauccucaacaagcaguccugcagcauccccaacaucgagacggucaucgaguuccagcagaagaacaaccggcugcuggagaucacccgcgaguucuccgugaacgccggcgugaccacccccgucagcacguacaugcucaccaacuccgagcugcugagccucaucaacgacaugccgaucaccaacgaccagaagaagcugaugagcaacaacgugcagaucgugcggcagcaguccuacagcaucaugugcaucaucaaggaggagguccuggccuacguggugcagcucccccuguacggggucaucgacacccccugcuggaagcugcacacgagcccccucugcaccaccaacaccaaggagggcuccaacaucugccugacgcgcaccgaccgggggugguacugcgacaacgcgggcuccgugagcuucuucccgcaggccgagaccugcaaggugcaguccaaccgcgucuucugcgacaccaugaacagccugacgcuccccuccgaggugaaccugugcaacaucgacaucuucaaccccaaguacgacugcaagaucaugaccagcaagaccgacgucuccagcuccgugaucaccagccugggcgccaucguguccugcuacgggaagacgaagugcaccgccagcaacaagaaccggggcaucaucaagaccuucuccaacgggugcgacuacgucagcaacaagggcguggacaccguguccgucggcaacacgcucuacugcgugaacaagcaggaggggcagagccuguacgugaagggcgagcccaucaucaacuucuacgacccgcuggucuuccccagcgacgaguucgacgccuccaucagccaggugaacgagaagaucaaccagucccucgcguucauccgcaagagcgacgagcugcugcacaacgugaacgucgggaaguccaccaccaacaucaugaucaccaccaucaucaucgugaucaucgugauccuccugcugcucaucgccgucggccuguuccuguacugcaaggcccggagcacgcccgugacccuguccaaggaccagcucagcgggaucaacaacaucgccuucuccaacugaggacuagucccuguucccagagcccacuuuuuuuucuuuuuuugaaauaaaauagccugucuuucagaucuaaaaaaaaaaaaaaaaaaaaaaaaaaaaaaaaaaaaaaaaaaaaaaaaaaaaaaaaaaaaaaaaugcaucccccccccccccccccccccccccccccccaaaggcucuuuucagagccaccagaauu

SEQ ID NO: 15539 - RNA, 1897 nt, Artificial Sequence
  mRNA product Design c-5 comprising derived and/or modified sequence from HRSV(Memphis-37)__AIY60640.1__F_DSCav1_mut3 (opt2)
gggagagcggcucggccauuuugucccagucaguccggaggcugcggcugcagaaguaccgccugcggaguaacugcaaagaagcuuaccauggagcuccccauccucaagaccaacgccaucaccaccauccucgccgccgucacccucugcuucgccuccucccagaacaucaccgaggaguucuaccaguccaccugcuccgccgucuccaagggcuaccucggcgcccuccgcaccggcugguacaccuccgucaucaccaucgagcucuccaacaucaaggagaucaagugcaacggcaccgacgccaaggucaagcucaucaagcaggagcucgacaaguacaagaacgccgucaccgaccuccagcuccucaugcaguccacccccgccgccggcuccggcuccgccaucugcuccggcaucgccgucugcaagguccuccaccucgagggcgaggucaacaagaucaagaacgcccuccucuccaccaacaaggccgucgucucccucuccaacggcgucuccguccucaccuucaagguccucgaccucaagaacuacaucgacaagcagcuccuccccauccucaacaagcaguccugcuccauccccaacaucgagaccgucaucgaguuccagcagaagaacaaccgccuccucgagaucacccgcgaguucuccgucaacgccggcgucaccacccccgucuccaccuacaugcucaccaacuccgagcuccucucccucaucaacgacaugcccaucaccaacgaccagaagaagcucauguccaacaacguccagaucguccgccagcaguccuacuccaucaugugcaucaucaaggaggagguccucgccuacgucguccagcucccccucuacggcgucaucgacacccccugcuggaagcuccacaccuccccccucugcaccaccaacaccaaggagggcuccaacaucugccucacccgcaccgaccgcggcugguacugcgacaacgccggcuccgucuccuucuucccccaggccgagaccugcaagguccaguccaaccgcgucuucugcgacaccaugaacucccucacccuccccuccgaggucaaccucugcaacaucgacaucuucaaccccaaguacgacugcaagaucaugaccuccaagaccgacgucuccuccuccgucaucaccucccucggcgccaucgucuccugcuacggcaagaccaagugcaccgccuccaacaagaaccgcggcaucaucaagaccuucuccaacggcugcgacuacgucuccaacaagggcgucgacaccgucuccgucggcaacacccucuacugcgucaacaagcaggagggccagucccucuacgucaagggcgagcccaucaucaacuucuacgacccccucgucuuccccuccgacgaguucgacgccuccaucucccaggucaacgagaagaucaaccagucccucgccuucauccgcaaguccgacgagcuccuccacaacgucaacgucggcaaguccaccaccaacaucaugaucaccaccaucaucaucgucaucaucgucauccuccuccuccucaucgccgucggccucuuccucuacugcaaggcccgcuccacccccgucacccucuccaaggaccagcucuccggcaucaacaacaucgccuucuccaacugaggacuagucccuguucccagagcccacuuuuuuuucuuuuuuugaaauaaaauagccugucuuucagaucuaaaaaaaaaaaaaaaaaaaaaaaaaaaaaaaaaaaaaaaaaaaaaaaaaaaaaaaaaaaaaaaaugcaucccccccccccccccccccccccccccccccaaaggcucuuuucagagccaccagaauu

SEQ ID NO: 15540 - RNA, 1897 nt, Artificial Sequence
  mRNA product Design c-5 comprising derived and/or modified sequence from HRSV(Memphis-37)__AIY60640.1__F_DSCav1_mut3 (opt3)
gggagagcggcucggccauuuugucccagucaguccggaggcugcggcugcagaaguaccgccugcggaguaacugcaaagaagcuuaccauggagcugcccauccucaagaccaacgccauuacaacuauacuugcugcagugacgcugugcuucgccagcucccagaauaucaccgaagaguuuuaccaaucuacauguucagcggucaguaaaggcuauuugggggcuuuaagaacuggaugguacaccagcguuauuacaaucgaacuguccaacauuaaggagaucaaaugcaaugguaccgacgccaaggugaaacuaauaaagcaggaacucgauaaguauaaaaacgcaguaacugaccugcagcuucugaugcagucuacuccugccgcuggcucggggucagcaaucuguagcggaauugccgugugcaaggucuugcaccucgagggcgaggugaauaaaaucaagaacgcucugcugaguaccaauaaagccguugugucccucucuaacggugucagcguguuaacguucaagguacuggaucuuaagaauuacauugacaaacaauugcugccaauccuaaacaagcaguccuguucaauaccgaauauugaaacuguuaucgaguuucagcagaaaaacaauaggcuccuggaaauuacccgggaguucagugugaacgcgggggucacaacucccgugagcaccuauaugcuuacaaauucugagcuguugucccucaucaacgauaugccuaucaccaacgaccaaaagaaacugaugucaaauaacgugcagauuguccgccagcagagcuacaguauaaugugcaucauuaaggaagagguuuuagcauaugugguacaacugccacucuacggagugaucgauacgcccuguuggaaacuucauacuucuccucugugcacaaccaauacuaaggaaggcuccaacauauguuugacacgaaccgaccguggcugguacugcgauaaugccgggagcgucucguuuuucccacaggcugagacguguaaggugcagucuaacagaguuuucugcgacaccaugaacucccuaacacugcccucagaagugaaucucugcaauauugauaucuucaacccuaaauaugacuguaagaucaugacaaguaaaaccgaugucagcuccucugugauuacaagccugggagccaucguaucaugcuacgguaagacuaaauguaccgcaaguaauaagaacaggggcauuauaaagacauuuuccaaugggugcgacuauguuagcaacaaaggaguggacaccgucucugugggcaauacucuuuacugugucaacaagcaagagggucagucacuguaugugaaaggggagccaaucauuaacuucuacgauccguugguuuuucccagugacgaauuugaugcuagcaucucccaggugaaugagaagaucaaccagucucucgccuuuauucggaaaucggacgaacuguuacacaauguaaacgucggaaagagcacgacaaauauaaugaucaccacuauuaucauugugaucauaguuauccugcuacuccugauugcggugggccuuuucuuguauugcaaggcccgcuccaccccugucacacugucaaaagaucaacucaguggcaucaacaauauugcauucucuaacugaggacuagucccuguucccagagcccacuuuuuuuucuuuuuuugaaauaaaauagccugucuuucagaucuaaaaaaaaaaaaaaaaaaaaaaaaaaaaaaaaaaaaaaaaaaaaaaaaaaaaaaaaaaaaaaaaugcaucccccccccccccccccccccccccccccccaaaggcucuuuucagagccaccagaauu

SEQ ID NO: 15541 - RNA, 1897 nt, Artificial Sequence
  mRNA product Design c-5 comprising derived and/or modified sequence from HRSV(Memphis-37)__AIY60640.1__F_DSCav1_mut3 (opt4)
gggagagcggcucggccauuuugucccagucaguccggaggcugcggcugcagaaguaccgccugcggaguaacugcaaagaagcuuaccauggagcugcccauccugaagaccaacgccaucaccaccauccuggccgccgugacccugugcuucgccagcagccagaacaucaccgaggaguucuaccagagcaccugcagcgccgugagcaagggcuaccugggcgcccugagaaccggcugguacaccagcgugaucaccaucgagcugagcaacaucaaggagaucaagugcaacggcaccgacgccaaggugaagcugaucaagcaggagcuggacaaguacaagaacgccgugaccgaccugcagcugcugaugcagagcacccccgccgccggcagcggcagcgccaucugcagcggcaucgccgugugcaaggugcugcaccuggagggcgaggugaacaagaucaagaacgcccugcugagcaccaacaaggccguggugagccugagcaacggcgugagcgugcugaccuucaaggugcuggaccugaagaacuacaucgacaagcagcugcugcccauccugaacaagcagagcugcagcauccccaacaucgagaccgugaucgaguuccagcagaagaacaacagacugcuggagaucaccagagaguucagcgugaacgccggcgugaccacccccgugagcaccuacaugcugaccaacagcgagcugcugagccugaucaacgacaugcccaucaccaacgaccagaagaagcugaugagcaacaacgugcagaucgugagacagcagagcuacagcaucaugugcaucaucaaggaggaggugcuggccuacguggugcagcugccccuguacggcgugaucgacacccccugcuggaagcugcacaccagcccccugugcaccaccaacaccaaggagggcagcaacaucugccugaccagaaccgacagaggcugguacugcgacaacgccggcagcgugagcuucuucccccaggccgagaccugcaaggugcagagcaacagaguguucugcgacaccaugaacagccugacccugcccagcgaggugaaccugugcaacaucgacaucuucaaccccaaguacgacugcaagaucaugaccagcaagaccgacgugagcagcagcgugaucaccagccugggcgccaucgugagcugcuacggcaagaccaagugcaccgccagcaacaagaacagaggcaucaucaagaccuucagcaacggcugcgacuacgugagcaacaagggcguggacaccgugagcgugggcaacacccuguacugcgugaacaagcaggagggccagagccuguacgugaagggcgagcccaucaucaacuucuacgacccccugguguuccccagcgacgaguucgacgccagcaucagccaggugaacgagaagaucaaccagagccuggccuucaucagaaagagcgacgagcugcugcacaacgugaacgugggcaagagcaccaccaacaucaugaucaccaccaucaucaucgugaucaucgugauccugcugcugcugaucgccgugggccuguuccuguacugcaaggccagaagcacccccgugacccugagcaaggaccagcugagcggcaucaacaacaucgccuucagcaacugaggacuagucccuguucccagagcccacuuuuuuuucuuuuuuugaaauaaaauagccugucuuucagaucuaaaaaaaaaaaaaaaaaaaaaaaaaaaaaaaaaaaaaaaaaaaaaaaaaaaaaaaaaaaaaaaaugcaucccccccccccccccccccccccccccccccaaaggcucuuuucagagccaccagaauu

SEQ ID NO: 15542 - RNA, 1897 nt, Artificial Sequence
  mRNA product Design c-5 comprising derived and/or modified sequence from HRSV(Memphis-37)__AIY60640.1__F_DSCav1_mut3 (opt5)
gggagagcggcucggccauuuugucccagucaguccggaggcugcggcugcagaaguaccgccugcggaguaacugcaaagaagcuuaccauggagcugcccauccucaagaccaacgccauuacaacgauccuggcugccgugacccuuugcuucgcgagcucccagaauauuacagaagaguuuuaccaaucuaccuguagcgcugucuccaaaggcuaucugggggcccucagaacaggaugguacaccucuguuaucacaauugaacugagcaacaucaaggagaucaaaugcaauggcaccgacgccaaggugaaacuuauuaagcaggaacuggauaaguauaaaaacgcugugacggaccuccagcugcugaugcaguccaccccugccgcugggucuggaagcgccaucuguuccggcauugcggucugcaaggugcuccaccuggagggggagguuaauaaaaucaagaacgcccuucugagcacaaauaaagcuguggucucucucuccaacggagugagcguucugaccuucaaggugcuugaucugaagaauuacauugacaaacaacuccugccgauccugaacaagcagucuuguuccauucccaauaucgaaacagucaucgaguuucagcagaaaaacaaucggcuccuggaaauuacccgcgaguucagcgugaacgccggcgugacgacaccugucucuaccuauaugcuuacaaauuccgagcugcucagccugaucaacgauaugcccauuaccaacgaccaaaagaaacuuauguccaauaacguucagaucgugagacagcagucuuacagcauuaugugcaucaucaaggaagaggugcuggcuuaugucgugcaacucccucuguacggcguuauugauacccccuguuggaaacugcauacauccccucucugcacgaccaauacaaaggaagggagcaacaucugucugacccggacagaccgcggaugguacugcgauaaugccggcucuguguccuuuuucccgcaggcggagaccuguaagguccagagcaacagaguguuuugcgacacgaugaacucucuuacacugcccagcgaaguuaaucucugcaauauugauaucuucaacccuaaauaugacuguaagauuaugaccuccaaaaccgaugugucuagcuccgucaucacaagccugggggccaucgugucuugcuacggaaagaccaaauguacagcuuccaauaagaaccggggcauuaucaagacguuuagcaaugggugcgacuaugucucuaacaaaggaguggacaccguuuccgugggcaauacacuuuacugugucaacaagcaagagggccagagccuguaugugaaaggggagcccauuaucaacuucuacgauccucucguuuuucccuccgacgaguucgaugccucuauuagccaggugaaugaaaagaucaaccagucccuggcuuuuauucgcaaaucugacgaacugcuccacaaugucaacgugggaaagagcaccacaaauaucaugaucaccacgauuaucauugugaucauuguuauccugcuucugcucaucgccgucggccuguuccuguauugcaaggccagauccaccccggugacacuuagcaaagaucaacucucugggauuaacaauaucgcuuucuccaacugaggacuagucccuguucccagagcccacuuuuuuuucuuuuuuugaaauaaaauagccugucuuucagaucuaaaaaaaaaaaaaaaaaaaaaaaaaaaaaaaaaaaaaaaaaaaaaaaaaaaaaaaaaaaaaaaaugcaucccccccccccccccccccccccccccccccaaaggcucuuuucagagccaccagaauu

SEQ ID NO: 15543 - RNA, 1897 nt, Artificial Sequence
  mRNA product Design c-5 comprising derived and/or modified sequence from HRSV(Memphis-37)__AIY60640.1__F_DSCav1_mut3 (opt6)
gggagagcggcucggccauuuugucccagucaguccggaggcugcggcugcagaaguaccgccugcggaguaacugcaaagaagcuuaccauggaauuaccaauacuaaaaacaaaugccaucaccaccauccuggccgccguaacauuaugcuucgcaaguucacaaaauauaacagaagaauuuuaucaaucaacuugcagcgccguaucaaaaggcuacuuaggcgcacuacguacaggaugguacacaucaguaauaaccauagaacuauccaauauuaaagaaauaaaaugcaauggaacagacgcaaaaguuaaacuaauaaaacaagaauuagacaaauacaaaaacgcaguaaccgaccuucaauuacuaaugcaaucuacccccgcugcagguuccggaucagcaauauguucaggaauugcaguaugcaaaguccuacacuuagaaggagaaguaaacaaaauaaaaaacgcacuauuaagcaccaauaaagcagucguaucauuauccaacggcguuucaguacuaacauuuaaaguacuugaccuaaaaaacuauauagacaaacaacuacuucccauccuuaacaaacaaagcugcucaauaccuaauaucgaaacaguaauagaauuucaacaaaaaaacaaucgauuauuagaaaucacacgagaauuuucugucaacgcaggagucaccacacccguaucuacuuauauguuaaccaacucugaauuauuaucacuaaucaaugacaugccaauaacaaacgaucaaaaaaaauuaaugucaaauaacguacaaauaguaagacaacaaucauacucaauaaugugcauuauaaaagaagaaguacuagccuauguuguacaacucccacucuacggcguaauagacacaccaugcuggaaauuacacacuucaccacuaugcacaacaaacacaaaagaaggaucaaacaucugccuaaccagaaccgauagaggaugguauugcgacaaugccggaucaguuucauucuucccacaagcagaaacaugcaaaguacaauccaacagaguuuucugugacacaaugaacucgcuaacauuacccagcgaaguaaaccucugcaacauagacauauucaacccaaaauacgauugcaaaauaaugacuucuaaaacagauguuuccucaagcgucauaacgaguuuaggagcaauaguaagcuguuacggaaaaaccaaauguaccgcaucaaacaaaaaccgaggaauaauaaaaaccuuuucaaacggaugcgauuacgucuccaacaaaggagucgacacaguaucaguuggcaauacucuuuacugcguaaauaaacaagaaggacaaucacuauacguaaaaggcgaaccaauaauaaacuucuacgacccccucgucuucccuucagaugaauuugacgcaagcaucucacaaguuaaugaaaaaauaaaucaauccuuagcauucauacgaaaaucagacgaacuauuacacaacguaaacguaggaaaaucaacgacaaacauaaugauaacaacuaucauuauagucauaauagucauacuacuacuauuaauagccguaggcuuauuccuauacugcaaagcaagaucuacuccaguaacacucucaaaagaccaauuaucuggaauaaauaacauagcauucucuaauuaaggacuagucccuguucccagagcccacuuuuuuuucuuuuuuugaaauaaaauagccugucuuucagaucuaaaaaaaaaaaaaaaaaaaaaaaaaaaaaaaaaaaaaaaaaaaaaaaaaaaaaaaaaaaaaaaaugcaucccccccccccccccccccccccccccccccaaaggcucuuuucagagccaccagaauu

SEQ ID NO: 15544 - RNA, 1897 nt, Artificial Sequence
  mRNA product Design c-5 comprising derived and/or modified sequence from HRSV(Memphis-37)__AIY60640.1__F_DSCav1_mut3 (opt11)
gggagagcggcucggccauuuugucccagucaguccggaggcugcggcugcagaaguaccgccugcggaguaacugcaaagaagcuuaccauggaacuccccauccucaaaaccaacgccauuaccacgauccucgccgcagucacccucugcuucgccuccucacaaaacaucacagaagaauuuuaccaaaguaccugcuccgccgucagcaaaggauaccucggcgcccuccgcaccggcugguacacauccgucauaaccaucgaacucagcaacaucaaagaaaucaaauguaacggaaccgacgccaaaguaaaacuaauaaaacaagaacucgacaaauacaagaacgccgucaccgaccuccaacuccucaugcaaucuacccccgccgccggcucagguagcgccaucugcagcgguauugccgucugcaaaguacuccaccuagaaggagaagucaauaaaaucaaaaacgcccuacucuccaccaacaaggcagucgucagccucuccaacggcgucucagucuuaaccuucaaagugcucgaccucaaaaauuacauagacaaacaacuacuccccauucucaacaaacaauccugcuccauacccaacauagaaaccgucauugaauuucaacagaaaaacaaccgccuccucgaaaucacgcgcgaguucagugucaacgccggcgucaccaccccagucucgacauacaugcucacaaacucagaacuccucucguuaaucaacgacaugccaauaaccaacgaccaaaagaaacuaauguccaacaacguucaaauaguucgccaacaaucauacuccauaaugugcaucaucaaagaagaaguccucgccuacguuguacaauuaccccucuacggcgucaucgacacaccaugcuggaaacuccacacaucgccccucugcaccaccaacaccaaagaaggcagcaacauuugccucacccggacagaccgcggcugguacugcgacaaugcaggcagcgucucauucuucccacaagccgaaaccugcaaaguccaaagcaaccgugucuucugcgacacaaugaacucccuuacccucccaagcgaaguaaaccucugcaauauugacaucuucaaccccaaauacgacugcaaaaucaugaccuccaaaaccgacgucuccucaucagucaucaccucccuuggcgccauugucuccuguuacgguaaaaccaaaugcaccgccuccaacaaaaaccgcggcaucaucaaaaccuucucuaacggcugcgacuacgucucaaacaaaggcgucgacacugucuccgucggcaacacccuauacugcgucaacaagcaagaaggacagucccuauacguaaaaggugaaccaauuaucaacuucuacgacccccuagucuucccauccgacgaguucgaugccuccaucucccaaguaaaugaaaagaucaaucaaagccuggccuucauccgcaaauccgacgaacuacuccacaaugucaacgucggaaaaucaacaacaaacaucaugaucaccaccaucaucaucgucaucauaguaauccuccuacugcucaucgccgucggucucuuccuauacugcaaagcccguucuacuccagucacccucuccaaagaccaacuaucaggaaucaacaacaucgccuucagcaacuaaggacuagucccuguucccagagcccacuuuuuuuucuuuuuuugaaauaaaauagccugucuuucagaucuaaaaaaaaaaaaaaaaaaaaaaaaaaaaaaaaaaaaaaaaaaaaaaaaaaaaaaaaaaaaaaaaugcaucccccccccccccccccccccccccccccccaaaggcucuuuucagagccaccagaauu

SEQ ID NO: 15545 - RNA, 1906 nt, Artificial Sequence
  mRNA product Design d-1 comprising derived and/or modified sequence from HRSV(Memphis-37)__AIY60640.1__F_DSCav1_mut3 (opt1)
gggagacccgugacccggaaguuguacggcuacgcgacuuucccucccacaaacccucgcgcccuuccuuuccuacuugggcccggcagaaagcuuaccauggagcugcccauccucaagaccaacgccaucaccacgauccuggccgcggugacccugugcuucgccagcucccagaacaucaccgaggaguucuaccagagcacgugcuccgccgucagcaagggcuaccucggcgcccugcgcaccgggugguacaccagcgugaucaccaucgagcuguccaacaucaaggagaucaagugcaacggcaccgacgccaaggugaagcucaucaagcaggagcuggacaaguacaagaacgcggucacggaccugcagcuccugaugcagagcaccccggccgccggcuccgggagcgcgaucugcuccggcaucgccgucugcaaggugcugcaccucgagggcgaggugaacaagaucaagaacgcccugcuguccaccaacaaggccgucgugagccucuccaacggggugagcguccugaccuucaaggugcuggaccucaagaacuacaucgacaagcagcugcugcccauccugaacaagcagagcugcuccauccccaacaucgagaccgucaucgaguuccagcagaagaacaaccgccuccuggagaucacgcgggaguucagcgugaacgcgggcgugaccacccccgucuccaccuacaugcugacgaacagcgagcuccugucccugaucaacgacaugccgaucaccaacgaccagaagaagcucaugagcaacaacgugcagaucgugcgccagcaguccuacagcaucaugugcaucaucaaggaggagguccuggccuacguggugcagcugccccucuacggggucaucgacacccccugcuggaagcugcacaccagcccccugugcacgaccaacaccaaggagggcuccaacaucugccucacccggacggaccgcgggugguacugcgacaacgccggcagcguguccuucuucccgcaggccgagaccugcaagguccagagcaaccggguguucugcgacaccaugaacucccugacccugcccagcgaggugaaccucugcaacaucgacaucuucaaccccaaguacgacugcaagaucaugacguccaagaccgacgucagcuccagcgugaucaccucccugggcgccaucgugagcugcuacgggaagaccaagugcacggcgagcaacaagaaccgcggcaucaucaagaccuucuccaacgggugcgacuacgucagcaacaagggcguggacaccguguccgucggcaacacccuguacugcgugaacaagcaggagggccagagccucuacgugaagggggagcccaucaucaacuucuacgacccgcuggucuuccccuccgacgaguucgacgccagcaucucccaggugaacgagaagaucaaccagagccuggccuucauccggaaguccgacgagcuccugcacaacgugaacgucggcaagagcaccacgaacaucaugaucaccaccaucaucaucgugaucaucgugauccugcugcuccugaucgccgucgggcuguuccucuacugcaaggcccgcuccacccccgugacgcugagcaaggaccagcuguccgggaucaacaacaucgcguucagcaacugaggacuagucccuguucccagagcccacuuuuuuuucuuuuuuugaaauaaaauagccugucuuucagaucuaaaaaaaaaaaaaaaaaaaaaaaaaaaaaaaaaaaaaaaaaaaaaaaaaaaaaaaaaaaaaaaaugcaucccccccccccccccccccccccccccccccaaaggcucuuuucagagccaccagaauu

SEQ ID NO: 15546 - RNA, 1906 nt, Artificial Sequence
  mRNA product Design d-1 comprising derived and/or modified sequence from HRSV(Memphis-37)__AIY60640.1__F_DSCav1_mut3 (opt1)
gggagacccgugacccggaaguuguacggcuacgcgacuuucccucccacaaacccucgcgcccuuccuuuccuacuugggcccggcagaaagcuuaccauggagcugcccauccucaagaccaacgccaucaccacgauccuggccgcggugacccugugcuucgccagcucccagaacaucaccgaggaguucuaccagagcacgugcuccgccgucagcaagggcuaccucggggcccugcgcaccggcugguacaccuccgugaucaccaucgagcugagcaacaucaaggagaucaagugcaacgggaccgacgccaaggugaagcucaucaagcaggagcuggacaaguacaagaacgcggucacggaccugcagcuccugaugcaguccaccccggccgccggcagcggguccgccaucugcagcggcaucgcggugugcaaggugcugcaccucgagggcgaggucaacaagaucaagaacgcccugcuguccaccaacaaggccguggugagccucuccaacggggucagcgugcugaccuucaaggugcuggaccucaagaacuacaucgacaagcagcugcugcccauccucaacaagcaguccugcagcauccccaacaucgagacggucaucgaguuccagcagaagaacaaccggcugcuggagaucacccgcgaguucuccgugaacgccggcgugaccacccccgucagcacguacaugcucaccaacuccgagcugcugagccucaucaacgacaugccgaucaccaacgaccagaagaagcugaugagcaacaacgugcagaucgugcggcagcaguccuacagcaucaugugcaucaucaaggaggagguccuggccuacguggugcagcucccccuguacggggucaucgacacccccugcuggaagcugcacacgagcccccucugcaccaccaacaccaaggagggcuccaacaucugccugacgcgcaccgaccgggggugguacugcgacaacgcgggcuccgugagcuucuucccgcaggccgagaccugcaaggugcaguccaaccgcgucuucugcgacaccaugaacagccugacgcuccccuccgaggugaaccugugcaacaucgacaucuucaaccccaaguacgacugcaagaucaugaccagcaagaccgacgucuccagcuccgugaucaccagccugggcgccaucguguccugcuacgggaagacgaagugcaccgccagcaacaagaaccggggcaucaucaagaccuucuccaacgggugcgacuacgucagcaacaagggcguggacaccguguccgucggcaacacgcucuacugcgugaacaagcaggaggggcagagccuguacgugaagggcgagcccaucaucaacuucuacgacccgcuggucuuccccagcgacgaguucgacgccuccaucagccaggugaacgagaagaucaaccagucccucgcguucauccgcaagagcgacgagcugcugcacaacgugaacgucgggaaguccaccaccaacaucaugaucaccaccaucaucaucgugaucaucgugauccuccugcugcucaucgccgucggccuguuccuguacugcaaggcccggagcacgcccgugacccuguccaaggaccagcucagcgggaucaacaacaucgccuucuccaacugaggacuagucccuguucccagagcccacuuuuuuuucuuuuuuugaaauaaaauagccugucuuucagaucuaaaaaaaaaaaaaaaaaaaaaaaaaaaaaaaaaaaaaaaaaaaaaaaaaaaaaaaaaaaaaaaaugcaucccccccccccccccccccccccccccccccaaaggcucuuuucagagccaccagaauu

SEQ ID NO: 15547 - RNA, 1906 nt, Artificial Sequence
  mRNA product Design d-1 comprising derived and/or modified sequence from HRSV(Memphis-37)__AIY60640.1__F_DSCav1_mut3 (opt2)
gggagacccgugacccggaaguuguacggcuacgcgacuuucccucccacaaacccucgcgcccuuccuuuccuacuugggcccggcagaaagcuuaccauggagcuccccauccucaagaccaacgccaucaccaccauccucgccgccgucacccucugcuucgccuccucccagaacaucaccgaggaguucuaccaguccaccugcuccgccgucuccaagggcuaccucggcgcccuccgcaccggcugguacaccuccgucaucaccaucgagcucuccaacaucaaggagaucaagugcaacggcaccgacgccaaggucaagcucaucaagcaggagcucgacaaguacaagaacgccgucaccgaccuccagcuccucaugcaguccacccccgccgccggcuccggcuccgccaucugcuccggcaucgccgucugcaagguccuccaccucgagggcgaggucaacaagaucaagaacgcccuccucuccaccaacaaggccgucgucucccucuccaacggcgucuccguccucaccuucaagguccucgaccucaagaacuacaucgacaagcagcuccuccccauccucaacaagcaguccugcuccauccccaacaucgagaccgucaucgaguuccagcagaagaacaaccgccuccucgagaucacccgcgaguucuccgucaacgccggcgucaccacccccgucuccaccuacaugcucaccaacuccgagcuccucucccucaucaacgacaugcccaucaccaacgaccagaagaagcucauguccaacaacguccagaucguccgccagcaguccuacuccaucaugugcaucaucaaggaggagguccucgccuacgucguccagcucccccucuacggcgucaucgacacccccugcuggaagcuccacaccuccccccucugcaccaccaacaccaaggagggcuccaacaucugccucacccgcaccgaccgcggcugguacugcgacaacgccggcuccgucuccuucuucccccaggccgagaccugcaagguccaguccaaccgcgucuucugcgacaccaugaacucccucacccuccccuccgaggucaaccucugcaacaucgacaucuucaaccccaaguacgacugcaagaucaugaccuccaagaccgacgucuccuccuccgucaucaccucccucggcgccaucgucuccugcuacggcaagaccaagugcaccgccuccaacaagaaccgcggcaucaucaagaccuucuccaacggcugcgacuacgucuccaacaagggcgucgacaccgucuccgucggcaacacccucuacugcgucaacaagcaggagggccagucccucuacgucaagggcgagcccaucaucaacuucuacgacccccucgucuuccccuccgacgaguucgacgccuccaucucccaggucaacgagaagaucaaccagucccucgccuucauccgcaaguccgacgagcuccuccacaacgucaacgucggcaaguccaccaccaacaucaugaucaccaccaucaucaucgucaucaucgucauccuccuccuccucaucgccgucggccucuuccucuacugcaaggcccgcuccacccccgucacccucuccaaggaccagcucuccggcaucaacaacaucgccuucuccaacugaggacuagucccuguucccagagcccacuuuuuuuucuuuuuuugaaauaaaauagccugucuuucagaucuaaaaaaaaaaaaaaaaaaaaaaaaaaaaaaaaaaaaaaaaaaaaaaaaaaaaaaaaaaaaaaaaugcaucccccccccccccccccccccccccccccccaaaggcucuuuucagagccaccagaauu

SEQ ID NO: 15548 - RNA, 1906 nt, Artificial Sequence
  mRNA product Design d-1 comprising derived and/or modified sequence from HRSV(Memphis-37)__AIY60640.1__F_DSCav1_mut3 (opt3)
gggagacccgugacccggaaguuguacggcuacgcgacuuucccucccacaaacccucgcgcccuuccuuuccuacuugggcccggcagaaagcuuaccauggagcugcccauccucaagaccaacgccauuacaacuauacuugcugcagugacgcugugcuucgccagcucccagaauaucaccgaagaguuuuaccaaucuacauguucagcggucaguaaaggcuauuugggggcuuuaagaacuggaugguacaccagcguuauuacaaucgaacuguccaacauuaaggagaucaaaugcaaugguaccgacgccaaggugaaacuaauaaagcaggaacucgauaaguauaaaaacgcaguaacugaccugcagcuucugaugcagucuacuccugccgcuggcucggggucagcaaucuguagcggaauugccgugugcaaggucuugcaccucgagggcgaggugaauaaaaucaagaacgcucugcugaguaccaauaaagccguugugucccucucuaacggugucagcguguuaacguucaagguacuggaucuuaagaauuacauugacaaacaauugcugccaauccuaaacaagcaguccuguucaauaccgaauauugaaacuguuaucgaguuucagcagaaaaacaauaggcuccuggaaauuacccgggaguucagugugaacgcgggggucacaacucccgugagcaccuauaugcuuacaaauucugagcuguugucccucaucaacgauaugccuaucaccaacgaccaaaagaaacugaugucaaauaacgugcagauuguccgccagcagagcuacaguauaaugugcaucauuaaggaagagguuuuagcauaugugguacaacugccacucuacggagugaucgauacgcccuguuggaaacuucauacuucuccucugugcacaaccaauacuaaggaaggcuccaacauauguuugacacgaaccgaccguggcugguacugcgauaaugccgggagcgucucguuuuucccacaggcugagacguguaaggugcagucuaacagaguuuucugcgacaccaugaacucccuaacacugcccucagaagugaaucucugcaauauugauaucuucaacccuaaauaugacuguaagaucaugacaaguaaaaccgaugucagcuccucugugauuacaagccugggagccaucguaucaugcuacgguaagacuaaauguaccgcaaguaauaagaacaggggcauuauaaagacauuuuccaaugggugcgacuauguuagcaacaaaggaguggacaccgucucugugggcaauacucuuuacugugucaacaagcaagagggucagucacuguaugugaaaggggagccaaucauuaacuucuacgauccguugguuuuucccagugacgaauuugaugcuagcaucucccaggugaaugagaagaucaaccagucucucgccuuuauucggaaaucggacgaacuguuacacaauguaaacgucggaaagagcacgacaaauauaaugaucaccacuauuaucauugugaucauaguuauccugcuacuccugauugcggugggccuuuucuuguauugcaaggcccgcuccaccccugucacacugucaaaagaucaacucaguggcaucaacaauauugcauucucuaacugaggacuagucccuguucccagagcccacuuuuuuuucuuuuuuugaaauaaaauagccugucuuucagaucuaaaaaaaaaaaaaaaaaaaaaaaaaaaaaaaaaaaaaaaaaaaaaaaaaaaaaaaaaaaaaaaaugcaucccccccccccccccccccccccccccccccaaaggcucuuuucagagccaccagaauu

SEQ ID NO: 15549 - RNA, 1906 nt, Artificial Sequence
  mRNA product Design d-1 comprising derived and/or modified sequence from HRSV(Memphis-37)__AIY60640.1__F_DSCav1_mut3 (opt4)
gggagacccgugacccggaaguuguacggcuacgcgacuuucccucccacaaacccucgcgcccuuccuuuccuacuugggcccggcagaaagcuuaccauggagcugcccauccugaagaccaacgccaucaccaccauccuggccgccgugacccugugcuucgccagcagccagaacaucaccgaggaguucuaccagagcaccugcagcgccgugagcaagggcuaccugggcgcccugagaaccggcugguacaccagcgugaucaccaucgagcugagcaacaucaaggagaucaagugcaacggcaccgacgccaaggugaagcugaucaagcaggagcuggacaaguacaagaacgccgugaccgaccugcagcugcugaugcagagcacccccgccgccggcagcggcagcgccaucugcagcggcaucgccgugugcaaggugcugcaccuggagggcgaggugaacaagaucaagaacgcccugcugagcaccaacaaggccguggugagccugagcaacggcgugagcgugcugaccuucaaggugcuggaccugaagaacuacaucgacaagcagcugcugcccauccugaacaagcagagcugcagcauccccaacaucgagaccgugaucgaguuccagcagaagaacaacagacugcuggagaucaccagagaguucagcgugaacgccggcgugaccacccccgugagcaccuacaugcugaccaacagcgagcugcugagccugaucaacgacaugcccaucaccaacgaccagaagaagcugaugagcaacaacgugcagaucgugagacagcagagcuacagcaucaugugcaucaucaaggaggaggugcuggccuacguggugcagcugccccuguacggcgugaucgacacccccugcuggaagcugcacaccagcccccugugcaccaccaacaccaaggagggcagcaacaucugccugaccagaaccgacagaggcugguacugcgacaacgccggcagcgugagcuucuucccccaggccgagaccugcaaggugcagagcaacagaguguucugcgacaccaugaacagccugacccugcccagcgaggugaaccugugcaacaucgacaucuucaaccccaaguacgacugcaagaucaugaccagcaagaccgacgugagcagcagcgugaucaccagccugggcgccaucgugagcugcuacggcaagaccaagugcaccgccagcaacaagaacagaggcaucaucaagaccuucagcaacggcugcgacuacgugagcaacaagggcguggacaccgugagcgugggcaacacccuguacugcgugaacaagcaggagggccagagccuguacgugaagggcgagcccaucaucaacuucuacgacccccugguguuccccagcgacgaguucgacgccagcaucagccaggugaacgagaagaucaaccagagccuggccuucaucagaaagagcgacgagcugcugcacaacgugaacgugggcaagagcaccaccaacaucaugaucaccaccaucaucaucgugaucaucgugauccugcugcugcugaucgccgugggccuguuccuguacugcaaggccagaagcacccccgugacccugagcaaggaccagcugagcggcaucaacaacaucgccuucagcaacugaggacuagucccuguucccagagcccacuuuuuuuucuuuuuuugaaauaaaauagccugucuuucagaucuaaaaaaaaaaaaaaaaaaaaaaaaaaaaaaaaaaaaaaaaaaaaaaaaaaaaaaaaaaaaaaaaugcaucccccccccccccccccccccccccccccccaaaggcucuuuucagagccaccagaauu

SEQ ID NO: 15550 - RNA, 1906 nt, Artificial Sequence
  mRNA product Design d-1 comprising derived and/or modified sequence from HRSV(Memphis-37)__AIY60640.1__F_DSCav1_mut3 (opt5)
gggagacccgugacccggaaguuguacggcuacgcgacuuucccucccacaaacccucgcgcccuuccuuuccuacuugggcccggcagaaagcuuaccauggagcugcccauccucaagaccaacgccauuacaacgauccuggcugccgugacccuuugcuucgcgagcucccagaauauuacagaagaguuuuaccaaucuaccuguagcgcugucuccaaaggcuaucugggggcccucagaacaggaugguacaccucuguuaucacaauugaacugagcaacaucaaggagaucaaaugcaauggcaccgacgccaaggugaaacuuauuaagcaggaacuggauaaguauaaaaacgcugugacggaccuccagcugcugaugcaguccaccccugccgcugggucuggaagcgccaucuguuccggcauugcggucugcaaggugcuccaccuggagggggagguuaauaaaaucaagaacgcccuucugagcacaaauaaagcuguggucucucucuccaacggagugagcguucugaccuucaaggugcuugaucugaagaauuacauugacaaacaacuccugccgauccugaacaagcagucuuguuccauucccaauaucgaaacagucaucgaguuucagcagaaaaacaaucggcuccuggaaauuacccgcgaguucagcgugaacgccggcgugacgacaccugucucuaccuauaugcuuacaaauuccgagcugcucagccugaucaacgauaugcccauuaccaacgaccaaaagaaacuuauguccaauaacguucagaucgugagacagcagucuuacagcauuaugugcaucaucaaggaagaggugcuggcuuaugucgugcaacucccucuguacggcguuauugauacccccuguuggaaacugcauacauccccucucugcacgaccaauacaaaggaagggagcaacaucugucugacccggacagaccgcggaugguacugcgauaaugccggcucuguguccuuuuucccgcaggcggagaccuguaagguccagagcaacagaguguuuugcgacacgaugaacucucuuacacugcccagcgaaguuaaucucugcaauauugauaucuucaacccuaaauaugacuguaagauuaugaccuccaaaaccgaugugucuagcuccgucaucacaagccugggggccaucgugucuugcuacggaaagaccaaauguacagcuuccaauaagaaccggggcauuaucaagacguuuagcaaugggugcgacuaugucucuaacaaaggaguggacaccguuuccgugggcaauacacuuuacugugucaacaagcaagagggccagagccuguaugugaaaggggagcccauuaucaacuucuacgauccucucguuuuucccuccgacgaguucgaugccucuauuagccaggugaaugaaaagaucaaccagucccuggcuuuuauucgcaaaucugacgaacugcuccacaaugucaacgugggaaagagcaccacaaauaucaugaucaccacgauuaucauugugaucauuguuauccugcuucugcucaucgccgucggccuguuccuguauugcaaggccagauccaccccggugacacuuagcaaagaucaacucucugggauuaacaauaucgcuuucuccaacugaggacuagucccuguucccagagcccacuuuuuuuucuuuuuuugaaauaaaauagccugucuuucagaucuaaaaaaaaaaaaaaaaaaaaaaaaaaaaaaaaaaaaaaaaaaaaaaaaaaaaaaaaaaaaaaaaugcaucccccccccccccccccccccccccccccccaaaggcucuuuucagagccaccagaauu

SEQ ID NO: 15551 - RNA, 1906 nt, Artificial Sequence
  mRNA product Design d-1 comprising derived and/or modified sequence from HRSV(Memphis-37)__AIY60640.1__F_DSCav1_mut3 (opt6)
gggagacccgugacccggaaguuguacggcuacgcgacuuucccucccacaaacccucgcgcccuuccuuuccuacuugggcccggcagaaagcuuaccauggaauuaccaauacuaaaaacaaaugccaucaccaccauccuggccgccguaacauuaugcuucgcaaguucacaaaauauaacagaagaauuuuaucaaucaacuugcagcgccguaucaaaaggcuacuuaggcgcacuacguacaggaugguacacaucaguaauaaccauagaacuauccaauauuaaagaaauaaaaugcaauggaacagacgcaaaaguuaaacuaauaaaacaagaauuagacaaauacaaaaacgcaguaaccgaccuucaauuacuaaugcaaucuacccccgcugcagguuccggaucagcaauauguucaggaauugcaguaugcaaaguccuacacuuagaaggagaaguaaacaaaauaaaaaacgcacuauuaagcaccaauaaagcagucguaucauuauccaacggcguuucaguacuaacauuuaaaguacuugaccuaaaaaacuauauagacaaacaacuacuucccauccuuaacaaacaaagcugcucaauaccuaauaucgaaacaguaauagaauuucaacaaaaaaacaaucgauuauuagaaaucacacgagaauuuucugucaacgcaggagucaccacacccguaucuacuuauauguuaaccaacucugaauuauuaucacuaaucaaugacaugccaauaacaaacgaucaaaaaaaauuaaugucaaauaacguacaaauaguaagacaacaaucauacucaauaaugugcauuauaaaagaagaaguacuagccuauguuguacaacucccacucuacggcguaauagacacaccaugcuggaaauuacacacuucaccacuaugcacaacaaacacaaaagaaggaucaaacaucugccuaaccagaaccgauagaggaugguauugcgacaaugccggaucaguuucauucuucccacaagcagaaacaugcaaaguacaauccaacagaguuuucugugacacaaugaacucgcuaacauuacccagcgaaguaaaccucugcaacauagacauauucaacccaaaauacgauugcaaaauaaugacuucuaaaacagauguuuccucaagcgucauaacgaguuuaggagcaauaguaagcuguuacggaaaaaccaaauguaccgcaucaaacaaaaaccgaggaauaauaaaaaccuuuucaaacggaugcgauuacgucuccaacaaaggagucgacacaguaucaguuggcaauacucuuuacugcguaaauaaacaagaaggacaaucacuauacguaaaaggcgaaccaauaauaaacuucuacgacccccucgucuucccuucagaugaauuugacgcaagcaucucacaaguuaaugaaaaaauaaaucaauccuuagcauucauacgaaaaucagacgaacuauuacacaacguaaacguaggaaaaucaacgacaaacauaaugauaacaacuaucauuauagucauaauagucauacuacuacuauuaauagccguaggcuuauuccuauacugcaaagcaagaucuacuccaguaacacucucaaaagaccaauuaucuggaauaaauaacauagcauucucuaauuaaggacuagucccuguucccagagcccacuuuuuuuucuuuuuuugaaauaaaauagccugucuuucagaucuaaaaaaaaaaaaaaaaaaaaaaaaaaaaaaaaaaaaaaaaaaaaaaaaaaaaaaaaaaaaaaaaugcaucccccccccccccccccccccccccccccccaaaggcucuuuucagagccaccagaauu

SEQ ID NO: 15552 - RNA, 1906 nt, Artificial Sequence
  mRNA product Design d-1 comprising derived and/or modified sequence from HRSV(Memphis-37)__AIY60640.1__F_DSCav1_mut3 (opt11)
gggagacccgugacccggaaguuguacggcuacgcgacuuucccucccacaaacccucgcgcccuuccuuuccuacuugggcccggcagaaagcuuaccauggaacuccccauccucaaaaccaacgccauuaccacgauccucgccgcagucacccucugcuucgccuccucacaaaacaucacagaagaauuuuaccaaaguaccugcuccgccgucagcaaaggauaccucggcgcccuccgcaccggcugguacacauccgucauaaccaucgaacucagcaacaucaaagaaaucaaauguaacggaaccgacgccaaaguaaaacuaauaaaacaagaacucgacaaauacaagaacgccgucaccgaccuccaacuccucaugcaaucuacccccgccgccggcucagguagcgccaucugcagcgguauugccgucugcaaaguacuccaccuagaaggagaagucaauaaaaucaaaaacgcccuacucuccaccaacaaggcagucgucagccucuccaacggcgucucagucuuaaccuucaaagugcucgaccucaaaaauuacauagacaaacaacuacuccccauucucaacaaacaauccugcuccauacccaacauagaaaccgucauugaauuucaacagaaaaacaaccgccuccucgaaaucacgcgcgaguucagugucaacgccggcgucaccaccccagucucgacauacaugcucacaaacucagaacuccucucguuaaucaacgacaugccaauaaccaacgaccaaaagaaacuaauguccaacaacguucaaauaguucgccaacaaucauacuccauaaugugcaucaucaaagaagaaguccucgccuacguuguacaauuaccccucuacggcgucaucgacacaccaugcuggaaacuccacacaucgccccucugcaccaccaacaccaaagaaggcagcaacauuugccucacccggacagaccgcggcugguacugcgacaaugcaggcagcgucucauucuucccacaagccgaaaccugcaaaguccaaagcaaccgugucuucugcgacacaaugaacucccuuacccucccaagcgaaguaaaccucugcaauauugacaucuucaaccccaaauacgacugcaaaaucaugaccuccaaaaccgacgucuccucaucagucaucaccucccuuggcgccauugucuccuguuacgguaaaaccaaaugcaccgccuccaacaaaaaccgcggcaucaucaaaaccuucucuaacggcugcgacuacgucucaaacaaaggcgucgacacugucuccgucggcaacacccuauacugcgucaacaagcaagaaggacagucccuauacguaaaaggugaaccaauuaucaacuucuacgacccccuagucuucccauccgacgaguucgaugccuccaucucccaaguaaaugaaaagaucaaucaaagccuggccuucauccgcaaauccgacgaacuacuccacaaugucaacgucggaaaaucaacaacaaacaucaugaucaccaccaucaucaucgucaucauaguaauccuccuacugcucaucgccgucggucucuuccuauacugcaaagcccguucuacuccagucacccucuccaaagaccaacuaucaggaaucaacaacaucgccuucagcaacuaaggacuagucccuguucccagagcccacuuuuuuuucuuuuuuugaaauaaaauagccugucuuucagaucuaaaaaaaaaaaaaaaaaaaaaaaaaaaaaaaaaaaaaaaaaaaaaaaaaaaaaaaaaaaaaaaaugcaucccccccccccccccccccccccccccccccaaaggcucuuuucagagccaccagaauu

SEQ ID NO: 15553 - RNA, 1961 nt, Artificial Sequence
  mRNA product Design d-2 comprising derived and/or modified sequence from HRSV(Memphis-37)__AIY60640.1__F_DSCav1_mut3 (opt1)
gggagagcggcucggccauuuugucccagucaguccggaggcugcggcugcagaaguaccgccugcggaguaacugcaaagaagcuuaccauggagcugcccauccucaagaccaacgccaucaccacgauccuggccgcggugacccugugcuucgccagcucccagaacaucaccgaggaguucuaccagagcacgugcuccgccgucagcaagggcuaccucggcgcccugcgcaccgggugguacaccagcgugaucaccaucgagcuguccaacaucaaggagaucaagugcaacggcaccgacgccaaggugaagcucaucaagcaggagcuggacaaguacaagaacgcggucacggaccugcagcuccugaugcagagcaccccggccgccggcuccgggagcgcgaucugcuccggcaucgccgucugcaaggugcugcaccucgagggcgaggugaacaagaucaagaacgcccugcuguccaccaacaaggccgucgugagccucuccaacggggugagcguccugaccuucaaggugcuggaccucaagaacuacaucgacaagcagcugcugcccauccugaacaagcagagcugcuccauccccaacaucgagaccgucaucgaguuccagcagaagaacaaccgccuccuggagaucacgcgggaguucagcgugaacgcgggcgugaccacccccgucuccaccuacaugcugacgaacagcgagcuccugucccugaucaacgacaugccgaucaccaacgaccagaagaagcucaugagcaacaacgugcagaucgugcgccagcaguccuacagcaucaugugcaucaucaaggaggagguccuggccuacguggugcagcugccccucuacggggucaucgacacccccugcuggaagcugcacaccagcccccugugcacgaccaacaccaaggagggcuccaacaucugccucacccggacggaccgcgggugguacugcgacaacgccggcagcguguccuucuucccgcaggccgagaccugcaagguccagagcaaccggguguucugcgacaccaugaacucccugacccugcccagcgaggugaaccucugcaacaucgacaucuucaaccccaaguacgacugcaagaucaugacguccaagaccgacgucagcuccagcgugaucaccucccugggcgccaucgugagcugcuacgggaagaccaagugcacggcgagcaacaagaaccgcggcaucaucaagaccuucuccaacgggugcgacuacgucagcaacaagggcguggacaccguguccgucggcaacacccuguacugcgugaacaagcaggagggccagagccucuacgugaagggggagcccaucaucaacuucuacgacccgcuggucuuccccuccgacgaguucgacgccagcaucucccaggugaacgagaagaucaaccagagccuggccuucauccggaaguccgacgagcuccugcacaacgugaacgucggcaagagcaccacgaacaucaugaucaccaccaucaucaucgugaucaucgugauccugcugcuccugaucgccgucgggcuguuccucuacugcaaggcccgcuccacccccgugacgcugagcaaggaccagcuguccgggaucaacaacaucgcguucagcaacugaggacuaguaauaaggaaacuguaugaaugucugugggcaggaagugaagagauccuucuguaaagguuuuuggaauuaugucugcugaauaauaaacuuuuuugaaauaauaaaucugguagaaaaaugagaucuaaaaaaaaaaaaaaaaaaaaaaaaaaaaaaaaaaaaaaaaaaaaaaaaaaaaaaaaaaaaaaaaugcaucccccccccccccccccccccccccccccccaaaggcucuuuucagagccaccagaauu

SEQ ID NO: 15554 - RNA, 1961 nt, Artificial Sequence
  mRNA product Design d-2 comprising derived and/or modified sequence from HRSV(Memphis-37)__AIY60640.1__F_DSCav1_mut3 (opt1)
gggagagcggcucggccauuuugucccagucaguccggaggcugcggcugcagaaguaccgccugcggaguaacugcaaagaagcuuaccauggagcugcccauccucaagaccaacgccaucaccacgauccuggccgcggugacccugugcuucgccagcucccagaacaucaccgaggaguucuaccagagcacgugcuccgccgucagcaagggcuaccucggggcccugcgcaccggcugguacaccuccgugaucaccaucgagcugagcaacaucaaggagaucaagugcaacgggaccgacgccaaggugaagcucaucaagcaggagcuggacaaguacaagaacgcggucacggaccugcagcuccugaugcaguccaccccggccgccggcagcggguccgccaucugcagcggcaucgcggugugcaaggugcugcaccucgagggcgaggucaacaagaucaagaacgcccugcuguccaccaacaaggccguggugagccucuccaacggggucagcgugcugaccuucaaggugcuggaccucaagaacuacaucgacaagcagcugcugcccauccucaacaagcaguccugcagcauccccaacaucgagacggucaucgaguuccagcagaagaacaaccggcugcuggagaucacccgcgaguucuccgugaacgccggcgugaccacccccgucagcacguacaugcucaccaacuccgagcugcugagccucaucaacgacaugccgaucaccaacgaccagaagaagcugaugagcaacaacgugcagaucgugcggcagcaguccuacagcaucaugugcaucaucaaggaggagguccuggccuacguggugcagcucccccuguacggggucaucgacacccccugcuggaagcugcacacgagcccccucugcaccaccaacaccaaggagggcuccaacaucugccugacgcgcaccgaccgggggugguacugcgacaacgcgggcuccgugagcuucuucccgcaggccgagaccugcaaggugcaguccaaccgcgucuucugcgacaccaugaacagccugacgcuccccuccgaggugaaccugugcaacaucgacaucuucaaccccaaguacgacugcaagaucaugaccagcaagaccgacgucuccagcuccgugaucaccagccugggcgccaucguguccugcuacgggaagacgaagugcaccgccagcaacaagaaccggggcaucaucaagaccuucuccaacgggugcgacuacgucagcaacaagggcguggacaccguguccgucggcaacacgcucuacugcgugaacaagcaggaggggcagagccuguacgugaagggcgagcccaucaucaacuucuacgacccgcuggucuuccccagcgacgaguucgacgccuccaucagccaggugaacgagaagaucaaccagucccucgcguucauccgcaagagcgacgagcugcugcacaacgugaacgucgggaaguccaccaccaacaucaugaucaccaccaucaucaucgugaucaucgugauccuccugcugcucaucgccgucggccuguuccuguacugcaaggcccggagcacgcccgugacccuguccaaggaccagcucagcgggaucaacaacaucgccuucuccaacugaggacuaguaauaaggaaacuguaugaaugucugugggcaggaagugaagagauccuucuguaaagguuuuuggaauuaugucugcugaauaauaaacuuuuuugaaauaauaaaucugguagaaaaaugagaucuaaaaaaaaaaaaaaaaaaaaaaaaaaaaaaaaaaaaaaaaaaaaaaaaaaaaaaaaaaaaaaaaugcaucccccccccccccccccccccccccccccccaaaggcucuuuucagagccaccagaauu

SEQ ID NO: 15555 - RNA, 1961 nt, Artificial Sequence
  mRNA product Design d-2 comprising derived and/or modified sequence from HRSV(Memphis-37)__AIY60640.1__F_DSCav1_mut3 (opt2)
gggagagcggcucggccauuuugucccagucaguccggaggcugcggcugcagaaguaccgccugcggaguaacugcaaagaagcuuaccauggagcuccccauccucaagaccaacgccaucaccaccauccucgccgccgucacccucugcuucgccuccucccagaacaucaccgaggaguucuaccaguccaccugcuccgccgucuccaagggcuaccucggcgcccuccgcaccggcugguacaccuccgucaucaccaucgagcucuccaacaucaaggagaucaagugcaacggcaccgacgccaaggucaagcucaucaagcaggagcucgacaaguacaagaacgccgucaccgaccuccagcuccucaugcaguccacccccgccgccggcuccggcuccgccaucugcuccggcaucgccgucugcaagguccuccaccucgagggcgaggucaacaagaucaagaacgcccuccucuccaccaacaaggccgucgucucccucuccaacggcgucuccguccucaccuucaagguccucgaccucaagaacuacaucgacaagcagcuccuccccauccucaacaagcaguccugcuccauccccaacaucgagaccgucaucgaguuccagcagaagaacaaccgccuccucgagaucacccgcgaguucuccgucaacgccggcgucaccacccccgucuccaccuacaugcucaccaacuccgagcuccucucccucaucaacgacaugcccaucaccaacgaccagaagaagcucauguccaacaacguccagaucguccgccagcaguccuacuccaucaugugcaucaucaaggaggagguccucgccuacgucguccagcucccccucuacggcgucaucgacacccccugcuggaagcuccacaccuccccccucugcaccaccaacaccaaggagggcuccaacaucugccucacccgcaccgaccgcggcugguacugcgacaacgccggcuccgucuccuucuucccccaggccgagaccugcaagguccaguccaaccgcgucuucugcgacaccaugaacucccucacccuccccuccgaggucaaccucugcaacaucgacaucuucaaccccaaguacgacugcaagaucaugaccuccaagaccgacgucuccuccuccgucaucaccucccucggcgccaucgucuccugcuacggcaagaccaagugcaccgccuccaacaagaaccgcggcaucaucaagaccuucuccaacggcugcgacuacgucuccaacaagggcgucgacaccgucuccgucggcaacacccucuacugcgucaacaagcaggagggccagucccucuacgucaagggcgagcccaucaucaacuucuacgacccccucgucuuccccuccgacgaguucgacgccuccaucucccaggucaacgagaagaucaaccagucccucgccuucauccgcaaguccgacgagcuccuccacaacgucaacgucggcaaguccaccaccaacaucaugaucaccaccaucaucaucgucaucaucgucauccuccuccuccucaucgccgucggccucuuccucuacugcaaggcccgcuccacccccgucacccucuccaaggaccagcucuccggcaucaacaacaucgccuucuccaacugaggacuaguaauaaggaaacuguaugaaugucugugggcaggaagugaagagauccuucuguaaagguuuuuggaauuaugucugcugaauaauaaacuuuuuugaaauaauaaaucugguagaaaaaugagaucuaaaaaaaaaaaaaaaaaaaaaaaaaaaaaaaaaaaaaaaaaaaaaaaaaaaaaaaaaaaaaaaaugcaucccccccccccccccccccccccccccccccaaaggcucuuuucagagccaccagaauu

SEQ ID NO: 15556 - RNA, 1961 nt, Artificial Sequence
  mRNA product Design d-2 comprising derived and/or modified sequence from HRSV(Memphis-37)__AIY60640.1__F_DSCav1_mut3 (opt3)
gggagagcggcucggccauuuugucccagucaguccggaggcugcggcugcagaaguaccgccugcggaguaacugcaaagaagcuuaccauggagcugcccauccucaagaccaacgccauuacaacuauacuugcugcagugacgcugugcuucgccagcucccagaauaucaccgaagaguuuuaccaaucuacauguucagcggucaguaaaggcuauuugggggcuuuaagaacuggaugguacaccagcguuauuacaaucgaacuguccaacauuaaggagaucaaaugcaaugguaccgacgccaaggugaaacuaauaaagcaggaacucgauaaguauaaaaacgcaguaacugaccugcagcuucugaugcagucuacuccugccgcuggcucggggucagcaaucuguagcggaauugccgugugcaaggucuugcaccucgagggcgaggugaauaaaaucaagaacgcucugcugaguaccaauaaagccguugugucccucucuaacggugucagcguguuaacguucaagguacuggaucuuaagaauuacauugacaaacaauugcugccaauccuaaacaagcaguccuguucaauaccgaauauugaaacuguuaucgaguuucagcagaaaaacaauaggcuccuggaaauuacccgggaguucagugugaacgcgggggucacaacucccgugagcaccuauaugcuuacaaauucugagcuguugucccucaucaacgauaugccuaucaccaacgaccaaaagaaacugaugucaaauaacgugcagauuguccgccagcagagcuacaguauaaugugcaucauuaaggaagagguuuuagcauaugugguacaacugccacucuacggagugaucgauacgcccuguuggaaacuucauacuucuccucugugcacaaccaauacuaaggaaggcuccaacauauguuugacacgaaccgaccguggcugguacugcgauaaugccgggagcgucucguuuuucccacaggcugagacguguaaggugcagucuaacagaguuuucugcgacaccaugaacucccuaacacugcccucagaagugaaucucugcaauauugauaucuucaacccuaaauaugacuguaagaucaugacaaguaaaaccgaugucagcuccucugugauuacaagccugggagccaucguaucaugcuacgguaagacuaaauguaccgcaaguaauaagaacaggggcauuauaaagacauuuuccaaugggugcgacuauguuagcaacaaaggaguggacaccgucucugugggcaauacucuuuacugugucaacaagcaagagggucagucacuguaugugaaaggggagccaaucauuaacuucuacgauccguugguuuuucccagugacgaauuugaugcuagcaucucccaggugaaugagaagaucaaccagucucucgccuuuauucggaaaucggacgaacuguuacacaauguaaacgucggaaagagcacgacaaauauaaugaucaccacuauuaucauugugaucauaguuauccugcuacuccugauugcggugggccuuuucuuguauugcaaggcccgcuccaccccugucacacugucaaaagaucaacucaguggcaucaacaauauugcauucucuaacugaggacuaguaauaaggaaacuguaugaaugucugugggcaggaagugaagagauccuucuguaaagguuuuuggaauuaugucugcugaauaauaaacuuuuuugaaauaauaaaucugguagaaaaaugagaucuaaaaaaaaaaaaaaaaaaaaaaaaaaaaaaaaaaaaaaaaaaaaaaaaaaaaaaaaaaaaaaaaugcaucccccccccccccccccccccccccccccccaaaggcucuuuucagagccaccagaauu

SEQ ID NO: 15557 - RNA, 1961 nt, Artificial Sequence
  mRNA product Design d-2 comprising derived and/or modified sequence from HRSV(Memphis-37)__AIY60640.1__F_DSCav1_mut3 (opt4)
gggagagcggcucggccauuuugucccagucaguccggaggcugcggcugcagaaguaccgccugcggaguaacugcaaagaagcuuaccauggagcugcccauccugaagaccaacgccaucaccaccauccuggccgccgugacccugugcuucgccagcagccagaacaucaccgaggaguucuaccagagcaccugcagcgccgugagcaagggcuaccugggcgcccugagaaccggcugguacaccagcgugaucaccaucgagcugagcaacaucaaggagaucaagugcaacggcaccgacgccaaggugaagcugaucaagcaggagcuggacaaguacaagaacgccgugaccgaccugcagcugcugaugcagagcacccccgccgccggcagcggcagcgccaucugcagcggcaucgccgugugcaaggugcugcaccuggagggcgaggugaacaagaucaagaacgcccugcugagcaccaacaaggccguggugagccugagcaacggcgugagcgugcugaccuucaaggugcuggaccugaagaacuacaucgacaagcagcugcugcccauccugaacaagcagagcugcagcauccccaacaucgagaccgugaucgaguuccagcagaagaacaacagacugcuggagaucaccagagaguucagcgugaacgccggcgugaccacccccgugagcaccuacaugcugaccaacagcgagcugcugagccugaucaacgacaugcccaucaccaacgaccagaagaagcugaugagcaacaacgugcagaucgugagacagcagagcuacagcaucaugugcaucaucaaggaggaggugcuggccuacguggugcagcugccccuguacggcgugaucgacacccccugcuggaagcugcacaccagcccccugugcaccaccaacaccaaggagggcagcaacaucugccugaccagaaccgacagaggcugguacugcgacaacgccggcagcgugagcuucuucccccaggccgagaccugcaaggugcagagcaacagaguguucugcgacaccaugaacagccugacccugcccagcgaggugaaccugugcaacaucgacaucuucaaccccaaguacgacugcaagaucaugaccagcaagaccgacgugagcagcagcgugaucaccagccugggcgccaucgugagcugcuacggcaagaccaagugcaccgccagcaacaagaacagaggcaucaucaagaccuucagcaacggcugcgacuacgugagcaacaagggcguggacaccgugagcgugggcaacacccuguacugcgugaacaagcaggagggccagagccuguacgugaagggcgagcccaucaucaacuucuacgacccccugguguuccccagcgacgaguucgacgccagcaucagccaggugaacgagaagaucaaccagagccuggccuucaucagaaagagcgacgagcugcugcacaacgugaacgugggcaagagcaccaccaacaucaugaucaccaccaucaucaucgugaucaucgugauccugcugcugcugaucgccgugggccuguuccuguacugcaaggccagaagcacccccgugacccugagcaaggaccagcugagcggcaucaacaacaucgccuucagcaacugaggacuaguaauaaggaaacuguaugaaugucugugggcaggaagugaagagauccuucuguaaagguuuuuggaauuaugucugcugaauaauaaacuuuuuugaaauaauaaaucugguagaaaaaugagaucuaaaaaaaaaaaaaaaaaaaaaaaaaaaaaaaaaaaaaaaaaaaaaaaaaaaaaaaaaaaaaaaaugcaucccccccccccccccccccccccccccccccaaaggcucuuuucagagccaccagaauu

SEQ ID NO: 15558 - RNA, 1961 nt, Artificial Sequence
  mRNA product Design d-2 comprising derived and/or modified sequence from HRSV(Memphis-37)__AIY60640.1__F_DSCav1_mut3 (opt5)
gggagagcggcucggccauuuugucccagucaguccggaggcugcggcugcagaaguaccgccugcggaguaacugcaaagaagcuuaccauggagcugcccauccucaagaccaacgccauuacaacgauccuggcugccgugacccuuugcuucgcgagcucccagaauauuacagaagaguuuuaccaaucuaccuguagcgcugucuccaaaggcuaucugggggcccucagaacaggaugguacaccucuguuaucacaauugaacugagcaacaucaaggagaucaaaugcaauggcaccgacgccaaggugaaacuuauuaagcaggaacuggauaaguauaaaaacgcugugacggaccuccagcugcugaugcaguccaccccugccgcugggucuggaagcgccaucuguuccggcauugcggucugcaaggugcuccaccuggagggggagguuaauaaaaucaagaacgcccuucugagcacaaauaaagcuguggucucucucuccaacggagugagcguucugaccuucaaggugcuugaucugaagaauuacauugacaaacaacuccugccgauccugaacaagcagucuuguuccauucccaauaucgaaacagucaucgaguuucagcagaaaaacaaucggcuccuggaaauuacccgcgaguucagcgugaacgccggcgugacgacaccugucucuaccuauaugcuuacaaauuccgagcugcucagccugaucaacgauaugcccauuaccaacgaccaaaagaaacuuauguccaauaacguucagaucgugagacagcagucuuacagcauuaugugcaucaucaaggaagaggugcuggcuuaugucgugcaacucccucuguacggcguuauugauacccccuguuggaaacugcauacauccccucucugcacgaccaauacaaaggaagggagcaacaucugucugacccggacagaccgcggaugguacugcgauaaugccggcucuguguccuuuuucccgcaggcggagaccuguaagguccagagcaacagaguguuuugcgacacgaugaacucucuuacacugcccagcgaaguuaaucucugcaauauugauaucuucaacccuaaauaugacuguaagauuaugaccuccaaaaccgaugugucuagcuccgucaucacaagccugggggccaucgugucuugcuacggaaagaccaaauguacagcuuccaauaagaaccggggcauuaucaagacguuuagcaaugggugcgacuaugucucuaacaaaggaguggacaccguuuccgugggcaauacacuuuacugugucaacaagcaagagggccagagccuguaugugaaaggggagcccauuaucaacuucuacgauccucucguuuuucccuccgacgaguucgaugccucuauuagccaggugaaugaaaagaucaaccagucccuggcuuuuauucgcaaaucugacgaacugcuccacaaugucaacgugggaaagagcaccacaaauaucaugaucaccacgauuaucauugugaucauuguuauccugcuucugcucaucgccgucggccuguuccuguauugcaaggccagauccaccccggugacacuuagcaaagaucaacucucugggauuaacaauaucgcuuucuccaacugaggacuaguaauaaggaaacuguaugaaugucugugggcaggaagugaagagauccuucuguaaagguuuuuggaauuaugucugcugaauaauaaacuuuuuugaaauaauaaaucugguagaaaaaugagaucuaaaaaaaaaaaaaaaaaaaaaaaaaaaaaaaaaaaaaaaaaaaaaaaaaaaaaaaaaaaaaaaaugcaucccccccccccccccccccccccccccccccaaaggcucuuuucagagccaccagaauu

SEQ ID NO: 15559 - RNA, 1961 nt, Artificial Sequence
  mRNA product Design d-2 comprising derived and/or modified sequence from HRSV(Memphis-37)__AIY60640.1__F_DSCav1_mut3 (opt6)
gggagagcggcucggccauuuugucccagucaguccggaggcugcggcugcagaaguaccgccugcggaguaacugcaaagaagcuuaccauggaauuaccaauacuaaaaacaaaugccaucaccaccauccuggccgccguaacauuaugcuucgcaaguucacaaaauauaacagaagaauuuuaucaaucaacuugcagcgccguaucaaaaggcuacuuaggcgcacuacguacaggaugguacacaucaguaauaaccauagaacuauccaauauuaaagaaauaaaaugcaauggaacagacgcaaaaguuaaacuaauaaaacaagaauuagacaaauacaaaaacgcaguaaccgaccuucaauuacuaaugcaaucuacccccgcugcagguuccggaucagcaauauguucaggaauugcaguaugcaaaguccuacacuuagaaggagaaguaaacaaaauaaaaaacgcacuauuaagcaccaauaaagcagucguaucauuauccaacggcguuucaguacuaacauuuaaaguacuugaccuaaaaaacuauauagacaaacaacuacuucccauccuuaacaaacaaagcugcucaauaccuaauaucgaaacaguaauagaauuucaacaaaaaaacaaucgauuauuagaaaucacacgagaauuuucugucaacgcaggagucaccacacccguaucuacuuauauguuaaccaacucugaauuauuaucacuaaucaaugacaugccaauaacaaacgaucaaaaaaaauuaaugucaaauaacguacaaauaguaagacaacaaucauacucaauaaugugcauuauaaaagaagaaguacuagccuauguuguacaacucccacucuacggcguaauagacacaccaugcuggaaauuacacacuucaccacuaugcacaacaaacacaaaagaaggaucaaacaucugccuaaccagaaccgauagaggaugguauugcgacaaugccggaucaguuucauucuucccacaagcagaaacaugcaaaguacaauccaacagaguuuucugugacacaaugaacucgcuaacauuacccagcgaaguaaaccucugcaacauagacauauucaacccaaaauacgauugcaaaauaaugacuucuaaaacagauguuuccucaagcgucauaacgaguuuaggagcaauaguaagcuguuacggaaaaaccaaauguaccgcaucaaacaaaaaccgaggaauaauaaaaaccuuuucaaacggaugcgauuacgucuccaacaaaggagucgacacaguaucaguuggcaauacucuuuacugcguaaauaaacaagaaggacaaucacuauacguaaaaggcgaaccaauaauaaacuucuacgacccccucgucuucccuucagaugaauuugacgcaagcaucucacaaguuaaugaaaaaauaaaucaauccuuagcauucauacgaaaaucagacgaacuauuacacaacguaaacguaggaaaaucaacgacaaacauaaugauaacaacuaucauuauagucauaauagucauacuacuacuauuaauagccguaggcuuauuccuauacugcaaagcaagaucuacuccaguaacacucucaaaagaccaauuaucuggaauaaauaacauagcauucucuaauuaaggacuaguaauaaggaaacuguaugaaugucugugggcaggaagugaagagauccuucuguaaagguuuuuggaauuaugucugcugaauaauaaacuuuuuugaaauaauaaaucugguagaaaaaugagaucuaaaaaaaaaaaaaaaaaaaaaaaaaaaaaaaaaaaaaaaaaaaaaaaaaaaaaaaaaaaaaaaaugcaucccccccccccccccccccccccccccccccaaaggcucuuuucagagccaccagaauu

SEQ ID NO: 15560 - RNA, 1961 nt, Artificial Sequence
  mRNA product Design d-2 comprising derived and/or modified sequence from HRSV(Memphis-37)__AIY60640.1__F_DSCav1_mut3 (opt11)
gggagagcggcucggccauuuugucccagucaguccggaggcugcggcugcagaaguaccgccugcggaguaacugcaaagaagcuuaccauggaacuccccauccucaaaaccaacgccauuaccacgauccucgccgcagucacccucugcuucgccuccucacaaaacaucacagaagaauuuuaccaaaguaccugcuccgccgucagcaaaggauaccucggcgcccuccgcaccggcugguacacauccgucauaaccaucgaacucagcaacaucaaagaaaucaaauguaacggaaccgacgccaaaguaaaacuaauaaaacaagaacucgacaaauacaagaacgccgucaccgaccuccaacuccucaugcaaucuacccccgccgccggcucagguagcgccaucugcagcgguauugccgucugcaaaguacuccaccuagaaggagaagucaauaaaaucaaaaacgcccuacucuccaccaacaaggcagucgucagccucuccaacggcgucucagucuuaaccuucaaagugcucgaccucaaaaauuacauagacaaacaacuacuccccauucucaacaaacaauccugcuccauacccaacauagaaaccgucauugaauuucaacagaaaaacaaccgccuccucgaaaucacgcgcgaguucagugucaacgccggcgucaccaccccagucucgacauacaugcucacaaacucagaacuccucucguuaaucaacgacaugccaauaaccaacgaccaaaagaaacuaauguccaacaacguucaaauaguucgccaacaaucauacuccauaaugugcaucaucaaagaagaaguccucgccuacguuguacaauuaccccucuacggcgucaucgacacaccaugcuggaaacuccacacaucgccccucugcaccaccaacaccaaagaaggcagcaacauuugccucacccggacagaccgcggcugguacugcgacaaugcaggcagcgucucauucuucccacaagccgaaaccugcaaaguccaaagcaaccgugucuucugcgacacaaugaacucccuuacccucccaagcgaaguaaaccucugcaauauugacaucuucaaccccaaauacgacugcaaaaucaugaccuccaaaaccgacgucuccucaucagucaucaccucccuuggcgccauugucuccuguuacgguaaaaccaaaugcaccgccuccaacaaaaaccgcggcaucaucaaaaccuucucuaacggcugcgacuacgucucaaacaaaggcgucgacacugucuccgucggcaacacccuauacugcgucaacaagcaagaaggacagucccuauacguaaaaggugaaccaauuaucaacuucuacgacccccuagucuucccauccgacgaguucgaugccuccaucucccaaguaaaugaaaagaucaaucaaagccuggccuucauccgcaaauccgacgaacuacuccacaaugucaacgucggaaaaucaacaacaaacaucaugaucaccaccaucaucaucgucaucauaguaauccuccuacugcucaucgccgucggucucuuccuauacugcaaagcccguucuacuccagucacccucuccaaagaccaacuaucaggaaucaacaacaucgccuucagcaacuaaggacuaguaauaaggaaacuguaugaaugucugugggcaggaagugaagagauccuucuguaaagguuuuuggaauuaugucugcugaauaauaaacuuuuuugaaauaauaaaucugguagaaaaaugagaucuaaaaaaaaaaaaaaaaaaaaaaaaaaaaaaaaaaaaaaaaaaaaaaaaaaaaaaaaaaaaaaaaugcaucccccccccccccccccccccccccccccccaaaggcucuuuucagagccaccagaauu

SEQ ID NO: 15561 - RNA, 2277 nt, Artificial Sequence
  mRNA product Design d-3 comprising derived and/or modified sequence from HRSV(Memphis-37)__AIY60640.1__F_DSCav1_mut3 (opt1)
gggagagggcgcuuggcuugcaaggacccugagcugcggcauugaagcacacccaacccaacucgacugaagucagccucacugaaccggaucugagaaucuucucucucugggcuugccagggcucuccgaaccuagcuagcauccucuucaauuccaacuagaaagcuuaccauggagcugcccauccucaagaccaacgccaucaccacgauccuggccgcggugacccugugcuucgccagcucccagaacaucaccgaggaguucuaccagagcacgugcuccgccgucagcaagggcuaccucggcgcccugcgcaccgggugguacaccagcgugaucaccaucgagcuguccaacaucaaggagaucaagugcaacggcaccgacgccaaggugaagcucaucaagcaggagcuggacaaguacaagaacgcggucacggaccugcagcuccugaugcagagcaccccggccgccggcuccgggagcgcgaucugcuccggcaucgccgucugcaaggugcugcaccucgagggcgaggugaacaagaucaagaacgcccugcuguccaccaacaaggccgucgugagccucuccaacggggugagcguccugaccuucaaggugcuggaccucaagaacuacaucgacaagcagcugcugcccauccugaacaagcagagcugcuccauccccaacaucgagaccgucaucgaguuccagcagaagaacaaccgccuccuggagaucacgcgggaguucagcgugaacgcgggcgugaccacccccgucuccaccuacaugcugacgaacagcgagcuccugucccugaucaacgacaugccgaucaccaacgaccagaagaagcucaugagcaacaacgugcagaucgugcgccagcaguccuacagcaucaugugcaucaucaaggaggagguccuggccuacguggugcagcugccccucuacggggucaucgacacccccugcuggaagcugcacaccagcccccugugcacgaccaacaccaaggagggcuccaacaucugccucacccggacggaccgcgggugguacugcgacaacgccggcagcguguccuucuucccgcaggccgagaccugcaagguccagagcaaccggguguucugcgacaccaugaacucccugacccugcccagcgaggugaaccucugcaacaucgacaucuucaaccccaaguacgacugcaagaucaugacguccaagaccgacgucagcuccagcgugaucaccucccugggcgccaucgugagcugcuacgggaagaccaagugcacggcgagcaacaagaaccgcggcaucaucaagaccuucuccaacgggugcgacuacgucagcaacaagggcguggacaccguguccgucggcaacacccuguacugcgugaacaagcaggagggccagagccucuacgugaagggggagcccaucaucaacuucuacgacccgcuggucuuccccuccgacgaguucgacgccagcaucucccaggugaacgagaagaucaaccagagccuggccuucauccggaaguccgacgagcuccugcacaacgugaacgucggcaagagcaccacgaacaucaugaucaccaccaucaucaucgugaucaucgugauccugcugcuccugaucgccgucgggcuguuccucuacugcaaggcccgcuccacccccgugacgcugagcaaggaccagcuguccgggaucaacaacaucgcguucagcaacugaggacuagugaagggaacacccaaauuuaauucagccuuaagcacaauuaauuaagagugaaacguaauuguacaagcaguuggucacccaccauagggcaugaucaacaccgcaaccuuuccuuuuucccccagugauucugaaaaaccccucuucccuucagcuugcuuagauguuccaaauuuaguaagcuuaaggcggccuacagaagaaaaagaaaaaaaaggccacaaaaguucccucucacuuucaguaaauaaaauaaaagcagcaacagaaauaaagaaauaaaugaaauucaaaaugaaauaaauauuguguugugcagcauuaaaaaaucaauaaaaauuaaaaaugagcaagaucuaaaaaaaaaaaaaaaaaaaaaaaaaaaaaaaaaaaaaaaaaaaaaaaaaaaaaaaaaaaaaaaaugcaucccccccccccccccccccccccccccccccaaaggcucuuuucagagccaccagaauu

SEQ ID NO: 15562 - RNA, 2277 nt, Artificial Sequence
  mRNA product Design d-3 comprising derived and/or modified sequence from HRSV(Memphis-37)__AIY60640.1__F_DSCav1_mut3 (opt1)
gggagagggcgcuuggcuugcaaggacccugagcugcggcauugaagcacacccaacccaacucgacugaagucagccucacugaaccggaucugagaaucuucucucucugggcuugccagggcucuccgaaccuagcuagcauccucuucaauuccaacuagaaagcuuaccauggagcugcccauccucaagaccaacgccaucaccacgauccuggccgcggugacccugugcuucgccagcucccagaacaucaccgaggaguucuaccagagcacgugcuccgccgucagcaagggcuaccucggggcccugcgcaccggcugguacaccuccgugaucaccaucgagcugagcaacaucaaggagaucaagugcaacgggaccgacgccaaggugaagcucaucaagcaggagcuggacaaguacaagaacgcggucacggaccugcagcuccugaugcaguccaccccggccgccggcagcggguccgccaucugcagcggcaucgcggugugcaaggugcugcaccucgagggcgaggucaacaagaucaagaacgcccugcuguccaccaacaaggccguggugagccucuccaacggggucagcgugcugaccuucaaggugcuggaccucaagaacuacaucgacaagcagcugcugcccauccucaacaagcaguccugcagcauccccaacaucgagacggucaucgaguuccagcagaagaacaaccggcugcuggagaucacccgcgaguucuccgugaacgccggcgugaccacccccgucagcacguacaugcucaccaacuccgagcugcugagccucaucaacgacaugccgaucaccaacgaccagaagaagcugaugagcaacaacgugcagaucgugcggcagcaguccuacagcaucaugugcaucaucaaggaggagguccuggccuacguggugcagcucccccuguacggggucaucgacacccccugcuggaagcugcacacgagcccccucugcaccaccaacaccaaggagggcuccaacaucugccugacgcgcaccgaccgggggugguacugcgacaacgcgggcuccgugagcuucuucccgcaggccgagaccugcaaggugcaguccaaccgcgucuucugcgacaccaugaacagccugacgcuccccuccgaggugaaccugugcaacaucgacaucuucaaccccaaguacgacugcaagaucaugaccagcaagaccgacgucuccagcuccgugaucaccagccugggcgccaucguguccugcuacgggaagacgaagugcaccgccagcaacaagaaccggggcaucaucaagaccuucuccaacgggugcgacuacgucagcaacaagggcguggacaccguguccgucggcaacacgcucuacugcgugaacaagcaggaggggcagagccuguacgugaagggcgagcccaucaucaacuucuacgacccgcuggucuuccccagcgacgaguucgacgccuccaucagccaggugaacgagaagaucaaccagucccucgcguucauccgcaagagcgacgagcugcugcacaacgugaacgucgggaaguccaccaccaacaucaugaucaccaccaucaucaucgugaucaucgugauccuccugcugcucaucgccgucggccuguuccuguacugcaaggcccggagcacgcccgugacccuguccaaggaccagcucagcgggaucaacaacaucgccuucuccaacugaggacuagugaagggaacacccaaauuuaauucagccuuaagcacaauuaauuaagagugaaacguaauuguacaagcaguuggucacccaccauagggcaugaucaacaccgcaaccuuuccuuuuucccccagugauucugaaaaaccccucuucccuucagcuugcuuagauguuccaaauuuaguaagcuuaaggcggccuacagaagaaaaagaaaaaaaaggccacaaaaguucccucucacuuucaguaaauaaaauaaaagcagcaacagaaauaaagaaauaaaugaaauucaaaaugaaauaaauauuguguugugcagcauuaaaaaaucaauaaaaauuaaaaaugagcaagaucuaaaaaaaaaaaaaaaaaaaaaaaaaaaaaaaaaaaaaaaaaaaaaaaaaaaaaaaaaaaaaaaaugcaucccccccccccccccccccccccccccccccaaaggcucuuuucagagccaccagaauu

SEQ ID NO: 15563 - RNA, 2277 nt, Artificial Sequence
  mRNA product Design d-3 comprising derived and/or modified sequence from HRSV(Memphis-37)__AIY60640.1__F_DSCav1_mut3 (opt2)
gggagagggcgcuuggcuugcaaggacccugagcugcggcauugaagcacacccaacccaacucgacugaagucagccucacugaaccggaucugagaaucuucucucucugggcuugccagggcucuccgaaccuagcuagcauccucuucaauuccaacuagaaagcuuaccauggagcuccccauccucaagaccaacgccaucaccaccauccucgccgccgucacccucugcuucgccuccucccagaacaucaccgaggaguucuaccaguccaccugcuccgccgucuccaagggcuaccucggcgcccuccgcaccggcugguacaccuccgucaucaccaucgagcucuccaacaucaaggagaucaagugcaacggcaccgacgccaaggucaagcucaucaagcaggagcucgacaaguacaagaacgccgucaccgaccuccagcuccucaugcaguccacccccgccgccggcuccggcuccgccaucugcuccggcaucgccgucugcaagguccuccaccucgagggcgaggucaacaagaucaagaacgcccuccucuccaccaacaaggccgucgucucccucuccaacggcgucuccguccucaccuucaagguccucgaccucaagaacuacaucgacaagcagcuccuccccauccucaacaagcaguccugcuccauccccaacaucgagaccgucaucgaguuccagcagaagaacaaccgccuccucgagaucacccgcgaguucuccgucaacgccggcgucaccacccccgucuccaccuacaugcucaccaacuccgagcuccucucccucaucaacgacaugcccaucaccaacgaccagaagaagcucauguccaacaacguccagaucguccgccagcaguccuacuccaucaugugcaucaucaaggaggagguccucgccuacgucguccagcucccccucuacggcgucaucgacacccccugcuggaagcuccacaccuccccccucugcaccaccaacaccaaggagggcuccaacaucugccucacccgcaccgaccgcggcugguacugcgacaacgccggcuccgucuccuucuucccccaggccgagaccugcaagguccaguccaaccgcgucuucugcgacaccaugaacucccucacccuccccuccgaggucaaccucugcaacaucgacaucuucaaccccaaguacgacugcaagaucaugaccuccaagaccgacgucuccuccuccgucaucaccucccucggcgccaucgucuccugcuacggcaagaccaagugcaccgccuccaacaagaaccgcggcaucaucaagaccuucuccaacggcugcgacuacgucuccaacaagggcgucgacaccgucuccgucggcaacacccucuacugcgucaacaagcaggagggccagucccucuacgucaagggcgagcccaucaucaacuucuacgacccccucgucuuccccuccgacgaguucgacgccuccaucucccaggucaacgagaagaucaaccagucccucgccuucauccgcaaguccgacgagcuccuccacaacgucaacgucggcaaguccaccaccaacaucaugaucaccaccaucaucaucgucaucaucgucauccuccuccuccucaucgccgucggccucuuccucuacugcaaggcccgcuccacccccgucacccucuccaaggaccagcucuccggcaucaacaacaucgccuucuccaacugaggacuagugaagggaacacccaaauuuaauucagccuuaagcacaauuaauuaagagugaaacguaauuguacaagcaguuggucacccaccauagggcaugaucaacaccgcaaccuuuccuuuuucccccagugauucugaaaaaccccucuucccuucagcuugcuuagauguuccaaauuuaguaagcuuaaggcggccuacagaagaaaaagaaaaaaaaggccacaaaaguucccucucacuuucaguaaauaaaauaaaagcagcaacagaaauaaagaaauaaaugaaauucaaaaugaaauaaauauuguguugugcagcauuaaaaaaucaauaaaaauuaaaaaugagcaagaucuaaaaaaaaaaaaaaaaaaaaaaaaaaaaaaaaaaaaaaaaaaaaaaaaaaaaaaaaaaaaaaaaugcaucccccccccccccccccccccccccccccccaaaggcucuuuucagagccaccagaauu

SEQ ID NO: 15564 - RNA, 2277 nt, Artificial Sequence
  mRNA product Design d-3 comprising derived and/or modified sequence from HRSV(Memphis-37)__AIY60640.1__F_DSCav1_mut3 (opt3)
gggagagggcgcuuggcuugcaaggacccugagcugcggcauugaagcacacccaacccaacucgacugaagucagccucacugaaccggaucugagaaucuucucucucugggcuugccagggcucuccgaaccuagcuagcauccucuucaauuccaacuagaaagcuuaccauggagcugcccauccucaagaccaacgccauuacaacuauacuugcugcagugacgcugugcuucgccagcucccagaauaucaccgaagaguuuuaccaaucuacauguucagcggucaguaaaggcuauuugggggcuuuaagaacuggaugguacaccagcguuauuacaaucgaacuguccaacauuaaggagaucaaaugcaaugguaccgacgccaaggugaaacuaauaaagcaggaacucgauaaguauaaaaacgcaguaacugaccugcagcuucugaugcagucuacuccugccgcuggcucggggucagcaaucuguagcggaauugccgugugcaaggucuugcaccucgagggcgaggugaauaaaaucaagaacgcucugcugaguaccaauaaagccguugugucccucucuaacggugucagcguguuaacguucaagguacuggaucuuaagaauuacauugacaaacaauugcugccaauccuaaacaagcaguccuguucaauaccgaauauugaaacuguuaucgaguuucagcagaaaaacaauaggcuccuggaaauuacccgggaguucagugugaacgcgggggucacaacucccgugagcaccuauaugcuuacaaauucugagcuguugucccucaucaacgauaugccuaucaccaacgaccaaaagaaacugaugucaaauaacgugcagauuguccgccagcagagcuacaguauaaugugcaucauuaaggaagagguuuuagcauaugugguacaacugccacucuacggagugaucgauacgcccuguuggaaacuucauacuucuccucugugcacaaccaauacuaaggaaggcuccaacauauguuugacacgaaccgaccguggcugguacugcgauaaugccgggagcgucucguuuuucccacaggcugagacguguaaggugcagucuaacagaguuuucugcgacaccaugaacucccuaacacugcccucagaagugaaucucugcaauauugauaucuucaacccuaaauaugacuguaagaucaugacaaguaaaaccgaugucagcuccucugugauuacaagccugggagccaucguaucaugcuacgguaagacuaaauguaccgcaaguaauaagaacaggggcauuauaaagacauuuuccaaugggugcgacuauguuagcaacaaaggaguggacaccgucucugugggcaauacucuuuacugugucaacaagcaagagggucagucacuguaugugaaaggggagccaaucauuaacuucuacgauccguugguuuuucccagugacgaauuugaugcuagcaucucccaggugaaugagaagaucaaccagucucucgccuuuauucggaaaucggacgaacuguuacacaauguaaacgucggaaagagcacgacaaauauaaugaucaccacuauuaucauugugaucauaguuauccugcuacuccugauugcggugggccuuuucuuguauugcaaggcccgcuccaccccugucacacugucaaaagaucaacucaguggcaucaacaauauugcauucucuaacugaggacuagugaagggaacacccaaauuuaauucagccuuaagcacaauuaauuaagagugaaacguaauuguacaagcaguuggucacccaccauagggcaugaucaacaccgcaaccuuuccuuuuucccccagugauucugaaaaaccccucuucccuucagcuugcuuagauguuccaaauuuaguaagcuuaaggcggccuacagaagaaaaagaaaaaaaaggccacaaaaguucccucucacuuucaguaaauaaaauaaaagcagcaacagaaauaaagaaauaaaugaaauucaaaaugaaauaaauauuguguugugcagcauuaaaaaaucaauaaaaauuaaaaaugagcaagaucuaaaaaaaaaaaaaaaaaaaaaaaaaaaaaaaaaaaaaaaaaaaaaaaaaaaaaaaaaaaaaaaaugcaucccccccccccccccccccccccccccccccaaaggcucuuuucagagccaccagaauu

SEQ ID NO: 15565 - RNA, 2277 nt, Artificial Sequence
  mRNA product Design d-3 comprising derived and/or modified sequence from HRSV(Memphis-37)__AIY60640.1__F_DSCav1_mut3 (opt4)
gggagagggcgcuuggcuugcaaggacccugagcugcggcauugaagcacacccaacccaacucgacugaagucagccucacugaaccggaucugagaaucuucucucucugggcuugccagggcucuccgaaccuagcuagcauccucuucaauuccaacuagaaagcuuaccauggagcugcccauccugaagaccaacgccaucaccaccauccuggccgccgugacccugugcuucgccagcagccagaacaucaccgaggaguucuaccagagcaccugcagcgccgugagcaagggcuaccugggcgcccugagaaccggcugguacaccagcgugaucaccaucgagcugagcaacaucaaggagaucaagugcaacggcaccgacgccaaggugaagcugaucaagcaggagcuggacaaguacaagaacgccgugaccgaccugcagcugcugaugcagagcacccccgccgccggcagcggcagcgccaucugcagcggcaucgccgugugcaaggugcugcaccuggagggcgaggugaacaagaucaagaacgcccugcugagcaccaacaaggccguggugagccugagcaacggcgugagcgugcugaccuucaaggugcuggaccugaagaacuacaucgacaagcagcugcugcccauccugaacaagcagagcugcagcauccccaacaucgagaccgugaucgaguuccagcagaagaacaacagacugcuggagaucaccagagaguucagcgugaacgccggcgugaccacccccgugagcaccuacaugcugaccaacagcgagcugcugagccugaucaacgacaugcccaucaccaacgaccagaagaagcugaugagcaacaacgugcagaucgugagacagcagagcuacagcaucaugugcaucaucaaggaggaggugcuggccuacguggugcagcugccccuguacggcgugaucgacacccccugcuggaagcugcacaccagcccccugugcaccaccaacaccaaggagggcagcaacaucugccugaccagaaccgacagaggcugguacugcgacaacgccggcagcgugagcuucuucccccaggccgagaccugcaaggugcagagcaacagaguguucugcgacaccaugaacagccugacccugcccagcgaggugaaccugugcaacaucgacaucuucaaccccaaguacgacugcaagaucaugaccagcaagaccgacgugagcagcagcgugaucaccagccugggcgccaucgugagcugcuacggcaagaccaagugcaccgccagcaacaagaacagaggcaucaucaagaccuucagcaacggcugcgacuacgugagcaacaagggcguggacaccgugagcgugggcaacacccuguacugcgugaacaagcaggagggccagagccuguacgugaagggcgagcccaucaucaacuucuacgacccccugguguuccccagcgacgaguucgacgccagcaucagccaggugaacgagaagaucaaccagagccuggccuucaucagaaagagcgacgagcugcugcacaacgugaacgugggcaagagcaccaccaacaucaugaucaccaccaucaucaucgugaucaucgugauccugcugcugcugaucgccgugggccuguuccuguacugcaaggccagaagcacccccgugacccugagcaaggaccagcugagcggcaucaacaacaucgccuucagcaacugaggacuagugaagggaacacccaaauuuaauucagccuuaagcacaauuaauuaagagugaaacguaauuguacaagcaguuggucacccaccauagggcaugaucaacaccgcaaccuuuccuuuuucccccagugauucugaaaaaccccucuucccuucagcuugcuuagauguuccaaauuuaguaagcuuaaggcggccuacagaagaaaaagaaaaaaaaggccacaaaaguucccucucacuuucaguaaauaaaauaaaagcagcaacagaaauaaagaaauaaaugaaauucaaaaugaaauaaauauuguguugugcagcauuaaaaaaucaauaaaaauuaaaaaugagcaagaucuaaaaaaaaaaaaaaaaaaaaaaaaaaaaaaaaaaaaaaaaaaaaaaaaaaaaaaaaaaaaaaaaugcaucccccccccccccccccccccccccccccccaaaggcucuuuucagagccaccagaauu

SEQ ID NO: 15566 - RNA, 2277 nt, Artificial Sequence
  mRNA product Design d-3 comprising derived and/or modified sequence from HRSV(Memphis-37)__AIY60640.1__F_DSCav1_mut3 (opt5)
gggagagggcgcuuggcuugcaaggacccugagcugcggcauugaagcacacccaacccaacucgacugaagucagccucacugaaccggaucugagaaucuucucucucugggcuugccagggcucuccgaaccuagcuagcauccucuucaauuccaacuagaaagcuuaccauggagcugcccauccucaagaccaacgccauuacaacgauccuggcugccgugacccuuugcuucgcgagcucccagaauauuacagaagaguuuuaccaaucuaccuguagcgcugucuccaaaggcuaucugggggcccucagaacaggaugguacaccucuguuaucacaauugaacugagcaacaucaaggagaucaaaugcaauggcaccgacgccaaggugaaacuuauuaagcaggaacuggauaaguauaaaaacgcugugacggaccuccagcugcugaugcaguccaccccugccgcugggucuggaagcgccaucuguuccggcauugcggucugcaaggugcuccaccuggagggggagguuaauaaaaucaagaacgcccuucugagcacaaauaaagcuguggucucucucuccaacggagugagcguucugaccuucaaggugcuugaucugaagaauuacauugacaaacaacuccugccgauccugaacaagcagucuuguuccauucccaauaucgaaacagucaucgaguuucagcagaaaaacaaucggcuccuggaaauuacccgcgaguucagcgugaacgccggcgugacgacaccugucucuaccuauaugcuuacaaauuccgagcugcucagccugaucaacgauaugcccauuaccaacgaccaaaagaaacuuauguccaauaacguucagaucgugagacagcagucuuacagcauuaugugcaucaucaaggaagaggugcuggcuuaugucgugcaacucccucuguacggcguuauugauacccccuguuggaaacugcauacauccccucucugcacgaccaauacaaaggaagggagcaacaucugucugacccggacagaccgcggaugguacugcgauaaugccggcucuguguccuuuuucccgcaggcggagaccuguaagguccagagcaacagaguguuuugcgacacgaugaacucucuuacacugcccagcgaaguuaaucucugcaauauugauaucuucaacccuaaauaugacuguaagauuaugaccuccaaaaccgaugugucuagcuccgucaucacaagccugggggccaucgugucuugcuacggaaagaccaaauguacagcuuccaauaagaaccggggcauuaucaagacguuuagcaaugggugcgacuaugucucuaacaaaggaguggacaccguuuccgugggcaauacacuuuacugugucaacaagcaagagggccagagccuguaugugaaaggggagcccauuaucaacuucuacgauccucucguuuuucccuccgacgaguucgaugccucuauuagccaggugaaugaaaagaucaaccagucccuggcuuuuauucgcaaaucugacgaacugcuccacaaugucaacgugggaaagagcaccacaaauaucaugaucaccacgauuaucauugugaucauuguuauccugcuucugcucaucgccgucggccuguuccuguauugcaaggccagauccaccccggugacacuuagcaaagaucaacucucugggauuaacaauaucgcuuucuccaacugaggacuagugaagggaacacccaaauuuaauucagccuuaagcacaauuaauuaagagugaaacguaauuguacaagcaguuggucacccaccauagggcaugaucaacaccgcaaccuuuccuuuuucccccagugauucugaaaaaccccucuucccuucagcuugcuuagauguuccaaauuuaguaagcuuaaggcggccuacagaagaaaaagaaaaaaaaggccacaaaaguucccucucacuuucaguaaauaaaauaaaagcagcaacagaaauaaagaaauaaaugaaauucaaaaugaaauaaauauuguguugugcagcauuaaaaaaucaauaaaaauuaaaaaugagcaagaucuaaaaaaaaaaaaaaaaaaaaaaaaaaaaaaaaaaaaaaaaaaaaaaaaaaaaaaaaaaaaaaaaugcaucccccccccccccccccccccccccccccccaaaggcucuuuucagagccaccagaauu

SEQ ID NO: 15567 - RNA, 2277 nt, Artificial Sequence
  mRNA product Design d-3 comprising derived and/or modified sequence from HRSV(Memphis-37)__AIY60640.1__F_DSCav1_mut3 (opt6)
gggagagggcgcuuggcuugcaaggacccugagcugcggcauugaagcacacccaacccaacucgacugaagucagccucacugaaccggaucugagaaucuucucucucugggcuugccagggcucuccgaaccuagcuagcauccucuucaauuccaacuagaaagcuuaccauggaauuaccaauacuaaaaacaaaugccaucaccaccauccuggccgccguaacauuaugcuucgcaaguucacaaaauauaacagaagaauuuuaucaaucaacuugcagcgccguaucaaaaggcuacuuaggcgcacuacguacaggaugguacacaucaguaauaaccauagaacuauccaauauuaaagaaauaaaaugcaauggaacagacgcaaaaguuaaacuaauaaaacaagaauuagacaaauacaaaaacgcaguaaccgaccuucaauuacuaaugcaaucuacccccgcugcagguuccggaucagcaauauguucaggaauugcaguaugcaaaguccuacacuuagaaggagaaguaaacaaaauaaaaaacgcacuauuaagcaccaauaaagcagucguaucauuauccaacggcguuucaguacuaacauuuaaaguacuugaccuaaaaaacuauauagacaaacaacuacuucccauccuuaacaaacaaagcugcucaauaccuaauaucgaaacaguaauagaauuucaacaaaaaaacaaucgauuauuagaaaucacacgagaauuuucugucaacgcaggagucaccacacccguaucuacuuauauguuaaccaacucugaauuauuaucacuaaucaaugacaugccaauaacaaacgaucaaaaaaaauuaaugucaaauaacguacaaauaguaagacaacaaucauacucaauaaugugcauuauaaaagaagaaguacuagccuauguuguacaacucccacucuacggcguaauagacacaccaugcuggaaauuacacacuucaccacuaugcacaacaaacacaaaagaaggaucaaacaucugccuaaccagaaccgauagaggaugguauugcgacaaugccggaucaguuucauucuucccacaagcagaaacaugcaaaguacaauccaacagaguuuucugugacacaaugaacucgcuaacauuacccagcgaaguaaaccucugcaacauagacauauucaacccaaaauacgauugcaaaauaaugacuucuaaaacagauguuuccucaagcgucauaacgaguuuaggagcaauaguaagcuguuacggaaaaaccaaauguaccgcaucaaacaaaaaccgaggaauaauaaaaaccuuuucaaacggaugcgauuacgucuccaacaaaggagucgacacaguaucaguuggcaauacucuuuacugcguaaauaaacaagaaggacaaucacuauacguaaaaggcgaaccaauaauaaacuucuacgacccccucgucuucccuucagaugaauuugacgcaagcaucucacaaguuaaugaaaaaauaaaucaauccuuagcauucauacgaaaaucagacgaacuauuacacaacguaaacguaggaaaaucaacgacaaacauaaugauaacaacuaucauuauagucauaauagucauacuacuacuauuaauagccguaggcuuauuccuauacugcaaagcaagaucuacuccaguaacacucucaaaagaccaauuaucuggaauaaauaacauagcauucucuaauuaaggacuagugaagggaacacccaaauuuaauucagccuuaagcacaauuaauuaagagugaaacguaauuguacaagcaguuggucacccaccauagggcaugaucaacaccgcaaccuuuccuuuuucccccagugauucugaaaaaccccucuucccuucagcuugcuuagauguuccaaauuuaguaagcuuaaggcggccuacagaagaaaaagaaaaaaaaggccacaaaaguucccucucacuuucaguaaauaaaauaaaagcagcaacagaaauaaagaaauaaaugaaauucaaaaugaaauaaauauuguguugugcagcauuaaaaaaucaauaaaaauuaaaaaugagcaagaucuaaaaaaaaaaaaaaaaaaaaaaaaaaaaaaaaaaaaaaaaaaaaaaaaaaaaaaaaaaaaaaaaugcaucccccccccccccccccccccccccccccccaaaggcucuuuucagagccaccagaauu

SEQ ID NO: 15568 - RNA, 2277 nt, Artificial Sequence
  mRNA product Design d-3 comprising derived and/or modified sequence from HRSV(Memphis-37)__AIY60640.1__F_DSCav1_mut3 (opt11)
gggagagggcgcuuggcuugcaaggacccugagcugcggcauugaagcacacccaacccaacucgacugaagucagccucacugaaccggaucugagaaucuucucucucugggcuugccagggcucuccgaaccuagcuagcauccucuucaauuccaacuagaaagcuuaccauggaacuccccauccucaaaaccaacgccauuaccacgauccucgccgcagucacccucugcuucgccuccucacaaaacaucacagaagaauuuuaccaaaguaccugcuccgccgucagcaaaggauaccucggcgcccuccgcaccggcugguacacauccgucauaaccaucgaacucagcaacaucaaagaaaucaaauguaacggaaccgacgccaaaguaaaacuaauaaaacaagaacucgacaaauacaagaacgccgucaccgaccuccaacuccucaugcaaucuacccccgccgccggcucagguagcgccaucugcagcgguauugccgucugcaaaguacuccaccuagaaggagaagucaauaaaaucaaaaacgcccuacucuccaccaacaaggcagucgucagccucuccaacggcgucucagucuuaaccuucaaagugcucgaccucaaaaauuacauagacaaacaacuacuccccauucucaacaaacaauccugcuccauacccaacauagaaaccgucauugaauuucaacagaaaaacaaccgccuccucgaaaucacgcgcgaguucagugucaacgccggcgucaccaccccagucucgacauacaugcucacaaacucagaacuccucucguuaaucaacgacaugccaauaaccaacgaccaaaagaaacuaauguccaacaacguucaaauaguucgccaacaaucauacuccauaaugugcaucaucaaagaagaaguccucgccuacguuguacaauuaccccucuacggcgucaucgacacaccaugcuggaaacuccacacaucgccccucugcaccaccaacaccaaagaaggcagcaacauuugccucacccggacagaccgcggcugguacugcgacaaugcaggcagcgucucauucuucccacaagccgaaaccugcaaaguccaaagcaaccgugucuucugcgacacaaugaacucccuuacccucccaagcgaaguaaaccucugcaauauugacaucuucaaccccaaauacgacugcaaaaucaugaccuccaaaaccgacgucuccucaucagucaucaccucccuuggcgccauugucuccuguuacgguaaaaccaaaugcaccgccuccaacaaaaaccgcggcaucaucaaaaccuucucuaacggcugcgacuacgucucaaacaaaggcgucgacacugucuccgucggcaacacccuauacugcgucaacaagcaagaaggacagucccuauacguaaaaggugaaccaauuaucaacuucuacgacccccuagucuucccauccgacgaguucgaugccuccaucucccaaguaaaugaaaagaucaaucaaagccuggccuucauccgcaaauccgacgaacuacuccacaaugucaacgucggaaaaucaacaacaaacaucaugaucaccaccaucaucaucgucaucauaguaauccuccuacugcucaucgccgucggucucuuccuauacugcaaagcccguucuacuccagucacccucuccaaagaccaacuaucaggaaucaacaacaucgccuucagcaacuaaggacuagugaagggaacacccaaauuuaauucagccuuaagcacaauuaauuaagagugaaacguaauuguacaagcaguuggucacccaccauagggcaugaucaacaccgcaaccuuuccuuuuucccccagugauucugaaaaaccccucuucccuucagcuugcuuagauguuccaaauuuaguaagcuuaaggcggccuacagaagaaaaagaaaaaaaaggccacaaaaguucccucucacuuucaguaaauaaaauaaaagcagcaacagaaauaaagaaauaaaugaaauucaaaaugaaauaaauauuguguugugcagcauuaaaaaaucaauaaaaauuaaaaaugagcaagaucuaaaaaaaaaaaaaaaaaaaaaaaaaaaaaaaaaaaaaaaaaaaaaaaaaaaaaaaaaaaaaaaaugcaucccccccccccccccccccccccccccccccaaaggcucuuuucagagccaccagaauu

SEQ ID NO: 15569 - RNA, 1960 nt, Artificial Sequence
  mRNA product Design d-4 comprising derived and/or modified sequence from HRSV(Memphis-37)__AIY60640.1__F_DSCav1_mut3 (opt1)
gggagagucccgcagucggcguccagcggcucugcuuguucgugugugugucguugcaggccuuauucaagcuuaccauggagcugcccauccucaagaccaacgccaucaccacgauccuggccgcggugacccugugcuucgccagcucccagaacaucaccgaggaguucuaccagagcacgugcuccgccgucagcaagggcuaccucggcgcccugcgcaccgggugguacaccagcgugaucaccaucgagcuguccaacaucaaggagaucaagugcaacggcaccgacgccaaggugaagcucaucaagcaggagcuggacaaguacaagaacgcggucacggaccugcagcuccugaugcagagcaccccggccgccggcuccgggagcgcgaucugcuccggcaucgccgucugcaaggugcugcaccucgagggcgaggugaacaagaucaagaacgcccugcuguccaccaacaaggccgucgugagccucuccaacggggugagcguccugaccuucaaggugcuggaccucaagaacuacaucgacaagcagcugcugcccauccugaacaagcagagcugcuccauccccaacaucgagaccgucaucgaguuccagcagaagaacaaccgccuccuggagaucacgcgggaguucagcgugaacgcgggcgugaccacccccgucuccaccuacaugcugacgaacagcgagcuccugucccugaucaacgacaugccgaucaccaacgaccagaagaagcucaugagcaacaacgugcagaucgugcgccagcaguccuacagcaucaugugcaucaucaaggaggagguccuggccuacguggugcagcugccccucuacggggucaucgacacccccugcuggaagcugcacaccagcccccugugcacgaccaacaccaaggagggcuccaacaucugccucacccggacggaccgcgggugguacugcgacaacgccggcagcguguccuucuucccgcaggccgagaccugcaagguccagagcaaccggguguucugcgacaccaugaacucccugacccugcccagcgaggugaaccucugcaacaucgacaucuucaaccccaaguacgacugcaagaucaugacguccaagaccgacgucagcuccagcgugaucaccucccugggcgccaucgugagcugcuacgggaagaccaagugcacggcgagcaacaagaaccgcggcaucaucaagaccuucuccaacgggugcgacuacgucagcaacaagggcguggacaccguguccgucggcaacacccuguacugcgugaacaagcaggagggccagagccucuacgugaagggggagcccaucaucaacuucuacgacccgcuggucuuccccuccgacgaguucgacgccagcaucucccaggugaacgagaagaucaaccagagccuggccuucauccggaaguccgacgagcuccugcacaacgugaacgucggcaagagcaccacgaacaucaugaucaccaccaucaucaucgugaucaucgugauccugcugcuccugaucgccgucgggcuguuccucuacugcaaggcccgcuccacccccgugacgcugagcaaggaccagcuguccgggaucaacaacaucgcguucagcaacugaggacuaguggaagcauuuuccuggcugauuaaaagaaauuacucagcuauggucaucuguuccuguuagaaggcuaugcagcauauuauauacuaugcgcauguuaugaaaugcauaauaaaaaauuuuaaaaaaucuaaaagaucuaaaaaaaaaaaaaaaaaaaaaaaaaaaaaaaaaaaaaaaaaaaaaaaaaaaaaaaaaaaaaaaaugcaucccccccccccccccccccccccccccccccaaaggcucuuuucagagccaccagaauu

SEQ ID NO: 15570 - RNA, 1960 nt, Artificial Sequence
  mRNA product Design d-4 comprising derived and/or modified sequence from HRSV(Memphis-37)__AIY60640.1__F_DSCav1_mut3 (opt1)
gggagagucccgcagucggcguccagcggcucugcuuguucgugugugugucguugcaggccuuauucaagcuuaccauggagcugcccauccucaagaccaacgccaucaccacgauccuggccgcggugacccugugcuucgccagcucccagaacaucaccgaggaguucuaccagagcacgugcuccgccgucagcaagggcuaccucggggcccugcgcaccggcugguacaccuccgugaucaccaucgagcugagcaacaucaaggagaucaagugcaacgggaccgacgccaaggugaagcucaucaagcaggagcuggacaaguacaagaacgcggucacggaccugcagcuccugaugcaguccaccccggccgccggcagcggguccgccaucugcagcggcaucgcggugugcaaggugcugcaccucgagggcgaggucaacaagaucaagaacgcccugcuguccaccaacaaggccguggugagccucuccaacggggucagcgugcugaccuucaaggugcuggaccucaagaacuacaucgacaagcagcugcugcccauccucaacaagcaguccugcagcauccccaacaucgagacggucaucgaguuccagcagaagaacaaccggcugcuggagaucacccgcgaguucuccgugaacgccggcgugaccacccccgucagcacguacaugcucaccaacuccgagcugcugagccucaucaacgacaugccgaucaccaacgaccagaagaagcugaugagcaacaacgugcagaucgugcggcagcaguccuacagcaucaugugcaucaucaaggaggagguccuggccuacguggugcagcucccccuguacggggucaucgacacccccugcuggaagcugcacacgagcccccucugcaccaccaacaccaaggagggcuccaacaucugccugacgcgcaccgaccgggggugguacugcgacaacgcgggcuccgugagcuucuucccgcaggccgagaccugcaaggugcaguccaaccgcgucuucugcgacaccaugaacagccugacgcuccccuccgaggugaaccugugcaacaucgacaucuucaaccccaaguacgacugcaagaucaugaccagcaagaccgacgucuccagcuccgugaucaccagccugggcgccaucguguccugcuacgggaagacgaagugcaccgccagcaacaagaaccggggcaucaucaagaccuucuccaacgggugcgacuacgucagcaacaagggcguggacaccguguccgucggcaacacgcucuacugcgugaacaagcaggaggggcagagccuguacgugaagggcgagcccaucaucaacuucuacgacccgcuggucuuccccagcgacgaguucgacgccuccaucagccaggugaacgagaagaucaaccagucccucgcguucauccgcaagagcgacgagcugcugcacaacgugaacgucgggaaguccaccaccaacaucaugaucaccaccaucaucaucgugaucaucgugauccuccugcugcucaucgccgucggccuguuccuguacugcaaggcccggagcacgcccgugacccuguccaaggaccagcucagcgggaucaacaacaucgccuucuccaacugaggacuaguggaagcauuuuccuggcugauuaaaagaaauuacucagcuauggucaucuguuccuguuagaaggcuaugcagcauauuauauacuaugcgcauguuaugaaaugcauaauaaaaaauuuuaaaaaaucuaaaagaucuaaaaaaaaaaaaaaaaaaaaaaaaaaaaaaaaaaaaaaaaaaaaaaaaaaaaaaaaaaaaaaaaugcaucccccccccccccccccccccccccccccccaaaggcucuuuucagagccaccagaauu

SEQ ID NO: 15571 - RNA, 1960 nt, Artificial Sequence
  mRNA product Design d-4 comprising derived and/or modified sequence from HRSV(Memphis-37)__AIY60640.1__F_DSCav1_mut3 (opt2)
gggagagucccgcagucggcguccagcggcucugcuuguucgugugugugucguugcaggccuuauucaagcuuaccauggagcuccccauccucaagaccaacgccaucaccaccauccucgccgccgucacccucugcuucgccuccucccagaacaucaccgaggaguucuaccaguccaccugcuccgccgucuccaagggcuaccucggcgcccuccgcaccggcugguacaccuccgucaucaccaucgagcucuccaacaucaaggagaucaagugcaacggcaccgacgccaaggucaagcucaucaagcaggagcucgacaaguacaagaacgccgucaccgaccuccagcuccucaugcaguccacccccgccgccggcuccggcuccgccaucugcuccggcaucgccgucugcaagguccuccaccucgagggcgaggucaacaagaucaagaacgcccuccucuccaccaacaaggccgucgucucccucuccaacggcgucuccguccucaccuucaagguccucgaccucaagaacuacaucgacaagcagcuccuccccauccucaacaagcaguccugcuccauccccaacaucgagaccgucaucgaguuccagcagaagaacaaccgccuccucgagaucacccgcgaguucuccgucaacgccggcgucaccacccccgucuccaccuacaugcucaccaacuccgagcuccucucccucaucaacgacaugcccaucaccaacgaccagaagaagcucauguccaacaacguccagaucguccgccagcaguccuacuccaucaugugcaucaucaaggaggagguccucgccuacgucguccagcucccccucuacggcgucaucgacacccccugcuggaagcuccacaccuccccccucugcaccaccaacaccaaggagggcuccaacaucugccucacccgcaccgaccgcggcugguacugcgacaacgccggcuccgucuccuucuucccccaggccgagaccugcaagguccaguccaaccgcgucuucugcgacaccaugaacucccucacccuccccuccgaggucaaccucugcaacaucgacaucuucaaccccaaguacgacugcaagaucaugaccuccaagaccgacgucuccuccuccgucaucaccucccucggcgccaucgucuccugcuacggcaagaccaagugcaccgccuccaacaagaaccgcggcaucaucaagaccuucuccaacggcugcgacuacgucuccaacaagggcgucgacaccgucuccgucggcaacacccucuacugcgucaacaagcaggagggccagucccucuacgucaagggcgagcccaucaucaacuucuacgacccccucgucuuccccuccgacgaguucgacgccuccaucucccaggucaacgagaagaucaaccagucccucgccuucauccgcaaguccgacgagcuccuccacaacgucaacgucggcaaguccaccaccaacaucaugaucaccaccaucaucaucgucaucaucgucauccuccuccuccucaucgccgucggccucuuccucuacugcaaggcccgcuccacccccgucacccucuccaaggaccagcucuccggcaucaacaacaucgccuucuccaacugaggacuaguggaagcauuuuccuggcugauuaaaagaaauuacucagcuauggucaucuguuccuguuagaaggcuaugcagcauauuauauacuaugcgcauguuaugaaaugcauaauaaaaaauuuuaaaaaaucuaaaagaucuaaaaaaaaaaaaaaaaaaaaaaaaaaaaaaaaaaaaaaaaaaaaaaaaaaaaaaaaaaaaaaaaugcaucccccccccccccccccccccccccccccccaaaggcucuuuucagagccaccagaauu

SEQ ID NO: 15572 - RNA, 1960 nt, Artificial Sequence
  mRNA product Design d-4 comprising derived and/or modified sequence from HRSV(Memphis-37)__AIY60640.1__F_DSCav1_mut3 (opt3)
gggagagucccgcagucggcguccagcggcucugcuuguucgugugugugucguugcaggccuuauucaagcuuaccauggagcugcccauccucaagaccaacgccauuacaacuauacuugcugcagugacgcugugcuucgccagcucccagaauaucaccgaagaguuuuaccaaucuacauguucagcggucaguaaaggcuauuugggggcuuuaagaacuggaugguacaccagcguuauuacaaucgaacuguccaacauuaaggagaucaaaugcaaugguaccgacgccaaggugaaacuaauaaagcaggaacucgauaaguauaaaaacgcaguaacugaccugcagcuucugaugcagucuacuccugccgcuggcucggggucagcaaucuguagcggaauugccgugugcaaggucuugcaccucgagggcgaggugaauaaaaucaagaacgcucugcugaguaccaauaaagccguugugucccucucuaacggugucagcguguuaacguucaagguacuggaucuuaagaauuacauugacaaacaauugcugccaauccuaaacaagcaguccuguucaauaccgaauauugaaacuguuaucgaguuucagcagaaaaacaauaggcuccuggaaauuacccgggaguucagugugaacgcgggggucacaacucccgugagcaccuauaugcuuacaaauucugagcuguugucccucaucaacgauaugccuaucaccaacgaccaaaagaaacugaugucaaauaacgugcagauuguccgccagcagagcuacaguauaaugugcaucauuaaggaagagguuuuagcauaugugguacaacugccacucuacggagugaucgauacgcccuguuggaaacuucauacuucuccucugugcacaaccaauacuaaggaaggcuccaacauauguuugacacgaaccgaccguggcugguacugcgauaaugccgggagcgucucguuuuucccacaggcugagacguguaaggugcagucuaacagaguuuucugcgacaccaugaacucccuaacacugcccucagaagugaaucucugcaauauugauaucuucaacccuaaauaugacuguaagaucaugacaaguaaaaccgaugucagcuccucugugauuacaagccugggagccaucguaucaugcuacgguaagacuaaauguaccgcaaguaauaagaacaggggcauuauaaagacauuuuccaaugggugcgacuauguuagcaacaaaggaguggacaccgucucugugggcaauacucuuuacugugucaacaagcaagagggucagucacuguaugugaaaggggagccaaucauuaacuucuacgauccguugguuuuucccagugacgaauuugaugcuagcaucucccaggugaaugagaagaucaaccagucucucgccuuuauucggaaaucggacgaacuguuacacaauguaaacgucggaaagagcacgacaaauauaaugaucaccacuauuaucauugugaucauaguuauccugcuacuccugauugcggugggccuuuucuuguauugcaaggcccgcuccaccccugucacacugucaaaagaucaacucaguggcaucaacaauauugcauucucuaacugaggacuaguggaagcauuuuccuggcugauuaaaagaaauuacucagcuauggucaucuguuccuguuagaaggcuaugcagcauauuauauacuaugcgcauguuaugaaaugcauaauaaaaaauuuuaaaaaaucuaaaagaucuaaaaaaaaaaaaaaaaaaaaaaaaaaaaaaaaaaaaaaaaaaaaaaaaaaaaaaaaaaaaaaaaugcaucccccccccccccccccccccccccccccccaaaggcucuuuucagagccaccagaauu

SEQ ID NO: 15573 - RNA, 1960 nt, Artificial Sequence
  mRNA product Design d-4 comprising derived and/or modified sequence from HRSV(Memphis-37)__AIY60640.1__F_DSCav1_mut3 (opt4)
gggagagucccgcagucggcguccagcggcucugcuuguucgugugugugucguugcaggccuuauucaagcuuaccauggagcugcccauccugaagaccaacgccaucaccaccauccuggccgccgugacccugugcuucgccagcagccagaacaucaccgaggaguucuaccagagcaccugcagcgccgugagcaagggcuaccugggcgcccugagaaccggcugguacaccagcgugaucaccaucgagcugagcaacaucaaggagaucaagugcaacggcaccgacgccaaggugaagcugaucaagcaggagcuggacaaguacaagaacgccgugaccgaccugcagcugcugaugcagagcacccccgccgccggcagcggcagcgccaucugcagcggcaucgccgugugcaaggugcugcaccuggagggcgaggugaacaagaucaagaacgcccugcugagcaccaacaaggccguggugagccugagcaacggcgugagcgugcugaccuucaaggugcuggaccugaagaacuacaucgacaagcagcugcugcccauccugaacaagcagagcugcagcauccccaacaucgagaccgugaucgaguuccagcagaagaacaacagacugcuggagaucaccagagaguucagcgugaacgccggcgugaccacccccgugagcaccuacaugcugaccaacagcgagcugcugagccugaucaacgacaugcccaucaccaacgaccagaagaagcugaugagcaacaacgugcagaucgugagacagcagagcuacagcaucaugugcaucaucaaggaggaggugcuggccuacguggugcagcugccccuguacggcgugaucgacacccccugcuggaagcugcacaccagcccccugugcaccaccaacaccaaggagggcagcaacaucugccugaccagaaccgacagaggcugguacugcgacaacgccggcagcgugagcuucuucccccaggccgagaccugcaaggugcagagcaacagaguguucugcgacaccaugaacagccugacccugcccagcgaggugaaccugugcaacaucgacaucuucaaccccaaguacgacugcaagaucaugaccagcaagaccgacgugagcagcagcgugaucaccagccugggcgccaucgugagcugcuacggcaagaccaagugcaccgccagcaacaagaacagaggcaucaucaagaccuucagcaacggcugcgacuacgugagcaacaagggcguggacaccgugagcgugggcaacacccuguacugcgugaacaagcaggagggccagagccuguacgugaagggcgagcccaucaucaacuucuacgacccccugguguuccccagcgacgaguucgacgccagcaucagccaggugaacgagaagaucaaccagagccuggccuucaucagaaagagcgacgagcugcugcacaacgugaacgugggcaagagcaccaccaacaucaugaucaccaccaucaucaucgugaucaucgugauccugcugcugcugaucgccgugggccuguuccuguacugcaaggccagaagcacccccgugacccugagcaaggaccagcugagcggcaucaacaacaucgccuucagcaacugaggacuaguggaagcauuuuccuggcugauuaaaagaaauuacucagcuauggucaucuguuccuguuagaaggcuaugcagcauauuauauacuaugcgcauguuaugaaaugcauaauaaaaaauuuuaaaaaaucuaaaagaucuaaaaaaaaaaaaaaaaaaaaaaaaaaaaaaaaaaaaaaaaaaaaaaaaaaaaaaaaaaaaaaaaugcaucccccccccccccccccccccccccccccccaaaggcucuuuucagagccaccagaauu

SEQ ID NO: 15574 - RNA, 1960 nt, Artificial Sequence
  mRNA product Design d-4 comprising derived and/or modified sequence from HRSV(Memphis-37)__AIY60640.1__F_DSCav1_mut3 (opt5)
gggagagucccgcagucggcguccagcggcucugcuuguucgugugugugucguugcaggccuuauucaagcuuaccauggagcugcccauccucaagaccaacgccauuacaacgauccuggcugccgugacccuuugcuucgcgagcucccagaauauuacagaagaguuuuaccaaucuaccuguagcgcugucuccaaaggcuaucugggggcccucagaacaggaugguacaccucuguuaucacaauugaacugagcaacaucaaggagaucaaaugcaauggcaccgacgccaaggugaaacuuauuaagcaggaacuggauaaguauaaaaacgcugugacggaccuccagcugcugaugcaguccaccccugccgcugggucuggaagcgccaucuguuccggcauugcggucugcaaggugcuccaccuggagggggagguuaauaaaaucaagaacgcccuucugagcacaaauaaagcuguggucucucucuccaacggagugagcguucugaccuucaaggugcuugaucugaagaauuacauugacaaacaacuccugccgauccugaacaagcagucuuguuccauucccaauaucgaaacagucaucgaguuucagcagaaaaacaaucggcuccuggaaauuacccgcgaguucagcgugaacgccggcgugacgacaccugucucuaccuauaugcuuacaaauuccgagcugcucagccugaucaacgauaugcccauuaccaacgaccaaaagaaacuuauguccaauaacguucagaucgugagacagcagucuuacagcauuaugugcaucaucaaggaagaggugcuggcuuaugucgugcaacucccucuguacggcguuauugauacccccuguuggaaacugcauacauccccucucugcacgaccaauacaaaggaagggagcaacaucugucugacccggacagaccgcggaugguacugcgauaaugccggcucuguguccuuuuucccgcaggcggagaccuguaagguccagagcaacagaguguuuugcgacacgaugaacucucuuacacugcccagcgaaguuaaucucugcaauauugauaucuucaacccuaaauaugacuguaagauuaugaccuccaaaaccgaugugucuagcuccgucaucacaagccugggggccaucgugucuugcuacggaaagaccaaauguacagcuuccaauaagaaccggggcauuaucaagacguuuagcaaugggugcgacuaugucucuaacaaaggaguggacaccguuuccgugggcaauacacuuuacugugucaacaagcaagagggccagagccuguaugugaaaggggagcccauuaucaacuucuacgauccucucguuuuucccuccgacgaguucgaugccucuauuagccaggugaaugaaaagaucaaccagucccuggcuuuuauucgcaaaucugacgaacugcuccacaaugucaacgugggaaagagcaccacaaauaucaugaucaccacgauuaucauugugaucauuguuauccugcuucugcucaucgccgucggccuguuccuguauugcaaggccagauccaccccggugacacuuagcaaagaucaacucucugggauuaacaauaucgcuuucuccaacugaggacuaguggaagcauuuuccuggcugauuaaaagaaauuacucagcuauggucaucuguuccuguuagaaggcuaugcagcauauuauauacuaugcgcauguuaugaaaugcauaauaaaaaauuuuaaaaaaucuaaaagaucuaaaaaaaaaaaaaaaaaaaaaaaaaaaaaaaaaaaaaaaaaaaaaaaaaaaaaaaaaaaaaaaaugcaucccccccccccccccccccccccccccccccaaaggcucuuuucagagccaccagaauu

SEQ ID NO: 15575 - RNA, 1960 nt, Artificial Sequence
  mRNA product Design d-4 comprising derived and/or modified sequence from HRSV(Memphis-37)__AIY60640.1__F_DSCav1_mut3 (opt6)
gggagagucccgcagucggcguccagcggcucugcuuguucgugugugugucguugcaggccuuauucaagcuuaccauggaauuaccaauacuaaaaacaaaugccaucaccaccauccuggccgccguaacauuaugcuucgcaaguucacaaaauauaacagaagaauuuuaucaaucaacuugcagcgccguaucaaaaggcuacuuaggcgcacuacguacaggaugguacacaucaguaauaaccauagaacuauccaauauuaaagaaauaaaaugcaauggaacagacgcaaaaguuaaacuaauaaaacaagaauuagacaaauacaaaaacgcaguaaccgaccuucaauuacuaaugcaaucuacccccgcugcagguuccggaucagcaauauguucaggaauugcaguaugcaaaguccuacacuuagaaggagaaguaaacaaaauaaaaaacgcacuauuaagcaccaauaaagcagucguaucauuauccaacggcguuucaguacuaacauuuaaaguacuugaccuaaaaaacuauauagacaaacaacuacuucccauccuuaacaaacaaagcugcucaauaccuaauaucgaaacaguaauagaauuucaacaaaaaaacaaucgauuauuagaaaucacacgagaauuuucugucaacgcaggagucaccacacccguaucuacuuauauguuaaccaacucugaauuauuaucacuaaucaaugacaugccaauaacaaacgaucaaaaaaaauuaaugucaaauaacguacaaauaguaagacaacaaucauacucaauaaugugcauuauaaaagaagaaguacuagccuauguuguacaacucccacucuacggcguaauagacacaccaugcuggaaauuacacacuucaccacuaugcacaacaaacacaaaagaaggaucaaacaucugccuaaccagaaccgauagaggaugguauugcgacaaugccggaucaguuucauucuucccacaagcagaaacaugcaaaguacaauccaacagaguuuucugugacacaaugaacucgcuaacauuacccagcgaaguaaaccucugcaacauagacauauucaacccaaaauacgauugcaaaauaaugacuucuaaaacagauguuuccucaagcgucauaacgaguuuaggagcaauaguaagcuguuacggaaaaaccaaauguaccgcaucaaacaaaaaccgaggaauaauaaaaaccuuuucaaacggaugcgauuacgucuccaacaaaggagucgacacaguaucaguuggcaauacucuuuacugcguaaauaaacaagaaggacaaucacuauacguaaaaggcgaaccaauaauaaacuucuacgacccccucgucuucccuucagaugaauuugacgcaagcaucucacaaguuaaugaaaaaauaaaucaauccuuagcauucauacgaaaaucagacgaacuauuacacaacguaaacguaggaaaaucaacgacaaacauaaugauaacaacuaucauuauagucauaauagucauacuacuacuauuaauagccguaggcuuauuccuauacugcaaagcaagaucuacuccaguaacacucucaaaagaccaauuaucuggaauaaauaacauagcauucucuaauuaaggacuaguggaagcauuuuccuggcugauuaaaagaaauuacucagcuauggucaucuguuccuguuagaaggcuaugcagcauauuauauacuaugcgcauguuaugaaaugcauaauaaaaaauuuuaaaaaaucuaaaagaucuaaaaaaaaaaaaaaaaaaaaaaaaaaaaaaaaaaaaaaaaaaaaaaaaaaaaaaaaaaaaaaaaugcaucccccccccccccccccccccccccccccccaaaggcucuuuucagagccaccagaauu

SEQ ID NO: 15576 - RNA, 1960 nt, Artificial Sequence
  mRNA product Design d-4 comprising derived and/or modified sequence from HRSV(Memphis-37)__AIY60640.1__F_DSCav1_mut3 (opt11)
gggagagucccgcagucggcguccagcggcucugcuuguucgugugugugucguugcaggccuuauucaagcuuaccauggaacuccccauccucaaaaccaacgccauuaccacgauccucgccgcagucacccucugcuucgccuccucacaaaacaucacagaagaauuuuaccaaaguaccugcuccgccgucagcaaaggauaccucggcgcccuccgcaccggcugguacacauccgucauaaccaucgaacucagcaacaucaaagaaaucaaauguaacggaaccgacgccaaaguaaaacuaauaaaacaagaacucgacaaauacaagaacgccgucaccgaccuccaacuccucaugcaaucuacccccgccgccggcucagguagcgccaucugcagcgguauugccgucugcaaaguacuccaccuagaaggagaagucaauaaaaucaaaaacgcccuacucuccaccaacaaggcagucgucagccucuccaacggcgucucagucuuaaccuucaaagugcucgaccucaaaaauuacauagacaaacaacuacuccccauucucaacaaacaauccugcuccauacccaacauagaaaccgucauugaauuucaacagaaaaacaaccgccuccucgaaaucacgcgcgaguucagugucaacgccggcgucaccaccccagucucgacauacaugcucacaaacucagaacuccucucguuaaucaacgacaugccaauaaccaacgaccaaaagaaacuaauguccaacaacguucaaauaguucgccaacaaucauacuccauaaugugcaucaucaaagaagaaguccucgccuacguuguacaauuaccccucuacggcgucaucgacacaccaugcuggaaacuccacacaucgccccucugcaccaccaacaccaaagaaggcagcaacauuugccucacccggacagaccgcggcugguacugcgacaaugcaggcagcgucucauucuucccacaagccgaaaccugcaaaguccaaagcaaccgugucuucugcgacacaaugaacucccuuacccucccaagcgaaguaaaccucugcaauauugacaucuucaaccccaaauacgacugcaaaaucaugaccuccaaaaccgacgucuccucaucagucaucaccucccuuggcgccauugucuccuguuacgguaaaaccaaaugcaccgccuccaacaaaaaccgcggcaucaucaaaaccuucucuaacggcugcgacuacgucucaaacaaaggcgucgacacugucuccgucggcaacacccuauacugcgucaacaagcaagaaggacagucccuauacguaaaaggugaaccaauuaucaacuucuacgacccccuagucuucccauccgacgaguucgaugccuccaucucccaaguaaaugaaaagaucaaucaaagccuggccuucauccgcaaauccgacgaacuacuccacaaugucaacgucggaaaaucaacaacaaacaucaugaucaccaccaucaucaucgucaucauaguaauccuccuacugcucaucgccgucggucucuuccuauacugcaaagcccguucuacuccagucacccucuccaaagaccaacuaucaggaaucaacaacaucgccuucagcaacuaaggacuaguggaagcauuuuccuggcugauuaaaagaaauuacucagcuauggucaucuguuccuguuagaaggcuaugcagcauauuauauacuaugcgcauguuaugaaaugcauaauaaaaaauuuuaaaaaaucuaaaagaucuaaaaaaaaaaaaaaaaaaaaaaaaaaaaaaaaaaaaaaaaaaaaaaaaaaaaaaaaaaaaaaaaugcaucccccccccccccccccccccccccccccccaaaggcucuuuucagagccaccagaauu

SEQ ID NO: 15577 - RNA, 2057 nt, Artificial Sequence
  mRNA product Design d-5 comprising derived and/or modified sequence from HRSV(Memphis-37)__AIY60640.1__F_DSCav1_mut3 (opt1)
gggagagggcgcuuggcuugcaaggacccugagcugcggcauugaagcacacccaacccaacucgacugaagucagccucacugaaccggaucugagaaucuucucucucugggcuugccagggcucuccgaaccuagcuagcauccucuucaauuccaacuagaaagcuuaccauggagcugcccauccucaagaccaacgccaucaccacgauccuggccgcggugacccugugcuucgccagcucccagaacaucaccgaggaguucuaccagagcacgugcuccgccgucagcaagggcuaccucggcgcccugcgcaccgggugguacaccagcgugaucaccaucgagcuguccaacaucaaggagaucaagugcaacggcaccgacgccaaggugaagcucaucaagcaggagcuggacaaguacaagaacgcggucacggaccugcagcuccugaugcagagcaccccggccgccggcuccgggagcgcgaucugcuccggcaucgccgucugcaaggugcugcaccucgagggcgaggugaacaagaucaagaacgcccugcuguccaccaacaaggccgucgugagccucuccaacggggugagcguccugaccuucaaggugcuggaccucaagaacuacaucgacaagcagcugcugcccauccugaacaagcagagcugcuccauccccaacaucgagaccgucaucgaguuccagcagaagaacaaccgccuccuggagaucacgcgggaguucagcgugaacgcgggcgugaccacccccgucuccaccuacaugcugacgaacagcgagcuccugucccugaucaacgacaugccgaucaccaacgaccagaagaagcucaugagcaacaacgugcagaucgugcgccagcaguccuacagcaucaugugcaucaucaaggaggagguccuggccuacguggugcagcugccccucuacggggucaucgacacccccugcuggaagcugcacaccagcccccugugcacgaccaacaccaaggagggcuccaacaucugccucacccggacggaccgcgggugguacugcgacaacgccggcagcguguccuucuucccgcaggccgagaccugcaagguccagagcaaccggguguucugcgacaccaugaacucccugacccugcccagcgaggugaaccucugcaacaucgacaucuucaaccccaaguacgacugcaagaucaugacguccaagaccgacgucagcuccagcgugaucaccucccugggcgccaucgugagcugcuacgggaagaccaagugcacggcgagcaacaagaaccgcggcaucaucaagaccuucuccaacgggugcgacuacgucagcaacaagggcguggacaccguguccgucggcaacacccuguacugcgugaacaagcaggagggccagagccucuacgugaagggggagcccaucaucaacuucuacgacccgcuggucuuccccuccgacgaguucgacgccagcaucucccaggugaacgagaagaucaaccagagccuggccuucauccggaaguccgacgagcuccugcacaacgugaacgucggcaagagcaccacgaacaucaugaucaccaccaucaucaucgugaucaucgugauccugcugcuccugaucgccgucgggcuguuccucuacugcaaggcccgcuccacccccgugacgcugagcaaggaccagcuguccgggaucaacaacaucgcguucagcaacugaggacuaguggaagcauuuuccuggcugauuaaaagaaauuacucagcuauggucaucuguuccuguuagaaggcuaugcagcauauuauauacuaugcgcauguuaugaaaugcauaauaaaaaauuuuaaaaaaucuaaaagaucuaaaaaaaaaaaaaaaaaaaaaaaaaaaaaaaaaaaaaaaaaaaaaaaaaaaaaaaaaaaaaaaaugcaucccccccccccccccccccccccccccccccaaaggcucuuuucagagccaccagaauu

SEQ ID NO: 15578 - RNA, 2057 nt, Artificial Sequence
  mRNA product Design d-5 comprising derived and/or modified sequence from HRSV(Memphis-37)__AIY60640.1__F_DSCav1_mut3 (opt1)
gggagagggcgcuuggcuugcaaggacccugagcugcggcauugaagcacacccaacccaacucgacugaagucagccucacugaaccggaucugagaaucuucucucucugggcuugccagggcucuccgaaccuagcuagcauccucuucaauuccaacuagaaagcuuaccauggagcugcccauccucaagaccaacgccaucaccacgauccuggccgcggugacccugugcuucgccagcucccagaacaucaccgaggaguucuaccagagcacgugcuccgccgucagcaagggcuaccucggggcccugcgcaccggcugguacaccuccgugaucaccaucgagcugagcaacaucaaggagaucaagugcaacgggaccgacgccaaggugaagcucaucaagcaggagcuggacaaguacaagaacgcggucacggaccugcagcuccugaugcaguccaccccggccgccggcagcggguccgccaucugcagcggcaucgcggugugcaaggugcugcaccucgagggcgaggucaacaagaucaagaacgcccugcuguccaccaacaaggccguggugagccucuccaacggggucagcgugcugaccuucaaggugcuggaccucaagaacuacaucgacaagcagcugcugcccauccucaacaagcaguccugcagcauccccaacaucgagacggucaucgaguuccagcagaagaacaaccggcugcuggagaucacccgcgaguucuccgugaacgccggcgugaccacccccgucagcacguacaugcucaccaacuccgagcugcugagccucaucaacgacaugccgaucaccaacgaccagaagaagcugaugagcaacaacgugcagaucgugcggcagcaguccuacagcaucaugugcaucaucaaggaggagguccuggccuacguggugcagcucccccuguacggggucaucgacacccccugcuggaagcugcacacgagcccccucugcaccaccaacaccaaggagggcuccaacaucugccugacgcgcaccgaccgggggugguacugcgacaacgcgggcuccgugagcuucuucccgcaggccgagaccugcaaggugcaguccaaccgcgucuucugcgacaccaugaacagccugacgcuccccuccgaggugaaccugugcaacaucgacaucuucaaccccaaguacgacugcaagaucaugaccagcaagaccgacgucuccagcuccgugaucaccagccugggcgccaucguguccugcuacgggaagacgaagugcaccgccagcaacaagaaccggggcaucaucaagaccuucuccaacgggugcgacuacgucagcaacaagggcguggacaccguguccgucggcaacacgcucuacugcgugaacaagcaggaggggcagagccuguacgugaagggcgagcccaucaucaacuucuacgacccgcuggucuuccccagcgacgaguucgacgccuccaucagccaggugaacgagaagaucaaccagucccucgcguucauccgcaagagcgacgagcugcugcacaacgugaacgucgggaaguccaccaccaacaucaugaucaccaccaucaucaucgugaucaucgugauccuccugcugcucaucgccgucggccuguuccuguacugcaaggcccggagcacgcccgugacccuguccaaggaccagcucagcgggaucaacaacaucgccuucuccaacugaggacuaguggaagcauuuuccuggcugauuaaaagaaauuacucagcuauggucaucuguuccuguuagaaggcuaugcagcauauuauauacuaugcgcauguuaugaaaugcauaauaaaaaauuuuaaaaaaucuaaaagaucuaaaaaaaaaaaaaaaaaaaaaaaaaaaaaaaaaaaaaaaaaaaaaaaaaaaaaaaaaaaaaaaaugcaucccccccccccccccccccccccccccccccaaaggcucuuuucagagccaccagaauu

SEQ ID NO: 15579 - RNA, 2057 nt, Artificial Sequence
  mRNA product Design d-5 comprising derived and/or modified sequence from HRSV(Memphis-37)__AIY60640.1__F_DSCav1_mut3 (opt2)
gggagagggcgcuuggcuugcaaggacccugagcugcggcauugaagcacacccaacccaacucgacugaagucagccucacugaaccggaucugagaaucuucucucucugggcuugccagggcucuccgaaccuagcuagcauccucuucaauuccaacuagaaagcuuaccauggagcuccccauccucaagaccaacgccaucaccaccauccucgccgccgucacccucugcuucgccuccucccagaacaucaccgaggaguucuaccaguccaccugcuccgccgucuccaagggcuaccucggcgcccuccgcaccggcugguacaccuccgucaucaccaucgagcucuccaacaucaaggagaucaagugcaacggcaccgacgccaaggucaagcucaucaagcaggagcucgacaaguacaagaacgccgucaccgaccuccagcuccucaugcaguccacccccgccgccggcuccggcuccgccaucugcuccggcaucgccgucugcaagguccuccaccucgagggcgaggucaacaagaucaagaacgcccuccucuccaccaacaaggccgucgucucccucuccaacggcgucuccguccucaccuucaagguccucgaccucaagaacuacaucgacaagcagcuccuccccauccucaacaagcaguccugcuccauccccaacaucgagaccgucaucgaguuccagcagaagaacaaccgccuccucgagaucacccgcgaguucuccgucaacgccggcgucaccacccccgucuccaccuacaugcucaccaacuccgagcuccucucccucaucaacgacaugcccaucaccaacgaccagaagaagcucauguccaacaacguccagaucguccgccagcaguccuacuccaucaugugcaucaucaaggaggagguccucgccuacgucguccagcucccccucuacggcgucaucgacacccccugcuggaagcuccacaccuccccccucugcaccaccaacaccaaggagggcuccaacaucugccucacccgcaccgaccgcggcugguacugcgacaacgccggcuccgucuccuucuucccccaggccgagaccugcaagguccaguccaaccgcgucuucugcgacaccaugaacucccucacccuccccuccgaggucaaccucugcaacaucgacaucuucaaccccaaguacgacugcaagaucaugaccuccaagaccgacgucuccuccuccgucaucaccucccucggcgccaucgucuccugcuacggcaagaccaagugcaccgccuccaacaagaaccgcggcaucaucaagaccuucuccaacggcugcgacuacgucuccaacaagggcgucgacaccgucuccgucggcaacacccucuacugcgucaacaagcaggagggccagucccucuacgucaagggcgagcccaucaucaacuucuacgacccccucgucuuccccuccgacgaguucgacgccuccaucucccaggucaacgagaagaucaaccagucccucgccuucauccgcaaguccgacgagcuccuccacaacgucaacgucggcaaguccaccaccaacaucaugaucaccaccaucaucaucgucaucaucgucauccuccuccuccucaucgccgucggccucuuccucuacugcaaggcccgcuccacccccgucacccucuccaaggaccagcucuccggcaucaacaacaucgccuucuccaacugaggacuaguggaagcauuuuccuggcugauuaaaagaaauuacucagcuauggucaucuguuccuguuagaaggcuaugcagcauauuauauacuaugcgcauguuaugaaaugcauaauaaaaaauuuuaaaaaaucuaaaagaucuaaaaaaaaaaaaaaaaaaaaaaaaaaaaaaaaaaaaaaaaaaaaaaaaaaaaaaaaaaaaaaaaugcaucccccccccccccccccccccccccccccccaaaggcucuuuucagagccaccagaauu

SEQ ID NO: 15580 - RNA, 2057 nt, Artificial Sequence
  mRNA product Design d-5 comprising derived and/or modified sequence from HRSV(Memphis-37)__AIY60640.1__F_DSCav1_mut3 (opt3)
gggagagggcgcuuggcuugcaaggacccugagcugcggcauugaagcacacccaacccaacucgacugaagucagccucacugaaccggaucugagaaucuucucucucugggcuugccagggcucuccgaaccuagcuagcauccucuucaauuccaacuagaaagcuuaccauggagcugcccauccucaagaccaacgccauuacaacuauacuugcugcagugacgcugugcuucgccagcucccagaauaucaccgaagaguuuuaccaaucuacauguucagcggucaguaaaggcuauuugggggcuuuaagaacuggaugguacaccagcguuauuacaaucgaacuguccaacauuaaggagaucaaaugcaaugguaccgacgccaaggugaaacuaauaaagcaggaacucgauaaguauaaaaacgcaguaacugaccugcagcuucugaugcagucuacuccugccgcuggcucggggucagcaaucuguagcggaauugccgugugcaaggucuugcaccucgagggcgaggugaauaaaaucaagaacgcucugcugaguaccaauaaagccguugugucccucucuaacggugucagcguguuaacguucaagguacuggaucuuaagaauuacauugacaaacaauugcugccaauccuaaacaagcaguccuguucaauaccgaauauugaaacuguuaucgaguuucagcagaaaaacaauaggcuccuggaaauuacccgggaguucagugugaacgcgggggucacaacucccgugagcaccuauaugcuuacaaauucugagcuguugucccucaucaacgauaugccuaucaccaacgaccaaaagaaacugaugucaaauaacgugcagauuguccgccagcagagcuacaguauaaugugcaucauuaaggaagagguuuuagcauaugugguacaacugccacucuacggagugaucgauacgcccuguuggaaacuucauacuucuccucugugcacaaccaauacuaaggaaggcuccaacauauguuugacacgaaccgaccguggcugguacugcgauaaugccgggagcgucucguuuuucccacaggcugagacguguaaggugcagucuaacagaguuuucugcgacaccaugaacucccuaacacugcccucagaagugaaucucugcaauauugauaucuucaacccuaaauaugacuguaagaucaugacaaguaaaaccgaugucagcuccucugugauuacaagccugggagccaucguaucaugcuacgguaagacuaaauguaccgcaaguaauaagaacaggggcauuauaaagacauuuuccaaugggugcgacuauguuagcaacaaaggaguggacaccgucucugugggcaauacucuuuacugugucaacaagcaagagggucagucacuguaugugaaaggggagccaaucauuaacuucuacgauccguugguuuuucccagugacgaauuugaugcuagcaucucccaggugaaugagaagaucaaccagucucucgccuuuauucggaaaucggacgaacuguuacacaauguaaacgucggaaagagcacgacaaauauaaugaucaccacuauuaucauugugaucauaguuauccugcuacuccugauugcggugggccuuuucuuguauugcaaggcccgcuccaccccugucacacugucaaaagaucaacucaguggcaucaacaauauugcauucucuaacugaggacuaguggaagcauuuuccuggcugauuaaaagaaauuacucagcuauggucaucuguuccuguuagaaggcuaugcagcauauuauauacuaugcgcauguuaugaaaugcauaauaaaaaauuuuaaaaaaucuaaaagaucuaaaaaaaaaaaaaaaaaaaaaaaaaaaaaaaaaaaaaaaaaaaaaaaaaaaaaaaaaaaaaaaaugcaucccccccccccccccccccccccccccccccaaaggcucuuuucagagccaccagaauu

SEQ ID NO: 15581 - RNA, 2057 nt, Artificial Sequence
  mRNA product Design d-5 comprising derived and/or modified sequence from HRSV(Memphis-37)__AIY60640.1__F_DSCav1_mut3 (opt4)
gggagagggcgcuuggcuugcaaggacccugagcugcggcauugaagcacacccaacccaacucgacugaagucagccucacugaaccggaucugagaaucuucucucucugggcuugccagggcucuccgaaccuagcuagcauccucuucaauuccaacuagaaagcuuaccauggagcugcccauccugaagaccaacgccaucaccaccauccuggccgccgugacccugugcuucgccagcagccagaacaucaccgaggaguucuaccagagcaccugcagcgccgugagcaagggcuaccugggcgcccugagaaccggcugguacaccagcgugaucaccaucgagcugagcaacaucaaggagaucaagugcaacggcaccgacgccaaggugaagcugaucaagcaggagcuggacaaguacaagaacgccgugaccgaccugcagcugcugaugcagagcacccccgccgccggcagcggcagcgccaucugcagcggcaucgccgugugcaaggugcugcaccuggagggcgaggugaacaagaucaagaacgcccugcugagcaccaacaaggccguggugagccugagcaacggcgugagcgugcugaccuucaaggugcuggaccugaagaacuacaucgacaagcagcugcugcccauccugaacaagcagagcugcagcauccccaacaucgagaccgugaucgaguuccagcagaagaacaacagacugcuggagaucaccagagaguucagcgugaacgccggcgugaccacccccgugagcaccuacaugcugaccaacagcgagcugcugagccugaucaacgacaugcccaucaccaacgaccagaagaagcugaugagcaacaacgugcagaucgugagacagcagagcuacagcaucaugugcaucaucaaggaggaggugcuggccuacguggugcagcugccccuguacggcgugaucgacacccccugcuggaagcugcacaccagcccccugugcaccaccaacaccaaggagggcagcaacaucugccugaccagaaccgacagaggcugguacugcgacaacgccggcagcgugagcuucuucccccaggccgagaccugcaaggugcagagcaacagaguguucugcgacaccaugaacagccugacccugcccagcgaggugaaccugugcaacaucgacaucuucaaccccaaguacgacugcaagaucaugaccagcaagaccgacgugagcagcagcgugaucaccagccugggcgccaucgugagcugcuacggcaagaccaagugcaccgccagcaacaagaacagaggcaucaucaagaccuucagcaacggcugcgacuacgugagcaacaagggcguggacaccgugagcgugggcaacacccuguacugcgugaacaagcaggagggccagagccuguacgugaagggcgagcccaucaucaacuucuacgacccccugguguuccccagcgacgaguucgacgccagcaucagccaggugaacgagaagaucaaccagagccuggccuucaucagaaagagcgacgagcugcugcacaacgugaacgugggcaagagcaccaccaacaucaugaucaccaccaucaucaucgugaucaucgugauccugcugcugcugaucgccgugggccuguuccuguacugcaaggccagaagcacccccgugacccugagcaaggaccagcugagcggcaucaacaacaucgccuucagcaacugaggacuaguggaagcauuuuccuggcugauuaaaagaaauuacucagcuauggucaucuguuccuguuagaaggcuaugcagcauauuauauacuaugcgcauguuaugaaaugcauaauaaaaaauuuuaaaaaaucuaaaagaucuaaaaaaaaaaaaaaaaaaaaaaaaaaaaaaaaaaaaaaaaaaaaaaaaaaaaaaaaaaaaaaaaugcaucccccccccccccccccccccccccccccccaaaggcucuuuucagagccaccagaauu

SEQ ID NO: 15582 - RNA, 2057 nt, Artificial Sequence
  mRNA product Design d-5 comprising derived and/or modified sequence from HRSV(Memphis-37)__AIY60640.1__F_DSCav1_mut3 (opt5)
gggagagggcgcuuggcuugcaaggacccugagcugcggcauugaagcacacccaacccaacucgacugaagucagccucacugaaccggaucugagaaucuucucucucugggcuugccagggcucuccgaaccuagcuagcauccucuucaauuccaacuagaaagcuuaccauggagcugcccauccucaagaccaacgccauuacaacgauccuggcugccgugacccuuugcuucgcgagcucccagaauauuacagaagaguuuuaccaaucuaccuguagcgcugucuccaaaggcuaucugggggcccucagaacaggaugguacaccucuguuaucacaauugaacugagcaacaucaaggagaucaaaugcaauggcaccgacgccaaggugaaacuuauuaagcaggaacuggauaaguauaaaaacgcugugacggaccuccagcugcugaugcaguccaccccugccgcugggucuggaagcgccaucuguuccggcauugcggucugcaaggugcuccaccuggagggggagguuaauaaaaucaagaacgcccuucugagcacaaauaaagcuguggucucucucuccaacggagugagcguucugaccuucaaggugcuugaucugaagaauuacauugacaaacaacuccugccgauccugaacaagcagucuuguuccauucccaauaucgaaacagucaucgaguuucagcagaaaaacaaucggcuccuggaaauuacccgcgaguucagcgugaacgccggcgugacgacaccugucucuaccuauaugcuuacaaauuccgagcugcucagccugaucaacgauaugcccauuaccaacgaccaaaagaaacuuauguccaauaacguucagaucgugagacagcagucuuacagcauuaugugcaucaucaaggaagaggugcuggcuuaugucgugcaacucccucuguacggcguuauugauacccccuguuggaaacugcauacauccccucucugcacgaccaauacaaaggaagggagcaacaucugucugacccggacagaccgcggaugguacugcgauaaugccggcucuguguccuuuuucccgcaggcggagaccuguaagguccagagcaacagaguguuuugcgacacgaugaacucucuuacacugcccagcgaaguuaaucucugcaauauugauaucuucaacccuaaauaugacuguaagauuaugaccuccaaaaccgaugugucuagcuccgucaucacaagccugggggccaucgugucuugcuacggaaagaccaaauguacagcuuccaauaagaaccggggcauuaucaagacguuuagcaaugggugcgacuaugucucuaacaaaggaguggacaccguuuccgugggcaauacacuuuacugugucaacaagcaagagggccagagccuguaugugaaaggggagcccauuaucaacuucuacgauccucucguuuuucccuccgacgaguucgaugccucuauuagccaggugaaugaaaagaucaaccagucccuggcuuuuauucgcaaaucugacgaacugcuccacaaugucaacgugggaaagagcaccacaaauaucaugaucaccacgauuaucauugugaucauuguuauccugcuucugcucaucgccgucggccuguuccuguauugcaaggccagauccaccccggugacacuuagcaaagaucaacucucugggauuaacaauaucgcuuucuccaacugaggacuaguggaagcauuuuccuggcugauuaaaagaaauuacucagcuauggucaucuguuccuguuagaaggcuaugcagcauauuauauacuaugcgcauguuaugaaaugcauaauaaaaaauuuuaaaaaaucuaaaagaucuaaaaaaaaaaaaaaaaaaaaaaaaaaaaaaaaaaaaaaaaaaaaaaaaaaaaaaaaaaaaaaaaugcaucccccccccccccccccccccccccccccccaaaggcucuuuucagagccaccagaauu

SEQ ID NO: 15583 - RNA, 2057 nt, Artificial Sequence
  mRNA product Design d-5 comprising derived and/or modified sequence from HRSV(Memphis-37)__AIY60640.1__F_DSCav1_mut3 (opt6)
gggagagggcgcuuggcuugcaaggacccugagcugcggcauugaagcacacccaacccaacucgacugaagucagccucacugaaccggaucugagaaucuucucucucugggcuugccagggcucuccgaaccuagcuagcauccucuucaauuccaacuagaaagcuuaccauggaauuaccaauacuaaaaacaaaugccaucaccaccauccuggccgccguaacauuaugcuucgcaaguucacaaaauauaacagaagaauuuuaucaaucaacuugcagcgccguaucaaaaggcuacuuaggcgcacuacguacaggaugguacacaucaguaauaaccauagaacuauccaauauuaaagaaauaaaaugcaauggaacagacgcaaaaguuaaacuaauaaaacaagaauuagacaaauacaaaaacgcaguaaccgaccuucaauuacuaaugcaaucuacccccgcugcagguuccggaucagcaauauguucaggaauugcaguaugcaaaguccuacacuuagaaggagaaguaaacaaaauaaaaaacgcacuauuaagcaccaauaaagcagucguaucauuauccaacggcguuucaguacuaacauuuaaaguacuugaccuaaaaaacuauauagacaaacaacuacuucccauccuuaacaaacaaagcugcucaauaccuaauaucgaaacaguaauagaauuucaacaaaaaaacaaucgauuauuagaaaucacacgagaauuuucugucaacgcaggagucaccacacccguaucuacuuauauguuaaccaacucugaauuauuaucacuaaucaaugacaugccaauaacaaacgaucaaaaaaaauuaaugucaaauaacguacaaauaguaagacaacaaucauacucaauaaugugcauuauaaaagaagaaguacuagccuauguuguacaacucccacucuacggcguaauagacacaccaugcuggaaauuacacacuucaccacuaugcacaacaaacacaaaagaaggaucaaacaucugccuaaccagaaccgauagaggaugguauugcgacaaugccggaucaguuucauucuucccacaagcagaaacaugcaaaguacaauccaacagaguuuucugugacacaaugaacucgcuaacauuacccagcgaaguaaaccucugcaacauagacauauucaacccaaaauacgauugcaaaauaaugacuucuaaaacagauguuuccucaagcgucauaacgaguuuaggagcaauaguaagcuguuacggaaaaaccaaauguaccgcaucaaacaaaaaccgaggaauaauaaaaaccuuuucaaacggaugcgauuacgucuccaacaaaggagucgacacaguaucaguuggcaauacucuuuacugcguaaauaaacaagaaggacaaucacuauacguaaaaggcgaaccaauaauaaacuucuacgacccccucgucuucccuucagaugaauuugacgcaagcaucucacaaguuaaugaaaaaauaaaucaauccuuagcauucauacgaaaaucagacgaacuauuacacaacguaaacguaggaaaaucaacgacaaacauaaugauaacaacuaucauuauagucauaauagucauacuacuacuauuaauagccguaggcuuauuccuauacugcaaagcaagaucuacuccaguaacacucucaaaagaccaauuaucuggaauaaauaacauagcauucucuaauuaaggacuaguggaagcauuuuccuggcugauuaaaagaaauuacucagcuauggucaucuguuccuguuagaaggcuaugcagcauauuauauacuaugcgcauguuaugaaaugcauaauaaaaaauuuuaaaaaaucuaaaagaucuaaaaaaaaaaaaaaaaaaaaaaaaaaaaaaaaaaaaaaaaaaaaaaaaaaaaaaaaaaaaaaaaugcaucccccccccccccccccccccccccccccccaaaggcucuuuucagagccaccagaauu

SEQ ID NO: 15584 - RNA, 2057 nt, Artificial Sequence
  mRNA product Design d-5 comprising derived and/or modified sequence from HRSV(Memphis-37)__AIY60640.1__F_DSCav1_mut3 (opt11)
gggagagggcgcuuggcuugcaaggacccugagcugcggcauugaagcacacccaacccaacucgacugaagucagccucacugaaccggaucugagaaucuucucucucugggcuugccagggcucuccgaaccuagcuagcauccucuucaauuccaacuagaaagcuuaccauggaacuccccauccucaaaaccaacgccauuaccacgauccucgccgcagucacccucugcuucgccuccucacaaaacaucacagaagaauuuuaccaaaguaccugcuccgccgucagcaaaggauaccucggcgcccuccgcaccggcugguacacauccgucauaaccaucgaacucagcaacaucaaagaaaucaaauguaacggaaccgacgccaaaguaaaacuaauaaaacaagaacucgacaaauacaagaacgccgucaccgaccuccaacuccucaugcaaucuacccccgccgccggcucagguagcgccaucugcagcgguauugccgucugcaaaguacuccaccuagaaggagaagucaauaaaaucaaaaacgcccuacucuccaccaacaaggcagucgucagccucuccaacggcgucucagucuuaaccuucaaagugcucgaccucaaaaauuacauagacaaacaacuacuccccauucucaacaaacaauccugcuccauacccaacauagaaaccgucauugaauuucaacagaaaaacaaccgccuccucgaaaucacgcgcgaguucagugucaacgccggcgucaccaccccagucucgacauacaugcucacaaacucagaacuccucucguuaaucaacgacaugccaauaaccaacgaccaaaagaaacuaauguccaacaacguucaaauaguucgccaacaaucauacuccauaaugugcaucaucaaagaagaaguccucgccuacguuguacaauuaccccucuacggcgucaucgacacaccaugcuggaaacuccacacaucgccccucugcaccaccaacaccaaagaaggcagcaacauuugccucacccggacagaccgcggcugguacugcgacaaugcaggcagcgucucauucuucccacaagccgaaaccugcaaaguccaaagcaaccgugucuucugcgacacaaugaacucccuuacccucccaagcgaaguaaaccucugcaauauugacaucuucaaccccaaauacgacugcaaaaucaugaccuccaaaaccgacgucuccucaucagucaucaccucccuuggcgccauugucuccuguuacgguaaaaccaaaugcaccgccuccaacaaaaaccgcggcaucaucaaaaccuucucuaacggcugcgacuacgucucaaacaaaggcgucgacacugucuccgucggcaacacccuauacugcgucaacaagcaagaaggacagucccuauacguaaaaggugaaccaauuaucaacuucuacgacccccuagucuucccauccgacgaguucgaugccuccaucucccaaguaaaugaaaagaucaaucaaagccuggccuucauccgcaaauccgacgaacuacuccacaaugucaacgucggaaaaucaacaacaaacaucaugaucaccaccaucaucaucgucaucauaguaauccuccuacugcucaucgccgucggucucuuccuauacugcaaagcccguucuacuccagucacccucuccaaagaccaacuaucaggaaucaacaacaucgccuucagcaacuaaggacuaguggaagcauuuuccuggcugauuaaaagaaauuacucagcuauggucaucuguuccuguuagaaggcuaugcagcauauuauauacuaugcgcauguuaugaaaugcauaauaaaaaauuuuaaaaaaucuaaaagaucuaaaaaaaaaaaaaaaaaaaaaaaaaaaaaaaaaaaaaaaaaaaaaaaaaaaaaaaaaaaaaaaaugcaucccccccccccccccccccccccccccccccaaaggcucuuuucagagccaccagaauu

SEQ ID NO: 15585 - RNA, 1937 nt, Artificial Sequence
  mRNA product Design e-1 comprising derived and/or modified sequence from HRSV(Memphis-37)__AIY60640.1__F_DSCav1_mut3 (opt1)
gggagaauauaagcguuggcggagcgucgguuguagcacucugcgcgcccgcucuucugcugcuguuugucuacuuccuccugcuuccccgccgccgccgccgccaucaagcuuaccauggagcugcccauccucaagaccaacgccaucaccacgauccuggccgcggugacccugugcuucgccagcucccagaacaucaccgaggaguucuaccagagcacgugcuccgccgucagcaagggcuaccucggcgcccugcgcaccgggugguacaccagcgugaucaccaucgagcuguccaacaucaaggagaucaagugcaacggcaccgacgccaaggugaagcucaucaagcaggagcuggacaaguacaagaacgcggucacggaccugcagcuccugaugcagagcaccccggccgccggcuccgggagcgcgaucugcuccggcaucgccgucugcaaggugcugcaccucgagggcgaggugaacaagaucaagaacgcccugcuguccaccaacaaggccgucgugagccucuccaacggggugagcguccugaccuucaaggugcuggaccucaagaacuacaucgacaagcagcugcugcccauccugaacaagcagagcugcuccauccccaacaucgagaccgucaucgaguuccagcagaagaacaaccgccuccuggagaucacgcgggaguucagcgugaacgcgggcgugaccacccccgucuccaccuacaugcugacgaacagcgagcuccugucccugaucaacgacaugccgaucaccaacgaccagaagaagcucaugagcaacaacgugcagaucgugcgccagcaguccuacagcaucaugugcaucaucaaggaggagguccuggccuacguggugcagcugccccucuacggggucaucgacacccccugcuggaagcugcacaccagcccccugugcacgaccaacaccaaggagggcuccaacaucugccucacccggacggaccgcgggugguacugcgacaacgccggcagcguguccuucuucccgcaggccgagaccugcaagguccagagcaaccggguguucugcgacaccaugaacucccugacccugcccagcgaggugaaccucugcaacaucgacaucuucaaccccaaguacgacugcaagaucaugacguccaagaccgacgucagcuccagcgugaucaccucccugggcgccaucgugagcugcuacgggaagaccaagugcacggcgagcaacaagaaccgcggcaucaucaagaccuucuccaacgggugcgacuacgucagcaacaagggcguggacaccguguccgucggcaacacccuguacugcgugaacaagcaggagggccagagccucuacgugaagggggagcccaucaucaacuucuacgacccgcuggucuuccccuccgacgaguucgacgccagcaucucccaggugaacgagaagaucaaccagagccuggccuucauccggaaguccgacgagcuccugcacaacgugaacgucggcaagagcaccacgaacaucaugaucaccaccaucaucaucgugaucaucgugauccugcugcuccugaucgccgucgggcuguuccucuacugcaaggcccgcuccacccccgugacgcugagcaaggaccagcuguccgggaucaacaacaucgcguucagcaacugaggacuaguguccaccugucccuccugggcugcuggauugucucguuuuccugccaaauaaacaggaucagcgcuuuacagaucuaaaaaaaaaaaaaaaaaaaaaaaaaaaaaaaaaaaaaaaaaaaaaaaaaaaaaaaaaaaaaaaaugcaucccccccccccccccccccccccccccccccaaaggcucuuuucagagccaccagaauu

SEQ ID NO: 15586 - RNA, 1937 nt, Artificial Sequence
  mRNA product Design e-1 comprising derived and/or modified sequence from HRSV(Memphis-37)__AIY60640.1__F_DSCav1_mut3 (opt1)
gggagaauauaagcguuggcggagcgucgguuguagcacucugcgcgcccgcucuucugcugcuguuugucuacuuccuccugcuuccccgccgccgccgccgccaucaagcuuaccauggagcugcccauccucaagaccaacgccaucaccacgauccuggccgcggugacccugugcuucgccagcucccagaacaucaccgaggaguucuaccagagcacgugcuccgccgucagcaagggcuaccucggggcccugcgcaccggcugguacaccuccgugaucaccaucgagcugagcaacaucaaggagaucaagugcaacgggaccgacgccaaggugaagcucaucaagcaggagcuggacaaguacaagaacgcggucacggaccugcagcuccugaugcaguccaccccggccgccggcagcggguccgccaucugcagcggcaucgcggugugcaaggugcugcaccucgagggcgaggucaacaagaucaagaacgcccugcuguccaccaacaaggccguggugagccucuccaacggggucagcgugcugaccuucaaggugcuggaccucaagaacuacaucgacaagcagcugcugcccauccucaacaagcaguccugcagcauccccaacaucgagacggucaucgaguuccagcagaagaacaaccggcugcuggagaucacccgcgaguucuccgugaacgccggcgugaccacccccgucagcacguacaugcucaccaacuccgagcugcugagccucaucaacgacaugccgaucaccaacgaccagaagaagcugaugagcaacaacgugcagaucgugcggcagcaguccuacagcaucaugugcaucaucaaggaggagguccuggccuacguggugcagcucccccuguacggggucaucgacacccccugcuggaagcugcacacgagcccccucugcaccaccaacaccaaggagggcuccaacaucugccugacgcgcaccgaccgggggugguacugcgacaacgcgggcuccgugagcuucuucccgcaggccgagaccugcaaggugcaguccaaccgcgucuucugcgacaccaugaacagccugacgcuccccuccgaggugaaccugugcaacaucgacaucuucaaccccaaguacgacugcaagaucaugaccagcaagaccgacgucuccagcuccgugaucaccagccugggcgccaucguguccugcuacgggaagacgaagugcaccgccagcaacaagaaccggggcaucaucaagaccuucuccaacgggugcgacuacgucagcaacaagggcguggacaccguguccgucggcaacacgcucuacugcgugaacaagcaggaggggcagagccuguacgugaagggcgagcccaucaucaacuucuacgacccgcuggucuuccccagcgacgaguucgacgccuccaucagccaggugaacgagaagaucaaccagucccucgcguucauccgcaagagcgacgagcugcugcacaacgugaacgucgggaaguccaccaccaacaucaugaucaccaccaucaucaucgugaucaucgugauccuccugcugcucaucgccgucggccuguuccuguacugcaaggcccggagcacgcccgugacccuguccaaggaccagcucagcgggaucaacaacaucgccuucuccaacugaggacuaguguccaccugucccuccugggcugcuggauugucucguuuuccugccaaauaaacaggaucagcgcuuuacagaucuaaaaaaaaaaaaaaaaaaaaaaaaaaaaaaaaaaaaaaaaaaaaaaaaaaaaaaaaaaaaaaaaugcaucccccccccccccccccccccccccccccccaaaggcucuuuucagagccaccagaauu

SEQ ID NO: 15587 - RNA, 1937 nt, Artificial Sequence
  mRNA product Design e-1 comprising derived and/or modified sequence from HRSV(Memphis-37)__AIY60640.1__F_DSCav1_mut3 (opt2)
gggagaauauaagcguuggcggagcgucgguuguagcacucugcgcgcccgcucuucugcugcuguuugucuacuuccuccugcuuccccgccgccgccgccgccaucaagcuuaccauggagcuccccauccucaagaccaacgccaucaccaccauccucgccgccgucacccucugcuucgccuccucccagaacaucaccgaggaguucuaccaguccaccugcuccgccgucuccaagggcuaccucggcgcccuccgcaccggcugguacaccuccgucaucaccaucgagcucuccaacaucaaggagaucaagugcaacggcaccgacgccaaggucaagcucaucaagcaggagcucgacaaguacaagaacgccgucaccgaccuccagcuccucaugcaguccacccccgccgccggcuccggcuccgccaucugcuccggcaucgccgucugcaagguccuccaccucgagggcgaggucaacaagaucaagaacgcccuccucuccaccaacaaggccgucgucucccucuccaacggcgucuccguccucaccuucaagguccucgaccucaagaacuacaucgacaagcagcuccuccccauccucaacaagcaguccugcuccauccccaacaucgagaccgucaucgaguuccagcagaagaacaaccgccuccucgagaucacccgcgaguucuccgucaacgccggcgucaccacccccgucuccaccuacaugcucaccaacuccgagcuccucucccucaucaacgacaugcccaucaccaacgaccagaagaagcucauguccaacaacguccagaucguccgccagcaguccuacuccaucaugugcaucaucaaggaggagguccucgccuacgucguccagcucccccucuacggcgucaucgacacccccugcuggaagcuccacaccuccccccucugcaccaccaacaccaaggagggcuccaacaucugccucacccgcaccgaccgcggcugguacugcgacaacgccggcuccgucuccuucuucccccaggccgagaccugcaagguccaguccaaccgcgucuucugcgacaccaugaacucccucacccuccccuccgaggucaaccucugcaacaucgacaucuucaaccccaaguacgacugcaagaucaugaccuccaagaccgacgucuccuccuccgucaucaccucccucggcgccaucgucuccugcuacggcaagaccaagugcaccgccuccaacaagaaccgcggcaucaucaagaccuucuccaacggcugcgacuacgucuccaacaagggcgucgacaccgucuccgucggcaacacccucuacugcgucaacaagcaggagggccagucccucuacgucaagggcgagcccaucaucaacuucuacgacccccucgucuuccccuccgacgaguucgacgccuccaucucccaggucaacgagaagaucaaccagucccucgccuucauccgcaaguccgacgagcuccuccacaacgucaacgucggcaaguccaccaccaacaucaugaucaccaccaucaucaucgucaucaucgucauccuccuccuccucaucgccgucggccucuuccucuacugcaaggcccgcuccacccccgucacccucuccaaggaccagcucuccggcaucaacaacaucgccuucuccaacugaggacuaguguccaccugucccuccugggcugcuggauugucucguuuuccugccaaauaaacaggaucagcgcuuuacagaucuaaaaaaaaaaaaaaaaaaaaaaaaaaaaaaaaaaaaaaaaaaaaaaaaaaaaaaaaaaaaaaaaugcaucccccccccccccccccccccccccccccccaaaggcucuuuucagagccaccagaauu

SEQ ID NO: 15588 - RNA, 1937 nt, Artificial Sequence
  mRNA product Design e-1 comprising derived and/or modified sequence from HRSV(Memphis-37)__AIY60640.1__F_DSCav1_mut3 (opt3)
gggagaauauaagcguuggcggagcgucgguuguagcacucugcgcgcccgcucuucugcugcuguuugucuacuuccuccugcuuccccgccgccgccgccgccaucaagcuuaccauggagcugcccauccucaagaccaacgccauuacaacuauacuugcugcagugacgcugugcuucgccagcucccagaauaucaccgaagaguuuuaccaaucuacauguucagcggucaguaaaggcuauuugggggcuuuaagaacuggaugguacaccagcguuauuacaaucgaacuguccaacauuaaggagaucaaaugcaaugguaccgacgccaaggugaaacuaauaaagcaggaacucgauaaguauaaaaacgcaguaacugaccugcagcuucugaugcagucuacuccugccgcuggcucggggucagcaaucuguagcggaauugccgugugcaaggucuugcaccucgagggcgaggugaauaaaaucaagaacgcucugcugaguaccaauaaagccguugugucccucucuaacggugucagcguguuaacguucaagguacuggaucuuaagaauuacauugacaaacaauugcugccaauccuaaacaagcaguccuguucaauaccgaauauugaaacuguuaucgaguuucagcagaaaaacaauaggcuccuggaaauuacccgggaguucagugugaacgcgggggucacaacucccgugagcaccuauaugcuuacaaauucugagcuguugucccucaucaacgauaugccuaucaccaacgaccaaaagaaacugaugucaaauaacgugcagauuguccgccagcagagcuacaguauaaugugcaucauuaaggaagagguuuuagcauaugugguacaacugccacucuacggagugaucgauacgcccuguuggaaacuucauacuucuccucugugcacaaccaauacuaaggaaggcuccaacauauguuugacacgaaccgaccguggcugguacugcgauaaugccgggagcgucucguuuuucccacaggcugagacguguaaggugcagucuaacagaguuuucugcgacaccaugaacucccuaacacugcccucagaagugaaucucugcaauauugauaucuucaacccuaaauaugacuguaagaucaugacaaguaaaaccgaugucagcuccucugugauuacaagccugggagccaucguaucaugcuacgguaagacuaaauguaccgcaaguaauaagaacaggggcauuauaaagacauuuuccaaugggugcgacuauguuagcaacaaaggaguggacaccgucucugugggcaauacucuuuacugugucaacaagcaagagggucagucacuguaugugaaaggggagccaaucauuaacuucuacgauccguugguuuuucccagugacgaauuugaugcuagcaucucccaggugaaugagaagaucaaccagucucucgccuuuauucggaaaucggacgaacuguuacacaauguaaacgucggaaagagcacgacaaauauaaugaucaccacuauuaucauugugaucauaguuauccugcuacuccugauugcggugggccuuuucuuguauugcaaggcccgcuccaccccugucacacugucaaaagaucaacucaguggcaucaacaauauugcauucucuaacugaggacuaguguccaccugucccuccugggcugcuggauugucucguuuuccugccaaauaaacaggaucagcgcuuuacagaucuaaaaaaaaaaaaaaaaaaaaaaaaaaaaaaaaaaaaaaaaaaaaaaaaaaaaaaaaaaaaaaaaugcaucccccccccccccccccccccccccccccccaaaggcucuuuucagagccaccagaauu

SEQ ID NO: 15589 - RNA, 1937 nt, Artificial Sequence
  mRNA product Design e-1 comprising derived and/or modified sequence from HRSV(Memphis-37)__AIY60640.1__F_DSCav1_mut3 (opt4)
gggagaauauaagcguuggcggagcgucgguuguagcacucugcgcgcccgcucuucugcugcuguuugucuacuuccuccugcuuccccgccgccgccgccgccaucaagcuuaccauggagcugcccauccugaagaccaacgccaucaccaccauccuggccgccgugacccugugcuucgccagcagccagaacaucaccgaggaguucuaccagagcaccugcagcgccgugagcaagggcuaccugggcgcccugagaaccggcugguacaccagcgugaucaccaucgagcugagcaacaucaaggagaucaagugcaacggcaccgacgccaaggugaagcugaucaagcaggagcuggacaaguacaagaacgccgugaccgaccugcagcugcugaugcagagcacccccgccgccggcagcggcagcgccaucugcagcggcaucgccgugugcaaggugcugcaccuggagggcgaggugaacaagaucaagaacgcccugcugagcaccaacaaggccguggugagccugagcaacggcgugagcgugcugaccuucaaggugcuggaccugaagaacuacaucgacaagcagcugcugcccauccugaacaagcagagcugcagcauccccaacaucgagaccgugaucgaguuccagcagaagaacaacagacugcuggagaucaccagagaguucagcgugaacgccggcgugaccacccccgugagcaccuacaugcugaccaacagcgagcugcugagccugaucaacgacaugcccaucaccaacgaccagaagaagcugaugagcaacaacgugcagaucgugagacagcagagcuacagcaucaugugcaucaucaaggaggaggugcuggccuacguggugcagcugccccuguacggcgugaucgacacccccugcuggaagcugcacaccagcccccugugcaccaccaacaccaaggagggcagcaacaucugccugaccagaaccgacagaggcugguacugcgacaacgccggcagcgugagcuucuucccccaggccgagaccugcaaggugcagagcaacagaguguucugcgacaccaugaacagccugacccugcccagcgaggugaaccugugcaacaucgacaucuucaaccccaaguacgacugcaagaucaugaccagcaagaccgacgugagcagcagcgugaucaccagccugggcgccaucgugagcugcuacggcaagaccaagugcaccgccagcaacaagaacagaggcaucaucaagaccuucagcaacggcugcgacuacgugagcaacaagggcguggacaccgugagcgugggcaacacccuguacugcgugaacaagcaggagggccagagccuguacgugaagggcgagcccaucaucaacuucuacgacccccugguguuccccagcgacgaguucgacgccagcaucagccaggugaacgagaagaucaaccagagccuggccuucaucagaaagagcgacgagcugcugcacaacgugaacgugggcaagagcaccaccaacaucaugaucaccaccaucaucaucgugaucaucgugauccugcugcugcugaucgccgugggccuguuccuguacugcaaggccagaagcacccccgugacccugagcaaggaccagcugagcggcaucaacaacaucgccuucagcaacugaggacuaguguccaccugucccuccugggcugcuggauugucucguuuuccugccaaauaaacaggaucagcgcuuuacagaucuaaaaaaaaaaaaaaaaaaaaaaaaaaaaaaaaaaaaaaaaaaaaaaaaaaaaaaaaaaaaaaaaugcaucccccccccccccccccccccccccccccccaaaggcucuuuucagagccaccagaauu

SEQ ID NO: 15590 - RNA, 1937 nt, Artificial Sequence
  mRNA product Design e-1 comprising derived and/or modified sequence from HRSV(Memphis-37)__AIY60640.1__F_DSCav1_mut3 (opt5)
gggagaauauaagcguuggcggagcgucgguuguagcacucugcgcgcccgcucuucugcugcuguuugucuacuuccuccugcuuccccgccgccgccgccgccaucaagcuuaccauggagcugcccauccucaagaccaacgccauuacaacgauccuggcugccgugacccuuugcuucgcgagcucccagaauauuacagaagaguuuuaccaaucuaccuguagcgcugucuccaaaggcuaucugggggcccucagaacaggaugguacaccucuguuaucacaauugaacugagcaacaucaaggagaucaaaugcaauggcaccgacgccaaggugaaacuuauuaagcaggaacuggauaaguauaaaaacgcugugacggaccuccagcugcugaugcaguccaccccugccgcugggucuggaagcgccaucuguuccggcauugcggucugcaaggugcuccaccuggagggggagguuaauaaaaucaagaacgcccuucugagcacaaauaaagcuguggucucucucuccaacggagugagcguucugaccuucaaggugcuugaucugaagaauuacauugacaaacaacuccugccgauccugaacaagcagucuuguuccauucccaauaucgaaacagucaucgaguuucagcagaaaaacaaucggcuccuggaaauuacccgcgaguucagcgugaacgccggcgugacgacaccugucucuaccuauaugcuuacaaauuccgagcugcucagccugaucaacgauaugcccauuaccaacgaccaaaagaaacuuauguccaauaacguucagaucgugagacagcagucuuacagcauuaugugcaucaucaaggaagaggugcuggcuuaugucgugcaacucccucuguacggcguuauugauacccccuguuggaaacugcauacauccccucucugcacgaccaauacaaaggaagggagcaacaucugucugacccggacagaccgcggaugguacugcgauaaugccggcucuguguccuuuuucccgcaggcggagaccuguaagguccagagcaacagaguguuuugcgacacgaugaacucucuuacacugcccagcgaaguuaaucucugcaauauugauaucuucaacccuaaauaugacuguaagauuaugaccuccaaaaccgaugugucuagcuccgucaucacaagccugggggccaucgugucuugcuacggaaagaccaaauguacagcuuccaauaagaaccggggcauuaucaagacguuuagcaaugggugcgacuaugucucuaacaaaggaguggacaccguuuccgugggcaauacacuuuacugugucaacaagcaagagggccagagccuguaugugaaaggggagcccauuaucaacuucuacgauccucucguuuuucccuccgacgaguucgaugccucuauuagccaggugaaugaaaagaucaaccagucccuggcuuuuauucgcaaaucugacgaacugcuccacaaugucaacgugggaaagagcaccacaaauaucaugaucaccacgauuaucauugugaucauuguuauccugcuucugcucaucgccgucggccuguuccuguauugcaaggccagauccaccccggugacacuuagcaaagaucaacucucugggauuaacaauaucgcuuucuccaacugaggacuaguguccaccugucccuccugggcugcuggauugucucguuuuccugccaaauaaacaggaucagcgcuuuacagaucuaaaaaaaaaaaaaaaaaaaaaaaaaaaaaaaaaaaaaaaaaaaaaaaaaaaaaaaaaaaaaaaaugcaucccccccccccccccccccccccccccccccaaaggcucuuuucagagccaccagaauu

SEQ ID NO: 15591 - RNA, 1937 nt, Artificial Sequence
  mRNA product Design e-1 comprising derived and/or modified sequence from HRSV(Memphis-37)__AIY60640.1__F_DSCav1_mut3 (opt6)
gggagaauauaagcguuggcggagcgucgguuguagcacucugcgcgcccgcucuucugcugcuguuugucuacuuccuccugcuuccccgccgccgccgccgccaucaagcuuaccauggaauuaccaauacuaaaaacaaaugccaucaccaccauccuggccgccguaacauuaugcuucgcaaguucacaaaauauaacagaagaauuuuaucaaucaacuugcagcgccguaucaaaaggcuacuuaggcgcacuacguacaggaugguacacaucaguaauaaccauagaacuauccaauauuaaagaaauaaaaugcaauggaacagacgcaaaaguuaaacuaauaaaacaagaauuagacaaauacaaaaacgcaguaaccgaccuucaauuacuaaugcaaucuacccccgcugcagguuccggaucagcaauauguucaggaauugcaguaugcaaaguccuacacuuagaaggagaaguaaacaaaauaaaaaacgcacuauuaagcaccaauaaagcagucguaucauuauccaacggcguuucaguacuaacauuuaaaguacuugaccuaaaaaacuauauagacaaacaacuacuucccauccuuaacaaacaaagcugcucaauaccuaauaucgaaacaguaauagaauuucaacaaaaaaacaaucgauuauuagaaaucacacgagaauuuucugucaacgcaggagucaccacacccguaucuacuuauauguuaaccaacucugaauuauuaucacuaaucaaugacaugccaauaacaaacgaucaaaaaaaauuaaugucaaauaacguacaaauaguaagacaacaaucauacucaauaaugugcauuauaaaagaagaaguacuagccuauguuguacaacucccacucuacggcguaauagacacaccaugcuggaaauuacacacuucaccacuaugcacaacaaacacaaaagaaggaucaaacaucugccuaaccagaaccgauagaggaugguauugcgacaaugccggaucaguuucauucuucccacaagcagaaacaugcaaaguacaauccaacagaguuuucugugacacaaugaacucgcuaacauuacccagcgaaguaaaccucugcaacauagacauauucaacccaaaauacgauugcaaaauaaugacuucuaaaacagauguuuccucaagcgucauaacgaguuuaggagcaauaguaagcuguuacggaaaaaccaaauguaccgcaucaaacaaaaaccgaggaauaauaaaaaccuuuucaaacggaugcgauuacgucuccaacaaaggagucgacacaguaucaguuggcaauacucuuuacugcguaaauaaacaagaaggacaaucacuauacguaaaaggcgaaccaauaauaaacuucuacgacccccucgucuucccuucagaugaauuugacgcaagcaucucacaaguuaaugaaaaaauaaaucaauccuuagcauucauacgaaaaucagacgaacuauuacacaacguaaacguaggaaaaucaacgacaaacauaaugauaacaacuaucauuauagucauaauagucauacuacuacuauuaauagccguaggcuuauuccuauacugcaaagcaagaucuacuccaguaacacucucaaaagaccaauuaucuggaauaaauaacauagcauucucuaauuaaggacuaguguccaccugucccuccugggcugcuggauugucucguuuuccugccaaauaaacaggaucagcgcuuuacagaucuaaaaaaaaaaaaaaaaaaaaaaaaaaaaaaaaaaaaaaaaaaaaaaaaaaaaaaaaaaaaaaaaugcaucccccccccccccccccccccccccccccccaaaggcucuuuucagagccaccagaauu

SEQ ID NO: 15592 - RNA, 1937 nt, Artificial Sequence
  mRNA product Design e-1 comprising derived and/or modified sequence from HRSV(Memphis-37)__AIY60640.1__F_DSCav1_mut3 (opt11)
gggagaauauaagcguuggcggagcgucgguuguagcacucugcgcgcccgcucuucugcugcuguuugucuacuuccuccugcuuccccgccgccgccgccgccaucaagcuuaccauggaacuccccauccucaaaaccaacgccauuaccacgauccucgccgcagucacccucugcuucgccuccucacaaaacaucacagaagaauuuuaccaaaguaccugcuccgccgucagcaaaggauaccucggcgcccuccgcaccggcugguacacauccgucauaaccaucgaacucagcaacaucaaagaaaucaaauguaacggaaccgacgccaaaguaaaacuaauaaaacaagaacucgacaaauacaagaacgccgucaccgaccuccaacuccucaugcaaucuacccccgccgccggcucagguagcgccaucugcagcgguauugccgucugcaaaguacuccaccuagaaggagaagucaauaaaaucaaaaacgcccuacucuccaccaacaaggcagucgucagccucuccaacggcgucucagucuuaaccuucaaagugcucgaccucaaaaauuacauagacaaacaacuacuccccauucucaacaaacaauccugcuccauacccaacauagaaaccgucauugaauuucaacagaaaaacaaccgccuccucgaaaucacgcgcgaguucagugucaacgccggcgucaccaccccagucucgacauacaugcucacaaacucagaacuccucucguuaaucaacgacaugccaauaaccaacgaccaaaagaaacuaauguccaacaacguucaaauaguucgccaacaaucauacuccauaaugugcaucaucaaagaagaaguccucgccuacguuguacaauuaccccucuacggcgucaucgacacaccaugcuggaaacuccacacaucgccccucugcaccaccaacaccaaagaaggcagcaacauuugccucacccggacagaccgcggcugguacugcgacaaugcaggcagcgucucauucuucccacaagccgaaaccugcaaaguccaaagcaaccgugucuucugcgacacaaugaacucccuuacccucccaagcgaaguaaaccucugcaauauugacaucuucaaccccaaauacgacugcaaaaucaugaccuccaaaaccgacgucuccucaucagucaucaccucccuuggcgccauugucuccuguuacgguaaaaccaaaugcaccgccuccaacaaaaaccgcggcaucaucaaaaccuucucuaacggcugcgacuacgucucaaacaaaggcgucgacacugucuccgucggcaacacccuauacugcgucaacaagcaagaaggacagucccuauacguaaaaggugaaccaauuaucaacuucuacgacccccuagucuucccauccgacgaguucgaugccuccaucucccaaguaaaugaaaagaucaaucaaagccuggccuucauccgcaaauccgacgaacuacuccacaaugucaacgucggaaaaucaacaacaaacaucaugaucaccaccaucaucaucgucaucauaguaauccuccuacugcucaucgccgucggucucuuccuauacugcaaagcccguucuacuccagucacccucuccaaagaccaacuaucaggaaucaacaacaucgccuucagcaacuaaggacuaguguccaccugucccuccugggcugcuggauugucucguuuuccugccaaauaaacaggaucagcgcuuuacagaucuaaaaaaaaaaaaaaaaaaaaaaaaaaaaaaaaaaaaaaaaaaaaaaaaaaaaaaaaaaaaaaaaugcaucccccccccccccccccccccccccccccccaaaggcucuuuucagagccaccagaauu

SEQ ID NO: 15593 - RNA, 1919 nt, Artificial Sequence
  mRNA product Design e-2 comprising derived and/or modified sequence from HRSV(Memphis-37)__AIY60640.1__F_DSCav1_mut3 (opt1)
gggagacccgugacccggaaguuguacggcuacgcgacuuucccucccacaaacccucgcgcccuuccuuuccuacuugggcccggcagaaagcuuaccauggagcugcccauccucaagaccaacgccaucaccacgauccuggccgcggugacccugugcuucgccagcucccagaacaucaccgaggaguucuaccagagcacgugcuccgccgucagcaagggcuaccucggcgcccugcgcaccgggugguacaccagcgugaucaccaucgagcuguccaacaucaaggagaucaagugcaacggcaccgacgccaaggugaagcucaucaagcaggagcuggacaaguacaagaacgcggucacggaccugcagcuccugaugcagagcaccccggccgccggcuccgggagcgcgaucugcuccggcaucgccgucugcaaggugcugcaccucgagggcgaggugaacaagaucaagaacgcccugcuguccaccaacaaggccgucgugagccucuccaacggggugagcguccugaccuucaaggugcuggaccucaagaacuacaucgacaagcagcugcugcccauccugaacaagcagagcugcuccauccccaacaucgagaccgucaucgaguuccagcagaagaacaaccgccuccuggagaucacgcgggaguucagcgugaacgcgggcgugaccacccccgucuccaccuacaugcugacgaacagcgagcuccugucccugaucaacgacaugccgaucaccaacgaccagaagaagcucaugagcaacaacgugcagaucgugcgccagcaguccuacagcaucaugugcaucaucaaggaggagguccuggccuacguggugcagcugccccucuacggggucaucgacacccccugcuggaagcugcacaccagcccccugugcacgaccaacaccaaggagggcuccaacaucugccucacccggacggaccgcgggugguacugcgacaacgccggcagcguguccuucuucccgcaggccgagaccugcaagguccagagcaaccggguguucugcgacaccaugaacucccugacccugcccagcgaggugaaccucugcaacaucgacaucuucaaccccaaguacgacugcaagaucaugacguccaagaccgacgucagcuccagcgugaucaccucccugggcgccaucgugagcugcuacgggaagaccaagugcacggcgagcaacaagaaccgcggcaucaucaagaccuucuccaacgggugcgacuacgucagcaacaagggcguggacaccguguccgucggcaacacccuguacugcgugaacaagcaggagggccagagccucuacgugaagggggagcccaucaucaacuucuacgacccgcuggucuuccccuccgacgaguucgacgccagcaucucccaggugaacgagaagaucaaccagagccuggccuucauccggaaguccgacgagcuccugcacaacgugaacgucggcaagagcaccacgaacaucaugaucaccaccaucaucaucgugaucaucgugauccugcugcuccugaucgccgucgggcuguuccucuacugcaaggcccgcuccacccccgugacgcugagcaaggaccagcuguccgggaucaacaacaucgcguucagcaacugaggacuaguguccaccugucccuccugggcugcuggauugucucguuuuccugccaaauaaacaggaucagcgcuuuacagaucuaaaaaaaaaaaaaaaaaaaaaaaaaaaaaaaaaaaaaaaaaaaaaaaaaaaaaaaaaaaaaaaaugcaucccccccccccccccccccccccccccccccaaaggcucuuuucagagccaccagaauu

SEQ ID NO: 15594 - RNA, 1919 nt, Artificial Sequence
  mRNA product Design e-2 comprising derived and/or modified sequence from HRSV(Memphis-37)__AIY60640.1__F_DSCav1_mut3 (opt1)
gggagacccgugacccggaaguuguacggcuacgcgacuuucccucccacaaacccucgcgcccuuccuuuccuacuugggcccggcagaaagcuuaccauggagcugcccauccucaagaccaacgccaucaccacgauccuggccgcggugacccugugcuucgccagcucccagaacaucaccgaggaguucuaccagagcacgugcuccgccgucagcaagggcuaccucggggcccugcgcaccggcugguacaccuccgugaucaccaucgagcugagcaacaucaaggagaucaagugcaacgggaccgacgccaaggugaagcucaucaagcaggagcuggacaaguacaagaacgcggucacggaccugcagcuccugaugcaguccaccccggccgccggcagcggguccgccaucugcagcggcaucgcggugugcaaggugcugcaccucgagggcgaggucaacaagaucaagaacgcccugcuguccaccaacaaggccguggugagccucuccaacggggucagcgugcugaccuucaaggugcuggaccucaagaacuacaucgacaagcagcugcugcccauccucaacaagcaguccugcagcauccccaacaucgagacggucaucgaguuccagcagaagaacaaccggcugcuggagaucacccgcgaguucuccgugaacgccggcgugaccacccccgucagcacguacaugcucaccaacuccgagcugcugagccucaucaacgacaugccgaucaccaacgaccagaagaagcugaugagcaacaacgugcagaucgugcggcagcaguccuacagcaucaugugcaucaucaaggaggagguccuggccuacguggugcagcucccccuguacggggucaucgacacccccugcuggaagcugcacacgagcccccucugcaccaccaacaccaaggagggcuccaacaucugccugacgcgcaccgaccgggggugguacugcgacaacgcgggcuccgugagcuucuucccgcaggccgagaccugcaaggugcaguccaaccgcgucuucugcgacaccaugaacagccugacgcuccccuccgaggugaaccugugcaacaucgacaucuucaaccccaaguacgacugcaagaucaugaccagcaagaccgacgucuccagcuccgugaucaccagccugggcgccaucguguccugcuacgggaagacgaagugcaccgccagcaacaagaaccggggcaucaucaagaccuucuccaacgggugcgacuacgucagcaacaagggcguggacaccguguccgucggcaacacgcucuacugcgugaacaagcaggaggggcagagccuguacgugaagggcgagcccaucaucaacuucuacgacccgcuggucuuccccagcgacgaguucgacgccuccaucagccaggugaacgagaagaucaaccagucccucgcguucauccgcaagagcgacgagcugcugcacaacgugaacgucgggaaguccaccaccaacaucaugaucaccaccaucaucaucgugaucaucgugauccuccugcugcucaucgccgucggccuguuccuguacugcaaggcccggagcacgcccgugacccuguccaaggaccagcucagcgggaucaacaacaucgccuucuccaacugaggacuaguguccaccugucccuccugggcugcuggauugucucguuuuccugccaaauaaacaggaucagcgcuuuacagaucuaaaaaaaaaaaaaaaaaaaaaaaaaaaaaaaaaaaaaaaaaaaaaaaaaaaaaaaaaaaaaaaaugcaucccccccccccccccccccccccccccccccaaaggcucuuuucagagccaccagaauu

SEQ ID NO: 15595 - RNA, 1919 nt, Artificial Sequence
  mRNA product Design e-2 comprising derived and/or modified sequence from HRSV(Memphis-37)__AIY60640.1__F_DSCav1_mut3 (opt2)
gggagacccgugacccggaaguuguacggcuacgcgacuuucccucccacaaacccucgcgcccuuccuuuccuacuugggcccggcagaaagcuuaccauggagcuccccauccucaagaccaacgccaucaccaccauccucgccgccgucacccucugcuucgccuccucccagaacaucaccgaggaguucuaccaguccaccugcuccgccgucuccaagggcuaccucggcgcccuccgcaccggcugguacaccuccgucaucaccaucgagcucuccaacaucaaggagaucaagugcaacggcaccgacgccaaggucaagcucaucaagcaggagcucgacaaguacaagaacgccgucaccgaccuccagcuccucaugcaguccacccccgccgccggcuccggcuccgccaucugcuccggcaucgccgucugcaagguccuccaccucgagggcgaggucaacaagaucaagaacgcccuccucuccaccaacaaggccgucgucucccucuccaacggcgucuccguccucaccuucaagguccucgaccucaagaacuacaucgacaagcagcuccuccccauccucaacaagcaguccugcuccauccccaacaucgagaccgucaucgaguuccagcagaagaacaaccgccuccucgagaucacccgcgaguucuccgucaacgccggcgucaccacccccgucuccaccuacaugcucaccaacuccgagcuccucucccucaucaacgacaugcccaucaccaacgaccagaagaagcucauguccaacaacguccagaucguccgccagcaguccuacuccaucaugugcaucaucaaggaggagguccucgccuacgucguccagcucccccucuacggcgucaucgacacccccugcuggaagcuccacaccuccccccucugcaccaccaacaccaaggagggcuccaacaucugccucacccgcaccgaccgcggcugguacugcgacaacgccggcuccgucuccuucuucccccaggccgagaccugcaagguccaguccaaccgcgucuucugcgacaccaugaacucccucacccuccccuccgaggucaaccucugcaacaucgacaucuucaaccccaaguacgacugcaagaucaugaccuccaagaccgacgucuccuccuccgucaucaccucccucggcgccaucgucuccugcuacggcaagaccaagugcaccgccuccaacaagaaccgcggcaucaucaagaccuucuccaacggcugcgacuacgucuccaacaagggcgucgacaccgucuccgucggcaacacccucuacugcgucaacaagcaggagggccagucccucuacgucaagggcgagcccaucaucaacuucuacgacccccucgucuuccccuccgacgaguucgacgccuccaucucccaggucaacgagaagaucaaccagucccucgccuucauccgcaaguccgacgagcuccuccacaacgucaacgucggcaaguccaccaccaacaucaugaucaccaccaucaucaucgucaucaucgucauccuccuccuccucaucgccgucggccucuuccucuacugcaaggcccgcuccacccccgucacccucuccaaggaccagcucuccggcaucaacaacaucgccuucuccaacugaggacuaguguccaccugucccuccugggcugcuggauugucucguuuuccugccaaauaaacaggaucagcgcuuuacagaucuaaaaaaaaaaaaaaaaaaaaaaaaaaaaaaaaaaaaaaaaaaaaaaaaaaaaaaaaaaaaaaaaugcaucccccccccccccccccccccccccccccccaaaggcucuuuucagagccaccagaauu

SEQ ID NO: 15596 - RNA, 1919 nt, Artificial Sequence
  mRNA product Design e-2 comprising derived and/or modified sequence from HRSV(Memphis-37)__AIY60640.1__F_DSCav1_mut3 (opt3)
gggagacccgugacccggaaguuguacggcuacgcgacuuucccucccacaaacccucgcgcccuuccuuuccuacuugggcccggcagaaagcuuaccauggagcugcccauccucaagaccaacgccauuacaacuauacuugcugcagugacgcugugcuucgccagcucccagaauaucaccgaagaguuuuaccaaucuacauguucagcggucaguaaaggcuauuugggggcuuuaagaacuggaugguacaccagcguuauuacaaucgaacuguccaacauuaaggagaucaaaugcaaugguaccgacgccaaggugaaacuaauaaagcaggaacucgauaaguauaaaaacgcaguaacugaccugcagcuucugaugcagucuacuccugccgcuggcucggggucagcaaucuguagcggaauugccgugugcaaggucuugcaccucgagggcgaggugaauaaaaucaagaacgcucugcugaguaccaauaaagccguugugucccucucuaacggugucagcguguuaacguucaagguacuggaucuuaagaauuacauugacaaacaauugcugccaauccuaaacaagcaguccuguucaauaccgaauauugaaacuguuaucgaguuucagcagaaaaacaauaggcuccuggaaauuacccgggaguucagugugaacgcgggggucacaacucccgugagcaccuauaugcuuacaaauucugagcuguugucccucaucaacgauaugccuaucaccaacgaccaaaagaaacugaugucaaauaacgugcagauuguccgccagcagagcuacaguauaaugugcaucauuaaggaagagguuuuagcauaugugguacaacugccacucuacggagugaucgauacgcccuguuggaaacuucauacuucuccucugugcacaaccaauacuaaggaaggcuccaacauauguuugacacgaaccgaccguggcugguacugcgauaaugccgggagcgucucguuuuucccacaggcugagacguguaaggugcagucuaacagaguuuucugcgacaccaugaacucccuaacacugcccucagaagugaaucucugcaauauugauaucuucaacccuaaauaugacuguaagaucaugacaaguaaaaccgaugucagcuccucugugauuacaagccugggagccaucguaucaugcuacgguaagacuaaauguaccgcaaguaauaagaacaggggcauuauaaagacauuuuccaaugggugcgacuauguuagcaacaaaggaguggacaccgucucugugggcaauacucuuuacugugucaacaagcaagagggucagucacuguaugugaaaggggagccaaucauuaacuucuacgauccguugguuuuucccagugacgaauuugaugcuagcaucucccaggugaaugagaagaucaaccagucucucgccuuuauucggaaaucggacgaacuguuacacaauguaaacgucggaaagagcacgacaaauauaaugaucaccacuauuaucauugugaucauaguuauccugcuacuccugauugcggugggccuuuucuuguauugcaaggcccgcuccaccccugucacacugucaaaagaucaacucaguggcaucaacaauauugcauucucuaacugaggacuaguguccaccugucccuccugggcugcuggauugucucguuuuccugccaaauaaacaggaucagcgcuuuacagaucuaaaaaaaaaaaaaaaaaaaaaaaaaaaaaaaaaaaaaaaaaaaaaaaaaaaaaaaaaaaaaaaaugcaucccccccccccccccccccccccccccccccaaaggcucuuuucagagccaccagaauu

SEQ ID NO: 15597 - RNA, 1919 nt, Artificial Sequence
  mRNA product Design e-2 comprising derived and/or modified sequence from HRSV(Memphis-37)__AIY60640.1__F_DSCav1_mut3 (opt4)
gggagacccgugacccggaaguuguacggcuacgcgacuuucccucccacaaacccucgcgcccuuccuuuccuacuugggcccggcagaaagcuuaccauggagcugcccauccugaagaccaacgccaucaccaccauccuggccgccgugacccugugcuucgccagcagccagaacaucaccgaggaguucuaccagagcaccugcagcgccgugagcaagggcuaccugggcgcccugagaaccggcugguacaccagcgugaucaccaucgagcugagcaacaucaaggagaucaagugcaacggcaccgacgccaaggugaagcugaucaagcaggagcuggacaaguacaagaacgccgugaccgaccugcagcugcugaugcagagcacccccgccgccggcagcggcagcgccaucugcagcggcaucgccgugugcaaggugcugcaccuggagggcgaggugaacaagaucaagaacgcccugcugagcaccaacaaggccguggugagccugagcaacggcgugagcgugcugaccuucaaggugcuggaccugaagaacuacaucgacaagcagcugcugcccauccugaacaagcagagcugcagcauccccaacaucgagaccgugaucgaguuccagcagaagaacaacagacugcuggagaucaccagagaguucagcgugaacgccggcgugaccacccccgugagcaccuacaugcugaccaacagcgagcugcugagccugaucaacgacaugcccaucaccaacgaccagaagaagcugaugagcaacaacgugcagaucgugagacagcagagcuacagcaucaugugcaucaucaaggaggaggugcuggccuacguggugcagcugccccuguacggcgugaucgacacccccugcuggaagcugcacaccagcccccugugcaccaccaacaccaaggagggcagcaacaucugccugaccagaaccgacagaggcugguacugcgacaacgccggcagcgugagcuucuucccccaggccgagaccugcaaggugcagagcaacagaguguucugcgacaccaugaacagccugacccugcccagcgaggugaaccugugcaacaucgacaucuucaaccccaaguacgacugcaagaucaugaccagcaagaccgacgugagcagcagcgugaucaccagccugggcgccaucgugagcugcuacggcaagaccaagugcaccgccagcaacaagaacagaggcaucaucaagaccuucagcaacggcugcgacuacgugagcaacaagggcguggacaccgugagcgugggcaacacccuguacugcgugaacaagcaggagggccagagccuguacgugaagggcgagcccaucaucaacuucuacgacccccugguguuccccagcgacgaguucgacgccagcaucagccaggugaacgagaagaucaaccagagccuggccuucaucagaaagagcgacgagcugcugcacaacgugaacgugggcaagagcaccaccaacaucaugaucaccaccaucaucaucgugaucaucgugauccugcugcugcugaucgccgugggccuguuccuguacugcaaggccagaagcacccccgugacccugagcaaggaccagcugagcggcaucaacaacaucgccuucagcaacugaggacuaguguccaccugucccuccugggcugcuggauugucucguuuuccugccaaauaaacaggaucagcgcuuuacagaucuaaaaaaaaaaaaaaaaaaaaaaaaaaaaaaaaaaaaaaaaaaaaaaaaaaaaaaaaaaaaaaaaugcaucccccccccccccccccccccccccccccccaaaggcucuuuucagagccaccagaauu

SEQ ID NO: 15598 - RNA, 1919 nt, Artificial Sequence
  mRNA product Design e-2 comprising derived and/or modified sequence from HRSV(Memphis-37)__AIY60640.1__F_DSCav1_mut3 (opt5)
gggagacccgugacccggaaguuguacggcuacgcgacuuucccucccacaaacccucgcgcccuuccuuuccuacuugggcccggcagaaagcuuaccauggagcugcccauccucaagaccaacgccauuacaacgauccuggcugccgugacccuuugcuucgcgagcucccagaauauuacagaagaguuuuaccaaucuaccuguagcgcugucuccaaaggcuaucugggggcccucagaacaggaugguacaccucuguuaucacaauugaacugagcaacaucaaggagaucaaaugcaauggcaccgacgccaaggugaaacuuauuaagcaggaacuggauaaguauaaaaacgcugugacggaccuccagcugcugaugcaguccaccccugccgcugggucuggaagcgccaucuguuccggcauugcggucugcaaggugcuccaccuggagggggagguuaauaaaaucaagaacgcccuucugagcacaaauaaagcuguggucucucucuccaacggagugagcguucugaccuucaaggugcuugaucugaagaauuacauugacaaacaacuccugccgauccugaacaagcagucuuguuccauucccaauaucgaaacagucaucgaguuucagcagaaaaacaaucggcuccuggaaauuacccgcgaguucagcgugaacgccggcgugacgacaccugucucuaccuauaugcuuacaaauuccgagcugcucagccugaucaacgauaugcccauuaccaacgaccaaaagaaacuuauguccaauaacguucagaucgugagacagcagucuuacagcauuaugugcaucaucaaggaagaggugcuggcuuaugucgugcaacucccucuguacggcguuauugauacccccuguuggaaacugcauacauccccucucugcacgaccaauacaaaggaagggagcaacaucugucugacccggacagaccgcggaugguacugcgauaaugccggcucuguguccuuuuucccgcaggcggagaccuguaagguccagagcaacagaguguuuugcgacacgaugaacucucuuacacugcccagcgaaguuaaucucugcaauauugauaucuucaacccuaaauaugacuguaagauuaugaccuccaaaaccgaugugucuagcuccgucaucacaagccugggggccaucgugucuugcuacggaaagaccaaauguacagcuuccaauaagaaccggggcauuaucaagacguuuagcaaugggugcgacuaugucucuaacaaaggaguggacaccguuuccgugggcaauacacuuuacugugucaacaagcaagagggccagagccuguaugugaaaggggagcccauuaucaacuucuacgauccucucguuuuucccuccgacgaguucgaugccucuauuagccaggugaaugaaaagaucaaccagucccuggcuuuuauucgcaaaucugacgaacugcuccacaaugucaacgugggaaagagcaccacaaauaucaugaucaccacgauuaucauugugaucauuguuauccugcuucugcucaucgccgucggccuguuccuguauugcaaggccagauccaccccggugacacuuagcaaagaucaacucucugggauuaacaauaucgcuuucuccaacugaggacuaguguccaccugucccuccugggcugcuggauugucucguuuuccugccaaauaaacaggaucagcgcuuuacagaucuaaaaaaaaaaaaaaaaaaaaaaaaaaaaaaaaaaaaaaaaaaaaaaaaaaaaaaaaaaaaaaaaugcaucccccccccccccccccccccccccccccccaaaggcucuuuucagagccaccagaauu

SEQ ID NO: 15599 - RNA, 1919 nt, Artificial Sequence
  mRNA product Design e-2 comprising derived and/or modified sequence from HRSV(Memphis-37)__AIY60640.1__F_DSCav1_mut3 (opt6)
gggagacccgugacccggaaguuguacggcuacgcgacuuucccucccacaaacccucgcgcccuuccuuuccuacuugggcccggcagaaagcuuaccauggaauuaccaauacuaaaaacaaaugccaucaccaccauccuggccgccguaacauuaugcuucgcaaguucacaaaauauaacagaagaauuuuaucaaucaacuugcagcgccguaucaaaaggcuacuuaggcgcacuacguacaggaugguacacaucaguaauaaccauagaacuauccaauauuaaagaaauaaaaugcaauggaacagacgcaaaaguuaaacuaauaaaacaagaauuagacaaauacaaaaacgcaguaaccgaccuucaauuacuaaugcaaucuacccccgcugcagguuccggaucagcaauauguucaggaauugcaguaugcaaaguccuacacuuagaaggagaaguaaacaaaauaaaaaacgcacuauuaagcaccaauaaagcagucguaucauuauccaacggcguuucaguacuaacauuuaaaguacuugaccuaaaaaacuauauagacaaacaacuacuucccauccuuaacaaacaaagcugcucaauaccuaauaucgaaacaguaauagaauuucaacaaaaaaacaaucgauuauuagaaaucacacgagaauuuucugucaacgcaggagucaccacacccguaucuacuuauauguuaaccaacucugaauuauuaucacuaaucaaugacaugccaauaacaaacgaucaaaaaaaauuaaugucaaauaacguacaaauaguaagacaacaaucauacucaauaaugugcauuauaaaagaagaaguacuagccuauguuguacaacucccacucuacggcguaauagacacaccaugcuggaaauuacacacuucaccacuaugcacaacaaacacaaaagaaggaucaaacaucugccuaaccagaaccgauagaggaugguauugcgacaaugccggaucaguuucauucuucccacaagcagaaacaugcaaaguacaauccaacagaguuuucugugacacaaugaacucgcuaacauuacccagcgaaguaaaccucugcaacauagacauauucaacccaaaauacgauugcaaaauaaugacuucuaaaacagauguuuccucaagcgucauaacgaguuuaggagcaauaguaagcuguuacggaaaaaccaaauguaccgcaucaaacaaaaaccgaggaauaauaaaaaccuuuucaaacggaugcgauuacgucuccaacaaaggagucgacacaguaucaguuggcaauacucuuuacugcguaaauaaacaagaaggacaaucacuauacguaaaaggcgaaccaauaauaaacuucuacgacccccucgucuucccuucagaugaauuugacgcaagcaucucacaaguuaaugaaaaaauaaaucaauccuuagcauucauacgaaaaucagacgaacuauuacacaacguaaacguaggaaaaucaacgacaaacauaaugauaacaacuaucauuauagucauaauagucauacuacuacuauuaauagccguaggcuuauuccuauacugcaaagcaagaucuacuccaguaacacucucaaaagaccaauuaucuggaauaaauaacauagcauucucuaauuaaggacuaguguccaccugucccuccugggcugcuggauugucucguuuuccugccaaauaaacaggaucagcgcuuuacagaucuaaaaaaaaaaaaaaaaaaaaaaaaaaaaaaaaaaaaaaaaaaaaaaaaaaaaaaaaaaaaaaaaugcaucccccccccccccccccccccccccccccccaaaggcucuuuucagagccaccagaauu

SEQ ID NO: 15600 - RNA, 1919 nt, Artificial Sequence
  mRNA product Design e-2 comprising derived and/or modified sequence from HRSV(Memphis-37)__AIY60640.1__F_DSCav1_mut3 (opt11)
gggagacccgugacccggaaguuguacggcuacgcgacuuucccucccacaaacccucgcgcccuuccuuuccuacuugggcccggcagaaagcuuaccauggaacuccccauccucaaaaccaacgccauuaccacgauccucgccgcagucacccucugcuucgccuccucacaaaacaucacagaagaauuuuaccaaaguaccugcuccgccgucagcaaaggauaccucggcgcccuccgcaccggcugguacacauccgucauaaccaucgaacucagcaacaucaaagaaaucaaauguaacggaaccgacgccaaaguaaaacuaauaaaacaagaacucgacaaauacaagaacgccgucaccgaccuccaacuccucaugcaaucuacccccgccgccggcucagguagcgccaucugcagcgguauugccgucugcaaaguacuccaccuagaaggagaagucaauaaaaucaaaaacgcccuacucuccaccaacaaggcagucgucagccucuccaacggcgucucagucuuaaccuucaaagugcucgaccucaaaaauuacauagacaaacaacuacuccccauucucaacaaacaauccugcuccauacccaacauagaaaccgucauugaauuucaacagaaaaacaaccgccuccucgaaaucacgcgcgaguucagugucaacgccggcgucaccaccccagucucgacauacaugcucacaaacucagaacuccucucguuaaucaacgacaugccaauaaccaacgaccaaaagaaacuaauguccaacaacguucaaauaguucgccaacaaucauacuccauaaugugcaucaucaaagaagaaguccucgccuacguuguacaauuaccccucuacggcgucaucgacacaccaugcuggaaacuccacacaucgccccucugcaccaccaacaccaaagaaggcagcaacauuugccucacccggacagaccgcggcugguacugcgacaaugcaggcagcgucucauucuucccacaagccgaaaccugcaaaguccaaagcaaccgugucuucugcgacacaaugaacucccuuacccucccaagcgaaguaaaccucugcaauauugacaucuucaaccccaaauacgacugcaaaaucaugaccuccaaaaccgacgucuccucaucagucaucaccucccuuggcgccauugucuccuguuacgguaaaaccaaaugcaccgccuccaacaaaaaccgcggcaucaucaaaaccuucucuaacggcugcgacuacgucucaaacaaaggcgucgacacugucuccgucggcaacacccuauacugcgucaacaagcaagaaggacagucccuauacguaaaaggugaaccaauuaucaacuucuacgacccccuagucuucccauccgacgaguucgaugccuccaucucccaaguaaaugaaaagaucaaucaaagccuggccuucauccgcaaauccgacgaacuacuccacaaugucaacgucggaaaaucaacaacaaacaucaugaucaccaccaucaucaucgucaucauaguaauccuccuacugcucaucgccgucggucucuuccuauacugcaaagcccguucuacuccagucacccucuccaaagaccaacuaucaggaaucaacaacaucgccuucagcaacuaaggacuaguguccaccugucccuccugggcugcuggauugucucguuuuccugccaaauaaacaggaucagcgcuuuacagaucuaaaaaaaaaaaaaaaaaaaaaaaaaaaaaaaaaaaaaaaaaaaaaaaaaaaaaaaaaaaaaaaaugcaucccccccccccccccccccccccccccccccaaaggcucuuuucagagccaccagaauu

SEQ ID NO: 15601 - RNA, 1889 nt, Artificial Sequence
  mRNA product Design e-3 comprising derived and/or modified sequence from HRSV(Memphis-37)__AIY60640.1__F_DSCav1_mut3 (opt1)
gggagacuuucccauucuguagcagaauuugguguugccuguggucuuggucccgcggagaagcuuaccauggagcugcccauccucaagaccaacgccaucaccacgauccuggccgcggugacccugugcuucgccagcucccagaacaucaccgaggaguucuaccagagcacgugcuccgccgucagcaagggcuaccucggcgcccugcgcaccgggugguacaccagcgugaucaccaucgagcuguccaacaucaaggagaucaagugcaacggcaccgacgccaaggugaagcucaucaagcaggagcuggacaaguacaagaacgcggucacggaccugcagcuccugaugcagagcaccccggccgccggcuccgggagcgcgaucugcuccggcaucgccgucugcaaggugcugcaccucgagggcgaggugaacaagaucaagaacgcccugcuguccaccaacaaggccgucgugagccucuccaacggggugagcguccugaccuucaaggugcuggaccucaagaacuacaucgacaagcagcugcugcccauccugaacaagcagagcugcuccauccccaacaucgagaccgucaucgaguuccagcagaagaacaaccgccuccuggagaucacgcgggaguucagcgugaacgcgggcgugaccacccccgucuccaccuacaugcugacgaacagcgagcuccugucccugaucaacgacaugccgaucaccaacgaccagaagaagcucaugagcaacaacgugcagaucgugcgccagcaguccuacagcaucaugugcaucaucaaggaggagguccuggccuacguggugcagcugccccucuacggggucaucgacacccccugcuggaagcugcacaccagcccccugugcacgaccaacaccaaggagggcuccaacaucugccucacccggacggaccgcgggugguacugcgacaacgccggcagcguguccuucuucccgcaggccgagaccugcaagguccagagcaaccggguguucugcgacaccaugaacucccugacccugcccagcgaggugaaccucugcaacaucgacaucuucaaccccaaguacgacugcaagaucaugacguccaagaccgacgucagcuccagcgugaucaccucccugggcgccaucgugagcugcuacgggaagaccaagugcacggcgagcaacaagaaccgcggcaucaucaagaccuucuccaacgggugcgacuacgucagcaacaagggcguggacaccguguccgucggcaacacccuguacugcgugaacaagcaggagggccagagccucuacgugaagggggagcccaucaucaacuucuacgacccgcuggucuuccccuccgacgaguucgacgccagcaucucccaggugaacgagaagaucaaccagagccuggccuucauccggaaguccgacgagcuccugcacaacgugaacgucggcaagagcaccacgaacaucaugaucaccaccaucaucaucgugaucaucgugauccugcugcuccugaucgccgucgggcuguuccucuacugcaaggcccgcuccacccccgugacgcugagcaaggaccagcuguccgggaucaacaacaucgcguucagcaacugaggacuaguguccaccugucccuccugggcugcuggauugucucguuuuccugccaaauaaacaggaucagcgcuuuacagaucuaaaaaaaaaaaaaaaaaaaaaaaaaaaaaaaaaaaaaaaaaaaaaaaaaaaaaaaaaaaaaaaaugcaucccccccccccccccccccccccccccccccaaaggcucuuuucagagccaccagaauu

SEQ ID NO: 15602 - RNA, 1889 nt, Artificial Sequence
  mRNA product Design e-3 comprising derived and/or modified sequence from HRSV(Memphis-37)__AIY60640.1__F_DSCav1_mut3 (opt1)
gggagacuuucccauucuguagcagaauuugguguugccuguggucuuggucccgcggagaagcuuaccauggagcugcccauccucaagaccaacgccaucaccacgauccuggccgcggugacccugugcuucgccagcucccagaacaucaccgaggaguucuaccagagcacgugcuccgccgucagcaagggcuaccucggggcccugcgcaccggcugguacaccuccgugaucaccaucgagcugagcaacaucaaggagaucaagugcaacgggaccgacgccaaggugaagcucaucaagcaggagcuggacaaguacaagaacgcggucacggaccugcagcuccugaugcaguccaccccggccgccggcagcggguccgccaucugcagcggcaucgcggugugcaaggugcugcaccucgagggcgaggucaacaagaucaagaacgcccugcuguccaccaacaaggccguggugagccucuccaacggggucagcgugcugaccuucaaggugcuggaccucaagaacuacaucgacaagcagcugcugcccauccucaacaagcaguccugcagcauccccaacaucgagacggucaucgaguuccagcagaagaacaaccggcugcuggagaucacccgcgaguucuccgugaacgccggcgugaccacccccgucagcacguacaugcucaccaacuccgagcugcugagccucaucaacgacaugccgaucaccaacgaccagaagaagcugaugagcaacaacgugcagaucgugcggcagcaguccuacagcaucaugugcaucaucaaggaggagguccuggccuacguggugcagcucccccuguacggggucaucgacacccccugcuggaagcugcacacgagcccccucugcaccaccaacaccaaggagggcuccaacaucugccugacgcgcaccgaccgggggugguacugcgacaacgcgggcuccgugagcuucuucccgcaggccgagaccugcaaggugcaguccaaccgcgucuucugcgacaccaugaacagccugacgcuccccuccgaggugaaccugugcaacaucgacaucuucaaccccaaguacgacugcaagaucaugaccagcaagaccgacgucuccagcuccgugaucaccagccugggcgccaucguguccugcuacgggaagacgaagugcaccgccagcaacaagaaccggggcaucaucaagaccuucuccaacgggugcgacuacgucagcaacaagggcguggacaccguguccgucggcaacacgcucuacugcgugaacaagcaggaggggcagagccuguacgugaagggcgagcccaucaucaacuucuacgacccgcuggucuuccccagcgacgaguucgacgccuccaucagccaggugaacgagaagaucaaccagucccucgcguucauccgcaagagcgacgagcugcugcacaacgugaacgucgggaaguccaccaccaacaucaugaucaccaccaucaucaucgugaucaucgugauccuccugcugcucaucgccgucggccuguuccuguacugcaaggcccggagcacgcccgugacccuguccaaggaccagcucagcgggaucaacaacaucgccuucuccaacugaggacuaguguccaccugucccuccugggcugcuggauugucucguuuuccugccaaauaaacaggaucagcgcuuuacagaucuaaaaaaaaaaaaaaaaaaaaaaaaaaaaaaaaaaaaaaaaaaaaaaaaaaaaaaaaaaaaaaaaugcaucccccccccccccccccccccccccccccccaaaggcucuuuucagagccaccagaauu

SEQ ID NO: 15603 - RNA, 1889 nt, Artificial Sequence
  mRNA product Design e-3 comprising derived and/or modified sequence from HRSV(Memphis-37)__AIY60640.1__F_DSCav1_mut3 (opt2)
gggagacuuucccauucuguagcagaauuugguguugccuguggucuuggucccgcggagaagcuuaccauggagcuccccauccucaagaccaacgccaucaccaccauccucgccgccgucacccucugcuucgccuccucccagaacaucaccgaggaguucuaccaguccaccugcuccgccgucuccaagggcuaccucggcgcccuccgcaccggcugguacaccuccgucaucaccaucgagcucuccaacaucaaggagaucaagugcaacggcaccgacgccaaggucaagcucaucaagcaggagcucgacaaguacaagaacgccgucaccgaccuccagcuccucaugcaguccacccccgccgccggcuccggcuccgccaucugcuccggcaucgccgucugcaagguccuccaccucgagggcgaggucaacaagaucaagaacgcccuccucuccaccaacaaggccgucgucucccucuccaacggcgucuccguccucaccuucaagguccucgaccucaagaacuacaucgacaagcagcuccuccccauccucaacaagcaguccugcuccauccccaacaucgagaccgucaucgaguuccagcagaagaacaaccgccuccucgagaucacccgcgaguucuccgucaacgccggcgucaccacccccgucuccaccuacaugcucaccaacuccgagcuccucucccucaucaacgacaugcccaucaccaacgaccagaagaagcucauguccaacaacguccagaucguccgccagcaguccuacuccaucaugugcaucaucaaggaggagguccucgccuacgucguccagcucccccucuacggcgucaucgacacccccugcuggaagcuccacaccuccccccucugcaccaccaacaccaaggagggcuccaacaucugccucacccgcaccgaccgcggcugguacugcgacaacgccggcuccgucuccuucuucccccaggccgagaccugcaagguccaguccaaccgcgucuucugcgacaccaugaacucccucacccuccccuccgaggucaaccucugcaacaucgacaucuucaaccccaaguacgacugcaagaucaugaccuccaagaccgacgucuccuccuccgucaucaccucccucggcgccaucgucuccugcuacggcaagaccaagugcaccgccuccaacaagaaccgcggcaucaucaagaccuucuccaacggcugcgacuacgucuccaacaagggcgucgacaccgucuccgucggcaacacccucuacugcgucaacaagcaggagggccagucccucuacgucaagggcgagcccaucaucaacuucuacgacccccucgucuuccccuccgacgaguucgacgccuccaucucccaggucaacgagaagaucaaccagucccucgccuucauccgcaaguccgacgagcuccuccacaacgucaacgucggcaaguccaccaccaacaucaugaucaccaccaucaucaucgucaucaucgucauccuccuccuccucaucgccgucggccucuuccucuacugcaaggcccgcuccacccccgucacccucuccaaggaccagcucuccggcaucaacaacaucgccuucuccaacugaggacuaguguccaccugucccuccugggcugcuggauugucucguuuuccugccaaauaaacaggaucagcgcuuuacagaucuaaaaaaaaaaaaaaaaaaaaaaaaaaaaaaaaaaaaaaaaaaaaaaaaaaaaaaaaaaaaaaaaugcaucccccccccccccccccccccccccccccccaaaggcucuuuucagagccaccagaauu

SEQ ID NO: 15604 - RNA, 1889 nt, Artificial Sequence
  mRNA product Design e-3 comprising derived and/or modified sequence from HRSV(Memphis-37)__AIY60640.1__F_DSCav1_mut3 (opt3)
gggagacuuucccauucuguagcagaauuugguguugccuguggucuuggucccgcggagaagcuuaccauggagcugcccauccucaagaccaacgccauuacaacuauacuugcugcagugacgcugugcuucgccagcucccagaauaucaccgaagaguuuuaccaaucuacauguucagcggucaguaaaggcuauuugggggcuuuaagaacuggaugguacaccagcguuauuacaaucgaacuguccaacauuaaggagaucaaaugcaaugguaccgacgccaaggugaaacuaauaaagcaggaacucgauaaguauaaaaacgcaguaacugaccugcagcuucugaugcagucuacuccugccgcuggcucggggucagcaaucuguagcggaauugccgugugcaaggucuugcaccucgagggcgaggugaauaaaaucaagaacgcucugcugaguaccaauaaagccguugugucccucucuaacggugucagcguguuaacguucaagguacuggaucuuaagaauuacauugacaaacaauugcugccaauccuaaacaagcaguccuguucaauaccgaauauugaaacuguuaucgaguuucagcagaaaaacaauaggcuccuggaaauuacccgggaguucagugugaacgcgggggucacaacucccgugagcaccuauaugcuuacaaauucugagcuguugucccucaucaacgauaugccuaucaccaacgaccaaaagaaacugaugucaaauaacgugcagauuguccgccagcagagcuacaguauaaugugcaucauuaaggaagagguuuuagcauaugugguacaacugccacucuacggagugaucgauacgcccuguuggaaacuucauacuucuccucugugcacaaccaauacuaaggaaggcuccaacauauguuugacacgaaccgaccguggcugguacugcgauaaugccgggagcgucucguuuuucccacaggcugagacguguaaggugcagucuaacagaguuuucugcgacaccaugaacucccuaacacugcccucagaagugaaucucugcaauauugauaucuucaacccuaaauaugacuguaagaucaugacaaguaaaaccgaugucagcuccucugugauuacaagccugggagccaucguaucaugcuacgguaagacuaaauguaccgcaaguaauaagaacaggggcauuauaaagacauuuuccaaugggugcgacuauguuagcaacaaaggaguggacaccgucucugugggcaauacucuuuacugugucaacaagcaagagggucagucacuguaugugaaaggggagccaaucauuaacuucuacgauccguugguuuuucccagugacgaauuugaugcuagcaucucccaggugaaugagaagaucaaccagucucucgccuuuauucggaaaucggacgaacuguuacacaauguaaacgucggaaagagcacgacaaauauaaugaucaccacuauuaucauugugaucauaguuauccugcuacuccugauugcggugggccuuuucuuguauugcaaggcccgcuccaccccugucacacugucaaaagaucaacucaguggcaucaacaauauugcauucucuaacugaggacuaguguccaccugucccuccugggcugcuggauugucucguuuuccugccaaauaaacaggaucagcgcuuuacagaucuaaaaaaaaaaaaaaaaaaaaaaaaaaaaaaaaaaaaaaaaaaaaaaaaaaaaaaaaaaaaaaaaugcaucccccccccccccccccccccccccccccccaaaggcucuuuucagagccaccagaauu

SEQ ID NO: 15605 - RNA, 1889 nt, Artificial Sequence
  mRNA product Design e-3 comprising derived and/or modified sequence from HRSV(Memphis-37)__AIY60640.1__F_DSCav1_mut3 (opt4)
gggagacuuucccauucuguagcagaauuugguguugccuguggucuuggucccgcggagaagcuuaccauggagcugcccauccugaagaccaacgccaucaccaccauccuggccgccgugacccugugcuucgccagcagccagaacaucaccgaggaguucuaccagagcaccugcagcgccgugagcaagggcuaccugggcgcccugagaaccggcugguacaccagcgugaucaccaucgagcugagcaacaucaaggagaucaagugcaacggcaccgacgccaaggugaagcugaucaagcaggagcuggacaaguacaagaacgccgugaccgaccugcagcugcugaugcagagcacccccgccgccggcagcggcagcgccaucugcagcggcaucgccgugugcaaggugcugcaccuggagggcgaggugaacaagaucaagaacgcccugcugagcaccaacaaggccguggugagccugagcaacggcgugagcgugcugaccuucaaggugcuggaccugaagaacuacaucgacaagcagcugcugcccauccugaacaagcagagcugcagcauccccaacaucgagaccgugaucgaguuccagcagaagaacaacagacugcuggagaucaccagagaguucagcgugaacgccggcgugaccacccccgugagcaccuacaugcugaccaacagcgagcugcugagccugaucaacgacaugcccaucaccaacgaccagaagaagcugaugagcaacaacgugcagaucgugagacagcagagcuacagcaucaugugcaucaucaaggaggaggugcuggccuacguggugcagcugccccuguacggcgugaucgacacccccugcuggaagcugcacaccagcccccugugcaccaccaacaccaaggagggcagcaacaucugccugaccagaaccgacagaggcugguacugcgacaacgccggcagcgugagcuucuucccccaggccgagaccugcaaggugcagagcaacagaguguucugcgacaccaugaacagccugacccugcccagcgaggugaaccugugcaacaucgacaucuucaaccccaaguacgacugcaagaucaugaccagcaagaccgacgugagcagcagcgugaucaccagccugggcgccaucgugagcugcuacggcaagaccaagugcaccgccagcaacaagaacagaggcaucaucaagaccuucagcaacggcugcgacuacgugagcaacaagggcguggacaccgugagcgugggcaacacccuguacugcgugaacaagcaggagggccagagccuguacgugaagggcgagcccaucaucaacuucuacgacccccugguguuccccagcgacgaguucgacgccagcaucagccaggugaacgagaagaucaaccagagccuggccuucaucagaaagagcgacgagcugcugcacaacgugaacgugggcaagagcaccaccaacaucaugaucaccaccaucaucaucgugaucaucgugauccugcugcugcugaucgccgugggccuguuccuguacugcaaggccagaagcacccccgugacccugagcaaggaccagcugagcggcaucaacaacaucgccuucagcaacugaggacuaguguccaccugucccuccugggcugcuggauugucucguuuuccugccaaauaaacaggaucagcgcuuuacagaucuaaaaaaaaaaaaaaaaaaaaaaaaaaaaaaaaaaaaaaaaaaaaaaaaaaaaaaaaaaaaaaaaugcaucccccccccccccccccccccccccccccccaaaggcucuuuucagagccaccagaauu

SEQ ID NO: 15606 - RNA, 1889 nt, Artificial Sequence
  mRNA product Design e-3 comprising derived and/or modified sequence from HRSV(Memphis-37)__AIY60640.1__F_DSCav1_mut3 (opt5)
gggagacuuucccauucuguagcagaauuugguguugccuguggucuuggucccgcggagaagcuuaccauggagcugcccauccucaagaccaacgccauuacaacgauccuggcugccgugacccuuugcuucgcgagcucccagaauauuacagaagaguuuuaccaaucuaccuguagcgcugucuccaaaggcuaucugggggcccucagaacaggaugguacaccucuguuaucacaauugaacugagcaacaucaaggagaucaaaugcaauggcaccgacgccaaggugaaacuuauuaagcaggaacuggauaaguauaaaaacgcugugacggaccuccagcugcugaugcaguccaccccugccgcugggucuggaagcgccaucuguuccggcauugcggucugcaaggugcuccaccuggagggggagguuaauaaaaucaagaacgcccuucugagcacaaauaaagcuguggucucucucuccaacggagugagcguucugaccuucaaggugcuugaucugaagaauuacauugacaaacaacuccugccgauccugaacaagcagucuuguuccauucccaauaucgaaacagucaucgaguuucagcagaaaaacaaucggcuccuggaaauuacccgcgaguucagcgugaacgccggcgugacgacaccugucucuaccuauaugcuuacaaauuccgagcugcucagccugaucaacgauaugcccauuaccaacgaccaaaagaaacuuauguccaauaacguucagaucgugagacagcagucuuacagcauuaugugcaucaucaaggaagaggugcuggcuuaugucgugcaacucccucuguacggcguuauugauacccccuguuggaaacugcauacauccccucucugcacgaccaauacaaaggaagggagcaacaucugucugacccggacagaccgcggaugguacugcgauaaugccggcucuguguccuuuuucccgcaggcggagaccuguaagguccagagcaacagaguguuuugcgacacgaugaacucucuuacacugcccagcgaaguuaaucucugcaauauugauaucuucaacccuaaauaugacuguaagauuaugaccuccaaaaccgaugugucuagcuccgucaucacaagccugggggccaucgugucuugcuacggaaagaccaaauguacagcuuccaauaagaaccggggcauuaucaagacguuuagcaaugggugcgacuaugucucuaacaaaggaguggacaccguuuccgugggcaauacacuuuacugugucaacaagcaagagggccagagccuguaugugaaaggggagcccauuaucaacuucuacgauccucucguuuuucccuccgacgaguucgaugccucuauuagccaggugaaugaaaagaucaaccagucccuggcuuuuauucgcaaaucugacgaacugcuccacaaugucaacgugggaaagagcaccacaaauaucaugaucaccacgauuaucauugugaucauuguuauccugcuucugcucaucgccgucggccuguuccuguauugcaaggccagauccaccccggugacacuuagcaaagaucaacucucugggauuaacaauaucgcuuucuccaacugaggacuaguguccaccugucccuccugggcugcuggauugucucguuuuccugccaaauaaacaggaucagcgcuuuacagaucuaaaaaaaaaaaaaaaaaaaaaaaaaaaaaaaaaaaaaaaaaaaaaaaaaaaaaaaaaaaaaaaaugcaucccccccccccccccccccccccccccccccaaaggcucuuuucagagccaccagaauu

SEQ ID NO: 15607 - RNA, 1889 nt, Artificial Sequence
  mRNA product Design e-3 comprising derived and/or modified sequence from HRSV(Memphis-37)__AIY60640.1__F_DSCav1_mut3 (opt6)
gggagacuuucccauucuguagcagaauuugguguugccuguggucuuggucccgcggagaagcuuaccauggaauuaccaauacuaaaaacaaaugccaucaccaccauccuggccgccguaacauuaugcuucgcaaguucacaaaauauaacagaagaauuuuaucaaucaacuugcagcgccguaucaaaaggcuacuuaggcgcacuacguacaggaugguacacaucaguaauaaccauagaacuauccaauauuaaagaaauaaaaugcaauggaacagacgcaaaaguuaaacuaauaaaacaagaauuagacaaauacaaaaacgcaguaaccgaccuucaauuacuaaugcaaucuacccccgcugcagguuccggaucagcaauauguucaggaauugcaguaugcaaaguccuacacuuagaaggagaaguaaacaaaauaaaaaacgcacuauuaagcaccaauaaagcagucguaucauuauccaacggcguuucaguacuaacauuuaaaguacuugaccuaaaaaacuauauagacaaacaacuacuucccauccuuaacaaacaaagcugcucaauaccuaauaucgaaacaguaauagaauuucaacaaaaaaacaaucgauuauuagaaaucacacgagaauuuucugucaacgcaggagucaccacacccguaucuacuuauauguuaaccaacucugaauuauuaucacuaaucaaugacaugccaauaacaaacgaucaaaaaaaauuaaugucaaauaacguacaaauaguaagacaacaaucauacucaauaaugugcauuauaaaagaagaaguacuagccuauguuguacaacucccacucuacggcguaauagacacaccaugcuggaaauuacacacuucaccacuaugcacaacaaacacaaaagaaggaucaaacaucugccuaaccagaaccgauagaggaugguauugcgacaaugccggaucaguuucauucuucccacaagcagaaacaugcaaaguacaauccaacagaguuuucugugacacaaugaacucgcuaacauuacccagcgaaguaaaccucugcaacauagacauauucaacccaaaauacgauugcaaaauaaugacuucuaaaacagauguuuccucaagcgucauaacgaguuuaggagcaauaguaagcuguuacggaaaaaccaaauguaccgcaucaaacaaaaaccgaggaauaauaaaaaccuuuucaaacggaugcgauuacgucuccaacaaaggagucgacacaguaucaguuggcaauacucuuuacugcguaaauaaacaagaaggacaaucacuauacguaaaaggcgaaccaauaauaaacuucuacgacccccucgucuucccuucagaugaauuugacgcaagcaucucacaaguuaaugaaaaaauaaaucaauccuuagcauucauacgaaaaucagacgaacuauuacacaacguaaacguaggaaaaucaacgacaaacauaaugauaacaacuaucauuauagucauaauagucauacuacuacuauuaauagccguaggcuuauuccuauacugcaaagcaagaucuacuccaguaacacucucaaaagaccaauuaucuggaauaaauaacauagcauucucuaauuaaggacuaguguccaccugucccuccugggcugcuggauugucucguuuuccugccaaauaaacaggaucagcgcuuuacagaucuaaaaaaaaaaaaaaaaaaaaaaaaaaaaaaaaaaaaaaaaaaaaaaaaaaaaaaaaaaaaaaaaugcaucccccccccccccccccccccccccccccccaaaggcucuuuucagagccaccagaauu

SEQ ID NO: 15608 - RNA, 1889 nt, Artificial Sequence
  mRNA product Design e-3 comprising derived and/or modified sequence from HRSV(Memphis-37)__AIY60640.1__F_DSCav1_mut3 (opt11)
gggagacuuucccauucuguagcagaauuugguguugccuguggucuuggucccgcggagaagcuuaccauggaacuccccauccucaaaaccaacgccauuaccacgauccucgccgcagucacccucugcuucgccuccucacaaaacaucacagaagaauuuuaccaaaguaccugcuccgccgucagcaaaggauaccucggcgcccuccgcaccggcugguacacauccgucauaaccaucgaacucagcaacaucaaagaaaucaaauguaacggaaccgacgccaaaguaaaacuaauaaaacaagaacucgacaaauacaagaacgccgucaccgaccuccaacuccucaugcaaucuacccccgccgccggcucagguagcgccaucugcagcgguauugccgucugcaaaguacuccaccuagaaggagaagucaauaaaaucaaaaacgcccuacucuccaccaacaaggcagucgucagccucuccaacggcgucucagucuuaaccuucaaagugcucgaccucaaaaauuacauagacaaacaacuacuccccauucucaacaaacaauccugcuccauacccaacauagaaaccgucauugaauuucaacagaaaaacaaccgccuccucgaaaucacgcgcgaguucagugucaacgccggcgucaccaccccagucucgacauacaugcucacaaacucagaacuccucucguuaaucaacgacaugccaauaaccaacgaccaaaagaaacuaauguccaacaacguucaaauaguucgccaacaaucauacuccauaaugugcaucaucaaagaagaaguccucgccuacguuguacaauuaccccucuacggcgucaucgacacaccaugcuggaaacuccacacaucgccccucugcaccaccaacaccaaagaaggcagcaacauuugccucacccggacagaccgcggcugguacugcgacaaugcaggcagcgucucauucuucccacaagccgaaaccugcaaaguccaaagcaaccgugucuucugcgacacaaugaacucccuuacccucccaagcgaaguaaaccucugcaauauugacaucuucaaccccaaauacgacugcaaaaucaugaccuccaaaaccgacgucuccucaucagucaucaccucccuuggcgccauugucuccuguuacgguaaaaccaaaugcaccgccuccaacaaaaaccgcggcaucaucaaaaccuucucuaacggcugcgacuacgucucaaacaaaggcgucgacacugucuccgucggcaacacccuauacugcgucaacaagcaagaaggacagucccuauacguaaaaggugaaccaauuaucaacuucuacgacccccuagucuucccauccgacgaguucgaugccuccaucucccaaguaaaugaaaagaucaaucaaagccuggccuucauccgcaaauccgacgaacuacuccacaaugucaacgucggaaaaucaacaacaaacaucaugaucaccaccaucaucaucgucaucauaguaauccuccuacugcucaucgccgucggucucuuccuauacugcaaagcccguucuacuccagucacccucuccaaagaccaacuaucaggaaucaacaacaucgccuucagcaacuaaggacuaguguccaccugucccuccugggcugcuggauugucucguuuuccugccaaauaaacaggaucagcgcuuuacagaucuaaaaaaaaaaaaaaaaaaaaaaaaaaaaaaaaaaaaaaaaaaaaaaaaaaaaaaaaaaaaaaaaugcaucccccccccccccccccccccccccccccccaaaggcucuuuucagagccaccagaauu

SEQ ID NO: 15609 - RNA, 1943 nt, Artificial Sequence
  mRNA product Design e-4 comprising derived and/or modified sequence from HRSV(Memphis-37)__AIY60640.1__F_DSCav1_mut3 (opt1)
gggagacuccugucgggcggaaguaggaggaguagaguuuaaaaacaguacucuuuuuccgguucgggacguaguugaagcaacgacaagccggauaaccgcucuugagacaggaagcuuaccauggagcugcccauccucaagaccaacgccaucaccacgauccuggccgcggugacccugugcuucgccagcucccagaacaucaccgaggaguucuaccagagcacgugcuccgccgucagcaagggcuaccucggcgcccugcgcaccgggugguacaccagcgugaucaccaucgagcuguccaacaucaaggagaucaagugcaacggcaccgacgccaaggugaagcucaucaagcaggagcuggacaaguacaagaacgcggucacggaccugcagcuccugaugcagagcaccccggccgccggcuccgggagcgcgaucugcuccggcaucgccgucugcaaggugcugcaccucgagggcgaggugaacaagaucaagaacgcccugcuguccaccaacaaggccgucgugagccucuccaacggggugagcguccugaccuucaaggugcuggaccucaagaacuacaucgacaagcagcugcugcccauccugaacaagcagagcugcuccauccccaacaucgagaccgucaucgaguuccagcagaagaacaaccgccuccuggagaucacgcgggaguucagcgugaacgcgggcgugaccacccccgucuccaccuacaugcugacgaacagcgagcuccugucccugaucaacgacaugccgaucaccaacgaccagaagaagcucaugagcaacaacgugcagaucgugcgccagcaguccuacagcaucaugugcaucaucaaggaggagguccuggccuacguggugcagcugccccucuacggggucaucgacacccccugcuggaagcugcacaccagcccccugugcacgaccaacaccaaggagggcuccaacaucugccucacccggacggaccgcgggugguacugcgacaacgccggcagcguguccuucuucccgcaggccgagaccugcaagguccagagcaaccggguguucugcgacaccaugaacucccugacccugcccagcgaggugaaccucugcaacaucgacaucuucaaccccaaguacgacugcaagaucaugacguccaagaccgacgucagcuccagcgugaucaccucccugggcgccaucgugagcugcuacgggaagaccaagugcacggcgagcaacaagaaccgcggcaucaucaagaccuucuccaacgggugcgacuacgucagcaacaagggcguggacaccguguccgucggcaacacccuguacugcgugaacaagcaggagggccagagccucuacgugaagggggagcccaucaucaacuucuacgacccgcuggucuuccccuccgacgaguucgacgccagcaucucccaggugaacgagaagaucaaccagagccuggccuucauccggaaguccgacgagcuccugcacaacgugaacgucggcaagagcaccacgaacaucaugaucaccaccaucaucaucgugaucaucgugauccugcugcuccugaucgccgucgggcuguuccucuacugcaaggcccgcuccacccccgugacgcugagcaaggaccagcuguccgggaucaacaacaucgcguucagcaacugaggacuaguguccaccugucccuccugggcugcuggauugucucguuuuccugccaaauaaacaggaucagcgcuuuacagaucuaaaaaaaaaaaaaaaaaaaaaaaaaaaaaaaaaaaaaaaaaaaaaaaaaaaaaaaaaaaaaaaaugcaucccccccccccccccccccccccccccccccaaaggcucuuuucagagccaccagaauu

SEQ ID NO: 15610 - RNA, 1943 nt, Artificial Sequence
  mRNA product Design e-4 comprising derived and/or modified sequence from HRSV(Memphis-37)__AIY60640.1__F_DSCav1_mut3 (opt1)
gggagacuccugucgggcggaaguaggaggaguagaguuuaaaaacaguacucuuuuuccgguucgggacguaguugaagcaacgacaagccggauaaccgcucuugagacaggaagcuuaccauggagcugcccauccucaagaccaacgccaucaccacgauccuggccgcggugacccugugcuucgccagcucccagaacaucaccgaggaguucuaccagagcacgugcuccgccgucagcaagggcuaccucggggcccugcgcaccggcugguacaccuccgugaucaccaucgagcugagcaacaucaaggagaucaagugcaacgggaccgacgccaaggugaagcucaucaagcaggagcuggacaaguacaagaacgcggucacggaccugcagcuccugaugcaguccaccccggccgccggcagcggguccgccaucugcagcggcaucgcggugugcaaggugcugcaccucgagggcgaggucaacaagaucaagaacgcccugcuguccaccaacaaggccguggugagccucuccaacggggucagcgugcugaccuucaaggugcuggaccucaagaacuacaucgacaagcagcugcugcccauccucaacaagcaguccugcagcauccccaacaucgagacggucaucgaguuccagcagaagaacaaccggcugcuggagaucacccgcgaguucuccgugaacgccggcgugaccacccccgucagcacguacaugcucaccaacuccgagcugcugagccucaucaacgacaugccgaucaccaacgaccagaagaagcugaugagcaacaacgugcagaucgugcggcagcaguccuacagcaucaugugcaucaucaaggaggagguccuggccuacguggugcagcucccccuguacggggucaucgacacccccugcuggaagcugcacacgagcccccucugcaccaccaacaccaaggagggcuccaacaucugccugacgcgcaccgaccgggggugguacugcgacaacgcgggcuccgugagcuucuucccgcaggccgagaccugcaaggugcaguccaaccgcgucuucugcgacaccaugaacagccugacgcuccccuccgaggugaaccugugcaacaucgacaucuucaaccccaaguacgacugcaagaucaugaccagcaagaccgacgucuccagcuccgugaucaccagccugggcgccaucguguccugcuacgggaagacgaagugcaccgccagcaacaagaaccggggcaucaucaagaccuucuccaacgggugcgacuacgucagcaacaagggcguggacaccguguccgucggcaacacgcucuacugcgugaacaagcaggaggggcagagccuguacgugaagggcgagcccaucaucaacuucuacgacccgcuggucuuccccagcgacgaguucgacgccuccaucagccaggugaacgagaagaucaaccagucccucgcguucauccgcaagagcgacgagcugcugcacaacgugaacgucgggaaguccaccaccaacaucaugaucaccaccaucaucaucgugaucaucgugauccuccugcugcucaucgccgucggccuguuccuguacugcaaggcccggagcacgcccgugacccuguccaaggaccagcucagcgggaucaacaacaucgccuucuccaacugaggacuaguguccaccugucccuccugggcugcuggauugucucguuuuccugccaaauaaacaggaucagcgcuuuacagaucuaaaaaaaaaaaaaaaaaaaaaaaaaaaaaaaaaaaaaaaaaaaaaaaaaaaaaaaaaaaaaaaaugcaucccccccccccccccccccccccccccccccaaaggcucuuuucagagccaccagaauu

SEQ ID NO: 15611 - RNA, 1943 nt, Artificial Sequence
  mRNA product Design e-4 comprising derived and/or modified sequence from HRSV(Memphis-37)__AIY60640.1__F_DSCav1_mut3 (opt2)
gggagacuccugucgggcggaaguaggaggaguagaguuuaaaaacaguacucuuuuuccgguucgggacguaguugaagcaacgacaagccggauaaccgcucuugagacaggaagcuuaccauggagcuccccauccucaagaccaacgccaucaccaccauccucgccgccgucacccucugcuucgccuccucccagaacaucaccgaggaguucuaccaguccaccugcuccgccgucuccaagggcuaccucggcgcccuccgcaccggcugguacaccuccgucaucaccaucgagcucuccaacaucaaggagaucaagugcaacggcaccgacgccaaggucaagcucaucaagcaggagcucgacaaguacaagaacgccgucaccgaccuccagcuccucaugcaguccacccccgccgccggcuccggcuccgccaucugcuccggcaucgccgucugcaagguccuccaccucgagggcgaggucaacaagaucaagaacgcccuccucuccaccaacaaggccgucgucucccucuccaacggcgucuccguccucaccuucaagguccucgaccucaagaacuacaucgacaagcagcuccuccccauccucaacaagcaguccugcuccauccccaacaucgagaccgucaucgaguuccagcagaagaacaaccgccuccucgagaucacccgcgaguucuccgucaacgccggcgucaccacccccgucuccaccuacaugcucaccaacuccgagcuccucucccucaucaacgacaugcccaucaccaacgaccagaagaagcucauguccaacaacguccagaucguccgccagcaguccuacuccaucaugugcaucaucaaggaggagguccucgccuacgucguccagcucccccucuacggcgucaucgacacccccugcuggaagcuccacaccuccccccucugcaccaccaacaccaaggagggcuccaacaucugccucacccgcaccgaccgcggcugguacugcgacaacgccggcuccgucuccuucuucccccaggccgagaccugcaagguccaguccaaccgcgucuucugcgacaccaugaacucccucacccuccccuccgaggucaaccucugcaacaucgacaucuucaaccccaaguacgacugcaagaucaugaccuccaagaccgacgucuccuccuccgucaucaccucccucggcgccaucgucuccugcuacggcaagaccaagugcaccgccuccaacaagaaccgcggcaucaucaagaccuucuccaacggcugcgacuacgucuccaacaagggcgucgacaccgucuccgucggcaacacccucuacugcgucaacaagcaggagggccagucccucuacgucaagggcgagcccaucaucaacuucuacgacccccucgucuuccccuccgacgaguucgacgccuccaucucccaggucaacgagaagaucaaccagucccucgccuucauccgcaaguccgacgagcuccuccacaacgucaacgucggcaaguccaccaccaacaucaugaucaccaccaucaucaucgucaucaucgucauccuccuccuccucaucgccgucggccucuuccucuacugcaaggcccgcuccacccccgucacccucuccaaggaccagcucuccggcaucaacaacaucgccuucuccaacugaggacuaguguccaccugucccuccugggcugcuggauugucucguuuuccugccaaauaaacaggaucagcgcuuuacagaucuaaaaaaaaaaaaaaaaaaaaaaaaaaaaaaaaaaaaaaaaaaaaaaaaaaaaaaaaaaaaaaaaugcaucccccccccccccccccccccccccccccccaaaggcucuuuucagagccaccagaauu

SEQ ID NO: 15612 - RNA, 1943 nt, Artificial Sequence
  mRNA product Design e-4 comprising derived and/or modified sequence from HRSV(Memphis-37)__AIY60640.1__F_DSCav1_mut3 (opt3)
gggagacuccugucgggcggaaguaggaggaguagaguuuaaaaacaguacucuuuuuccgguucgggacguaguugaagcaacgacaagccggauaaccgcucuugagacaggaagcuuaccauggagcugcccauccucaagaccaacgccauuacaacuauacuugcugcagugacgcugugcuucgccagcucccagaauaucaccgaagaguuuuaccaaucuacauguucagcggucaguaaaggcuauuugggggcuuuaagaacuggaugguacaccagcguuauuacaaucgaacuguccaacauuaaggagaucaaaugcaaugguaccgacgccaaggugaaacuaauaaagcaggaacucgauaaguauaaaaacgcaguaacugaccugcagcuucugaugcagucuacuccugccgcuggcucggggucagcaaucuguagcggaauugccgugugcaaggucuugcaccucgagggcgaggugaauaaaaucaagaacgcucugcugaguaccaauaaagccguugugucccucucuaacggugucagcguguuaacguucaagguacuggaucuuaagaauuacauugacaaacaauugcugccaauccuaaacaagcaguccuguucaauaccgaauauugaaacuguuaucgaguuucagcagaaaaacaauaggcuccuggaaauuacccgggaguucagugugaacgcgggggucacaacucccgugagcaccuauaugcuuacaaauucugagcuguugucccucaucaacgauaugccuaucaccaacgaccaaaagaaacugaugucaaauaacgugcagauuguccgccagcagagcuacaguauaaugugcaucauuaaggaagagguuuuagcauaugugguacaacugccacucuacggagugaucgauacgcccuguuggaaacuucauacuucuccucugugcacaaccaauacuaaggaaggcuccaacauauguuugacacgaaccgaccguggcugguacugcgauaaugccgggagcgucucguuuuucccacaggcugagacguguaaggugcagucuaacagaguuuucugcgacaccaugaacucccuaacacugcccucagaagugaaucucugcaauauugauaucuucaacccuaaauaugacuguaagaucaugacaaguaaaaccgaugucagcuccucugugauuacaagccugggagccaucguaucaugcuacgguaagacuaaauguaccgcaaguaauaagaacaggggcauuauaaagacauuuuccaaugggugcgacuauguuagcaacaaaggaguggacaccgucucugugggcaauacucuuuacugugucaacaagcaagagggucagucacuguaugugaaaggggagccaaucauuaacuucuacgauccguugguuuuucccagugacgaauuugaugcuagcaucucccaggugaaugagaagaucaaccagucucucgccuuuauucggaaaucggacgaacuguuacacaauguaaacgucggaaagagcacgacaaauauaaugaucaccacuauuaucauugugaucauaguuauccugcuacuccugauugcggugggccuuuucuuguauugcaaggcccgcuccaccccugucacacugucaaaagaucaacucaguggcaucaacaauauugcauucucuaacugaggacuaguguccaccugucccuccugggcugcuggauugucucguuuuccugccaaauaaacaggaucagcgcuuuacagaucuaaaaaaaaaaaaaaaaaaaaaaaaaaaaaaaaaaaaaaaaaaaaaaaaaaaaaaaaaaaaaaaaugcaucccccccccccccccccccccccccccccccaaaggcucuuuucagagccaccagaauu

SEQ ID NO: 15613 - RNA, 1943 nt, Artificial Sequence
  mRNA product Design e-4 comprising derived and/or modified sequence from HRSV(Memphis-37)__AIY60640.1__F_DSCav1_mut3 (opt4)
gggagacuccugucgggcggaaguaggaggaguagaguuuaaaaacaguacucuuuuuccgguucgggacguaguugaagcaacgacaagccggauaaccgcucuugagacaggaagcuuaccauggagcugcccauccugaagaccaacgccaucaccaccauccuggccgccgugacccugugcuucgccagcagccagaacaucaccgaggaguucuaccagagcaccugcagcgccgugagcaagggcuaccugggcgcccugagaaccggcugguacaccagcgugaucaccaucgagcugagcaacaucaaggagaucaagugcaacggcaccgacgccaaggugaagcugaucaagcaggagcuggacaaguacaagaacgccgugaccgaccugcagcugcugaugcagagcacccccgccgccggcagcggcagcgccaucugcagcggcaucgccgugugcaaggugcugcaccuggagggcgaggugaacaagaucaagaacgcccugcugagcaccaacaaggccguggugagccugagcaacggcgugagcgugcugaccuucaaggugcuggaccugaagaacuacaucgacaagcagcugcugcccauccugaacaagcagagcugcagcauccccaacaucgagaccgugaucgaguuccagcagaagaacaacagacugcuggagaucaccagagaguucagcgugaacgccggcgugaccacccccgugagcaccuacaugcugaccaacagcgagcugcugagccugaucaacgacaugcccaucaccaacgaccagaagaagcugaugagcaacaacgugcagaucgugagacagcagagcuacagcaucaugugcaucaucaaggaggaggugcuggccuacguggugcagcugccccuguacggcgugaucgacacccccugcuggaagcugcacaccagcccccugugcaccaccaacaccaaggagggcagcaacaucugccugaccagaaccgacagaggcugguacugcgacaacgccggcagcgugagcuucuucccccaggccgagaccugcaaggugcagagcaacagaguguucugcgacaccaugaacagccugacccugcccagcgaggugaaccugugcaacaucgacaucuucaaccccaaguacgacugcaagaucaugaccagcaagaccgacgugagcagcagcgugaucaccagccugggcgccaucgugagcugcuacggcaagaccaagugcaccgccagcaacaagaacagaggcaucaucaagaccuucagcaacggcugcgacuacgugagcaacaagggcguggacaccgugagcgugggcaacacccuguacugcgugaacaagcaggagggccagagccuguacgugaagggcgagcccaucaucaacuucuacgacccccugguguuccccagcgacgaguucgacgccagcaucagccaggugaacgagaagaucaaccagagccuggccuucaucagaaagagcgacgagcugcugcacaacgugaacgugggcaagagcaccaccaacaucaugaucaccaccaucaucaucgugaucaucgugauccugcugcugcugaucgccgugggccuguuccuguacugcaaggccagaagcacccccgugacccugagcaaggaccagcugagcggcaucaacaacaucgccuucagcaacugaggacuaguguccaccugucccuccugggcugcuggauugucucguuuuccugccaaauaaacaggaucagcgcuuuacagaucuaaaaaaaaaaaaaaaaaaaaaaaaaaaaaaaaaaaaaaaaaaaaaaaaaaaaaaaaaaaaaaaaugcaucccccccccccccccccccccccccccccccaaaggcucuuuucagagccaccagaauu

SEQ ID NO: 15614 - RNA, 1943 nt, Artificial Sequence
  mRNA product Design e-4 comprising derived and/or modified sequence from HRSV(Memphis-37)__AIY60640.1__F_DSCav1_mut3 (opt5)
gggagacuccugucgggcggaaguaggaggaguagaguuuaaaaacaguacucuuuuuccgguucgggacguaguugaagcaacgacaagccggauaaccgcucuugagacaggaagcuuaccauggagcugcccauccucaagaccaacgccauuacaacgauccuggcugccgugacccuuugcuucgcgagcucccagaauauuacagaagaguuuuaccaaucuaccuguagcgcugucuccaaaggcuaucugggggcccucagaacaggaugguacaccucuguuaucacaauugaacugagcaacaucaaggagaucaaaugcaauggcaccgacgccaaggugaaacuuauuaagcaggaacuggauaaguauaaaaacgcugugacggaccuccagcugcugaugcaguccaccccugccgcugggucuggaagcgccaucuguuccggcauugcggucugcaaggugcuccaccuggagggggagguuaauaaaaucaagaacgcccuucugagcacaaauaaagcuguggucucucucuccaacggagugagcguucugaccuucaaggugcuugaucugaagaauuacauugacaaacaacuccugccgauccugaacaagcagucuuguuccauucccaauaucgaaacagucaucgaguuucagcagaaaaacaaucggcuccuggaaauuacccgcgaguucagcgugaacgccggcgugacgacaccugucucuaccuauaugcuuacaaauuccgagcugcucagccugaucaacgauaugcccauuaccaacgaccaaaagaaacuuauguccaauaacguucagaucgugagacagcagucuuacagcauuaugugcaucaucaaggaagaggugcuggcuuaugucgugcaacucccucuguacggcguuauugauacccccuguuggaaacugcauacauccccucucugcacgaccaauacaaaggaagggagcaacaucugucugacccggacagaccgcggaugguacugcgauaaugccggcucuguguccuuuuucccgcaggcggagaccuguaagguccagagcaacagaguguuuugcgacacgaugaacucucuuacacugcccagcgaaguuaaucucugcaauauugauaucuucaacccuaaauaugacuguaagauuaugaccuccaaaaccgaugugucuagcuccgucaucacaagccugggggccaucgugucuugcuacggaaagaccaaauguacagcuuccaauaagaaccggggcauuaucaagacguuuagcaaugggugcgacuaugucucuaacaaaggaguggacaccguuuccgugggcaauacacuuuacugugucaacaagcaagagggccagagccuguaugugaaaggggagcccauuaucaacuucuacgauccucucguuuuucccuccgacgaguucgaugccucuauuagccaggugaaugaaaagaucaaccagucccuggcuuuuauucgcaaaucugacgaacugcuccacaaugucaacgugggaaagagcaccacaaauaucaugaucaccacgauuaucauugugaucauuguuauccugcuucugcucaucgccgucggccuguuccuguauugcaaggccagauccaccccggugacacuuagcaaagaucaacucucugggauuaacaauaucgcuuucuccaacugaggacuaguguccaccugucccuccugggcugcuggauugucucguuuuccugccaaauaaacaggaucagcgcuuuacagaucuaaaaaaaaaaaaaaaaaaaaaaaaaaaaaaaaaaaaaaaaaaaaaaaaaaaaaaaaaaaaaaaaugcaucccccccccccccccccccccccccccccccaaaggcucuuuucagagccaccagaauu

SEQ ID NO: 15615 - RNA, 1943 nt, Artificial Sequence
  mRNA product Design e-4 comprising derived and/or modified sequence from HRSV(Memphis-37)__AIY60640.1__F_DSCav1_mut3 (opt6)
gggagacuccugucgggcggaaguaggaggaguagaguuuaaaaacaguacucuuuuuccgguucgggacguaguugaagcaacgacaagccggauaaccgcucuugagacaggaagcuuaccauggaauuaccaauacuaaaaacaaaugccaucaccaccauccuggccgccguaacauuaugcuucgcaaguucacaaaauauaacagaagaauuuuaucaaucaacuugcagcgccguaucaaaaggcuacuuaggcgcacuacguacaggaugguacacaucaguaauaaccauagaacuauccaauauuaaagaaauaaaaugcaauggaacagacgcaaaaguuaaacuaauaaaacaagaauuagacaaauacaaaaacgcaguaaccgaccuucaauuacuaaugcaaucuacccccgcugcagguuccggaucagcaauauguucaggaauugcaguaugcaaaguccuacacuuagaaggagaaguaaacaaaauaaaaaacgcacuauuaagcaccaauaaagcagucguaucauuauccaacggcguuucaguacuaacauuuaaaguacuugaccuaaaaaacuauauagacaaacaacuacuucccauccuuaacaaacaaagcugcucaauaccuaauaucgaaacaguaauagaauuucaacaaaaaaacaaucgauuauuagaaaucacacgagaauuuucugucaacgcaggagucaccacacccguaucuacuuauauguuaaccaacucugaauuauuaucacuaaucaaugacaugccaauaacaaacgaucaaaaaaaauuaaugucaaauaacguacaaauaguaagacaacaaucauacucaauaaugugcauuauaaaagaagaaguacuagccuauguuguacaacucccacucuacggcguaauagacacaccaugcuggaaauuacacacuucaccacuaugcacaacaaacacaaaagaaggaucaaacaucugccuaaccagaaccgauagaggaugguauugcgacaaugccggaucaguuucauucuucccacaagcagaaacaugcaaaguacaauccaacagaguuuucugugacacaaugaacucgcuaacauuacccagcgaaguaaaccucugcaacauagacauauucaacccaaaauacgauugcaaaauaaugacuucuaaaacagauguuuccucaagcgucauaacgaguuuaggagcaauaguaagcuguuacggaaaaaccaaauguaccgcaucaaacaaaaaccgaggaauaauaaaaaccuuuucaaacggaugcgauuacgucuccaacaaaggagucgacacaguaucaguuggcaauacucuuuacugcguaaauaaacaagaaggacaaucacuauacguaaaaggcgaaccaauaauaaacuucuacgacccccucgucuucccuucagaugaauuugacgcaagcaucucacaaguuaaugaaaaaauaaaucaauccuuagcauucauacgaaaaucagacgaacuauuacacaacguaaacguaggaaaaucaacgacaaacauaaugauaacaacuaucauuauagucauaauagucauacuacuacuauuaauagccguaggcuuauuccuauacugcaaagcaagaucuacuccaguaacacucucaaaagaccaauuaucuggaauaaauaacauagcauucucuaauuaaggacuaguguccaccugucccuccugggcugcuggauugucucguuuuccugccaaauaaacaggaucagcgcuuuacagaucuaaaaaaaaaaaaaaaaaaaaaaaaaaaaaaaaaaaaaaaaaaaaaaaaaaaaaaaaaaaaaaaaugcaucccccccccccccccccccccccccccccccaaaggcucuuuucagagccaccagaauu

SEQ ID NO: 15616 - RNA, 1943 nt, Artificial Sequence
  mRNA product Design e-4 comprising derived and/or modified sequence from HRSV(Memphis-37)__AIY60640.1__F_DSCav1_mut3 (opt11)
gggagacuccugucgggcggaaguaggaggaguagaguuuaaaaacaguacucuuuuuccgguucgggacguaguugaagcaacgacaagccggauaaccgcucuugagacaggaagcuuaccauggaacuccccauccucaaaaccaacgccauuaccacgauccucgccgcagucacccucugcuucgccuccucacaaaacaucacagaagaauuuuaccaaaguaccugcuccgccgucagcaaaggauaccucggcgcccuccgcaccggcugguacacauccgucauaaccaucgaacucagcaacaucaaagaaaucaaauguaacggaaccgacgccaaaguaaaacuaauaaaacaagaacucgacaaauacaagaacgccgucaccgaccuccaacuccucaugcaaucuacccccgccgccggcucagguagcgccaucugcagcgguauugccgucugcaaaguacuccaccuagaaggagaagucaauaaaaucaaaaacgcccuacucuccaccaacaaggcagucgucagccucuccaacggcgucucagucuuaaccuucaaagugcucgaccucaaaaauuacauagacaaacaacuacuccccauucucaacaaacaauccugcuccauacccaacauagaaaccgucauugaauuucaacagaaaaacaaccgccuccucgaaaucacgcgcgaguucagugucaacgccggcgucaccaccccagucucgacauacaugcucacaaacucagaacuccucucguuaaucaacgacaugccaauaaccaacgaccaaaagaaacuaauguccaacaacguucaaauaguucgccaacaaucauacuccauaaugugcaucaucaaagaagaaguccucgccuacguuguacaauuaccccucuacggcgucaucgacacaccaugcuggaaacuccacacaucgccccucugcaccaccaacaccaaagaaggcagcaacauuugccucacccggacagaccgcggcugguacugcgacaaugcaggcagcgucucauucuucccacaagccgaaaccugcaaaguccaaagcaaccgugucuucugcgacacaaugaacucccuuacccucccaagcgaaguaaaccucugcaauauugacaucuucaaccccaaauacgacugcaaaaucaugaccuccaaaaccgacgucuccucaucagucaucaccucccuuggcgccauugucuccuguuacgguaaaaccaaaugcaccgccuccaacaaaaaccgcggcaucaucaaaaccuucucuaacggcugcgacuacgucucaaacaaaggcgucgacacugucuccgucggcaacacccuauacugcgucaacaagcaagaaggacagucccuauacguaaaaggugaaccaauuaucaacuucuacgacccccuagucuucccauccgacgaguucgaugccuccaucucccaaguaaaugaaaagaucaaucaaagccuggccuucauccgcaaauccgacgaacuacuccacaaugucaacgucggaaaaucaacaacaaacaucaugaucaccaccaucaucaucgucaucauaguaauccuccuacugcucaucgccgucggucucuuccuauacugcaaagcccguucuacuccagucacccucuccaaagaccaacuaucaggaaucaacaacaucgccuucagcaacuaaggacuaguguccaccugucccuccugggcugcuggauugucucguuuuccugccaaauaaacaggaucagcgcuuuacagaucuaaaaaaaaaaaaaaaaaaaaaaaaaaaaaaaaaaaaaaaaaaaaaaaaaaaaaaaaaaaaaaaaugcaucccccccccccccccccccccccccccccccaaaggcucuuuucagagccaccagaauu

SEQ ID NO: 15617 - RNA, 1910 nt, Artificial Sequence
  mRNA product Design e-5 comprising derived and/or modified sequence from HRSV(Memphis-37)__AIY60640.1__F_DSCav1_mut3 (opt1)
gggagagcggcucggccauuuugucccagucaguccggaggcugcggcugcagaaguaccgccugcggaguaacugcaaagaagcuuaccauggagcugcccauccucaagaccaacgccaucaccacgauccuggccgcggugacccugugcuucgccagcucccagaacaucaccgaggaguucuaccagagcacgugcuccgccgucagcaagggcuaccucggcgcccugcgcaccgggugguacaccagcgugaucaccaucgagcuguccaacaucaaggagaucaagugcaacggcaccgacgccaaggugaagcucaucaagcaggagcuggacaaguacaagaacgcggucacggaccugcagcuccugaugcagagcaccccggccgccggcuccgggagcgcgaucugcuccggcaucgccgucugcaaggugcugcaccucgagggcgaggugaacaagaucaagaacgcccugcuguccaccaacaaggccgucgugagccucuccaacggggugagcguccugaccuucaaggugcuggaccucaagaacuacaucgacaagcagcugcugcccauccugaacaagcagagcugcuccauccccaacaucgagaccgucaucgaguuccagcagaagaacaaccgccuccuggagaucacgcgggaguucagcgugaacgcgggcgugaccacccccgucuccaccuacaugcugacgaacagcgagcuccugucccugaucaacgacaugccgaucaccaacgaccagaagaagcucaugagcaacaacgugcagaucgugcgccagcaguccuacagcaucaugugcaucaucaaggaggagguccuggccuacguggugcagcugccccucuacggggucaucgacacccccugcuggaagcugcacaccagcccccugugcacgaccaacaccaaggagggcuccaacaucugccucacccggacggaccgcgggugguacugcgacaacgccggcagcguguccuucuucccgcaggccgagaccugcaagguccagagcaaccggguguucugcgacaccaugaacucccugacccugcccagcgaggugaaccucugcaacaucgacaucuucaaccccaaguacgacugcaagaucaugacguccaagaccgacgucagcuccagcgugaucaccucccugggcgccaucgugagcugcuacgggaagaccaagugcacggcgagcaacaagaaccgcggcaucaucaagaccuucuccaacgggugcgacuacgucagcaacaagggcguggacaccguguccgucggcaacacccuguacugcgugaacaagcaggagggccagagccucuacgugaagggggagcccaucaucaacuucuacgacccgcuggucuuccccuccgacgaguucgacgccagcaucucccaggugaacgagaagaucaaccagagccuggccuucauccggaaguccgacgagcuccugcacaacgugaacgucggcaagagcaccacgaacaucaugaucaccaccaucaucaucgugaucaucgugauccugcugcuccugaucgccgucgggcuguuccucuacugcaaggcccgcuccacccccgugacgcugagcaaggaccagcuguccgggaucaacaacaucgcguucagcaacugaggacuaguguccaccugucccuccugggcugcuggauugucucguuuuccugccaaauaaacaggaucagcgcuuuacagaucuaaaaaaaaaaaaaaaaaaaaaaaaaaaaaaaaaaaaaaaaaaaaaaaaaaaaaaaaaaaaaaaaugcaucccccccccccccccccccccccccccccccaaaggcucuuuucagagccaccagaauu

SEQ ID NO: 15618 - RNA, 1910 nt, Artificial Sequence
  mRNA product Design e-5 comprising derived and/or modified sequence from HRSV(Memphis-37)__AIY60640.1__F_DSCav1_mut3 (opt1)
gggagagcggcucggccauuuugucccagucaguccggaggcugcggcugcagaaguaccgccugcggaguaacugcaaagaagcuuaccauggagcugcccauccucaagaccaacgccaucaccacgauccuggccgcggugacccugugcuucgccagcucccagaacaucaccgaggaguucuaccagagcacgugcuccgccgucagcaagggcuaccucggggcccugcgcaccggcugguacaccuccgugaucaccaucgagcugagcaacaucaaggagaucaagugcaacgggaccgacgccaaggugaagcucaucaagcaggagcuggacaaguacaagaacgcggucacggaccugcagcuccugaugcaguccaccccggccgccggcagcggguccgccaucugcagcggcaucgcggugugcaaggugcugcaccucgagggcgaggucaacaagaucaagaacgcccugcuguccaccaacaaggccguggugagccucuccaacggggucagcgugcugaccuucaaggugcuggaccucaagaacuacaucgacaagcagcugcugcccauccucaacaagcaguccugcagcauccccaacaucgagacggucaucgaguuccagcagaagaacaaccggcugcuggagaucacccgcgaguucuccgugaacgccggcgugaccacccccgucagcacguacaugcucaccaacuccgagcugcugagccucaucaacgacaugccgaucaccaacgaccagaagaagcugaugagcaacaacgugcagaucgugcggcagcaguccuacagcaucaugugcaucaucaaggaggagguccuggccuacguggugcagcucccccuguacggggucaucgacacccccugcuggaagcugcacacgagcccccucugcaccaccaacaccaaggagggcuccaacaucugccugacgcgcaccgaccgggggugguacugcgacaacgcgggcuccgugagcuucuucccgcaggccgagaccugcaaggugcaguccaaccgcgucuucugcgacaccaugaacagccugacgcuccccuccgaggugaaccugugcaacaucgacaucuucaaccccaaguacgacugcaagaucaugaccagcaagaccgacgucuccagcuccgugaucaccagccugggcgccaucguguccugcuacgggaagacgaagugcaccgccagcaacaagaaccggggcaucaucaagaccuucuccaacgggugcgacuacgucagcaacaagggcguggacaccguguccgucggcaacacgcucuacugcgugaacaagcaggaggggcagagccuguacgugaagggcgagcccaucaucaacuucuacgacccgcuggucuuccccagcgacgaguucgacgccuccaucagccaggugaacgagaagaucaaccagucccucgcguucauccgcaagagcgacgagcugcugcacaacgugaacgucgggaaguccaccaccaacaucaugaucaccaccaucaucaucgugaucaucgugauccuccugcugcucaucgccgucggccuguuccuguacugcaaggcccggagcacgcccgugacccuguccaaggaccagcucagcgggaucaacaacaucgccuucuccaacugaggacuaguguccaccugucccuccugggcugcuggauugucucguuuuccugccaaauaaacaggaucagcgcuuuacagaucuaaaaaaaaaaaaaaaaaaaaaaaaaaaaaaaaaaaaaaaaaaaaaaaaaaaaaaaaaaaaaaaaugcaucccccccccccccccccccccccccccccccaaaggcucuuuucagagccaccagaauu

SEQ ID NO: 15619 - RNA, 1910 nt, Artificial Sequence
  mRNA product Design e-5 comprising derived and/or modified sequence from HRSV(Memphis-37)__AIY60640.1__F_DSCav1_mut3 (opt2)
gggagagcggcucggccauuuugucccagucaguccggaggcugcggcugcagaaguaccgccugcggaguaacugcaaagaagcuuaccauggagcuccccauccucaagaccaacgccaucaccaccauccucgccgccgucacccucugcuucgccuccucccagaacaucaccgaggaguucuaccaguccaccugcuccgccgucuccaagggcuaccucggcgcccuccgcaccggcugguacaccuccgucaucaccaucgagcucuccaacaucaaggagaucaagugcaacggcaccgacgccaaggucaagcucaucaagcaggagcucgacaaguacaagaacgccgucaccgaccuccagcuccucaugcaguccacccccgccgccggcuccggcuccgccaucugcuccggcaucgccgucugcaagguccuccaccucgagggcgaggucaacaagaucaagaacgcccuccucuccaccaacaaggccgucgucucccucuccaacggcgucuccguccucaccuucaagguccucgaccucaagaacuacaucgacaagcagcuccuccccauccucaacaagcaguccugcuccauccccaacaucgagaccgucaucgaguuccagcagaagaacaaccgccuccucgagaucacccgcgaguucuccgucaacgccggcgucaccacccccgucuccaccuacaugcucaccaacuccgagcuccucucccucaucaacgacaugcccaucaccaacgaccagaagaagcucauguccaacaacguccagaucguccgccagcaguccuacuccaucaugugcaucaucaaggaggagguccucgccuacgucguccagcucccccucuacggcgucaucgacacccccugcuggaagcuccacaccuccccccucugcaccaccaacaccaaggagggcuccaacaucugccucacccgcaccgaccgcggcugguacugcgacaacgccggcuccgucuccuucuucccccaggccgagaccugcaagguccaguccaaccgcgucuucugcgacaccaugaacucccucacccuccccuccgaggucaaccucugcaacaucgacaucuucaaccccaaguacgacugcaagaucaugaccuccaagaccgacgucuccuccuccgucaucaccucccucggcgccaucgucuccugcuacggcaagaccaagugcaccgccuccaacaagaaccgcggcaucaucaagaccuucuccaacggcugcgacuacgucuccaacaagggcgucgacaccgucuccgucggcaacacccucuacugcgucaacaagcaggagggccagucccucuacgucaagggcgagcccaucaucaacuucuacgacccccucgucuuccccuccgacgaguucgacgccuccaucucccaggucaacgagaagaucaaccagucccucgccuucauccgcaaguccgacgagcuccuccacaacgucaacgucggcaaguccaccaccaacaucaugaucaccaccaucaucaucgucaucaucgucauccuccuccuccucaucgccgucggccucuuccucuacugcaaggcccgcuccacccccgucacccucuccaaggaccagcucuccggcaucaacaacaucgccuucuccaacugaggacuaguguccaccugucccuccugggcugcuggauugucucguuuuccugccaaauaaacaggaucagcgcuuuacagaucuaaaaaaaaaaaaaaaaaaaaaaaaaaaaaaaaaaaaaaaaaaaaaaaaaaaaaaaaaaaaaaaaugcaucccccccccccccccccccccccccccccccaaaggcucuuuucagagccaccagaauu

SEQ ID NO: 15620 - RNA, 1910 nt, Artificial Sequence
  mRNA product Design e-5 comprising derived and/or modified sequence from HRSV(Memphis-37)__AIY60640.1__F_DSCav1_mut3 (opt3)
gggagagcggcucggccauuuugucccagucaguccggaggcugcggcugcagaaguaccgccugcggaguaacugcaaagaagcuuaccauggagcugcccauccucaagaccaacgccauuacaacuauacuugcugcagugacgcugugcuucgccagcucccagaauaucaccgaagaguuuuaccaaucuacauguucagcggucaguaaaggcuauuugggggcuuuaagaacuggaugguacaccagcguuauuacaaucgaacuguccaacauuaaggagaucaaaugcaaugguaccgacgccaaggugaaacuaauaaagcaggaacucgauaaguauaaaaacgcaguaacugaccugcagcuucugaugcagucuacuccugccgcuggcucggggucagcaaucuguagcggaauugccgugugcaaggucuugcaccucgagggcgaggugaauaaaaucaagaacgcucugcugaguaccaauaaagccguugugucccucucuaacggugucagcguguuaacguucaagguacuggaucuuaagaauuacauugacaaacaauugcugccaauccuaaacaagcaguccuguucaauaccgaauauugaaacuguuaucgaguuucagcagaaaaacaauaggcuccuggaaauuacccgggaguucagugugaacgcgggggucacaacucccgugagcaccuauaugcuuacaaauucugagcuguugucccucaucaacgauaugccuaucaccaacgaccaaaagaaacugaugucaaauaacgugcagauuguccgccagcagagcuacaguauaaugugcaucauuaaggaagagguuuuagcauaugugguacaacugccacucuacggagugaucgauacgcccuguuggaaacuucauacuucuccucugugcacaaccaauacuaaggaaggcuccaacauauguuugacacgaaccgaccguggcugguacugcgauaaugccgggagcgucucguuuuucccacaggcugagacguguaaggugcagucuaacagaguuuucugcgacaccaugaacucccuaacacugcccucagaagugaaucucugcaauauugauaucuucaacccuaaauaugacuguaagaucaugacaaguaaaaccgaugucagcuccucugugauuacaagccugggagccaucguaucaugcuacgguaagacuaaauguaccgcaaguaauaagaacaggggcauuauaaagacauuuuccaaugggugcgacuauguuagcaacaaaggaguggacaccgucucugugggcaauacucuuuacugugucaacaagcaagagggucagucacuguaugugaaaggggagccaaucauuaacuucuacgauccguugguuuuucccagugacgaauuugaugcuagcaucucccaggugaaugagaagaucaaccagucucucgccuuuauucggaaaucggacgaacuguuacacaauguaaacgucggaaagagcacgacaaauauaaugaucaccacuauuaucauugugaucauaguuauccugcuacuccugauugcggugggccuuuucuuguauugcaaggcccgcuccaccccugucacacugucaaaagaucaacucaguggcaucaacaauauugcauucucuaacugaggacuaguguccaccugucccuccugggcugcuggauugucucguuuuccugccaaauaaacaggaucagcgcuuuacagaucuaaaaaaaaaaaaaaaaaaaaaaaaaaaaaaaaaaaaaaaaaaaaaaaaaaaaaaaaaaaaaaaaugcaucccccccccccccccccccccccccccccccaaaggcucuuuucagagccaccagaauu

SEQ ID NO: 15621 - RNA, 1910 nt, Artificial Sequence
  mRNA product Design e-5 comprising derived and/or modified sequence from HRSV(Memphis-37)__AIY60640.1__F_DSCav1_mut3 (opt4)
gggagagcggcucggccauuuugucccagucaguccggaggcugcggcugcagaaguaccgccugcggaguaacugcaaagaagcuuaccauggagcugcccauccugaagaccaacgccaucaccaccauccuggccgccgugacccugugcuucgccagcagccagaacaucaccgaggaguucuaccagagcaccugcagcgccgugagcaagggcuaccugggcgcccugagaaccggcugguacaccagcgugaucaccaucgagcugagcaacaucaaggagaucaagugcaacggcaccgacgccaaggugaagcugaucaagcaggagcuggacaaguacaagaacgccgugaccgaccugcagcugcugaugcagagcacccccgccgccggcagcggcagcgccaucugcagcggcaucgccgugugcaaggugcugcaccuggagggcgaggugaacaagaucaagaacgcccugcugagcaccaacaaggccguggugagccugagcaacggcgugagcgugcugaccuucaaggugcuggaccugaagaacuacaucgacaagcagcugcugcccauccugaacaagcagagcugcagcauccccaacaucgagaccgugaucgaguuccagcagaagaacaacagacugcuggagaucaccagagaguucagcgugaacgccggcgugaccacccccgugagcaccuacaugcugaccaacagcgagcugcugagccugaucaacgacaugcccaucaccaacgaccagaagaagcugaugagcaacaacgugcagaucgugagacagcagagcuacagcaucaugugcaucaucaaggaggaggugcuggccuacguggugcagcugccccuguacggcgugaucgacacccccugcuggaagcugcacaccagcccccugugcaccaccaacaccaaggagggcagcaacaucugccugaccagaaccgacagaggcugguacugcgacaacgccggcagcgugagcuucuucccccaggccgagaccugcaaggugcagagcaacagaguguucugcgacaccaugaacagccugacccugcccagcgaggugaaccugugcaacaucgacaucuucaaccccaaguacgacugcaagaucaugaccagcaagaccgacgugagcagcagcgugaucaccagccugggcgccaucgugagcugcuacggcaagaccaagugcaccgccagcaacaagaacagaggcaucaucaagaccuucagcaacggcugcgacuacgugagcaacaagggcguggacaccgugagcgugggcaacacccuguacugcgugaacaagcaggagggccagagccuguacgugaagggcgagcccaucaucaacuucuacgacccccugguguuccccagcgacgaguucgacgccagcaucagccaggugaacgagaagaucaaccagagccuggccuucaucagaaagagcgacgagcugcugcacaacgugaacgugggcaagagcaccaccaacaucaugaucaccaccaucaucaucgugaucaucgugauccugcugcugcugaucgccgugggccuguuccuguacugcaaggccagaagcacccccgugacccugagcaaggaccagcugagcggcaucaacaacaucgccuucagcaacugaggacuaguguccaccugucccuccugggcugcuggauugucucguuuuccugccaaauaaacaggaucagcgcuuuacagaucuaaaaaaaaaaaaaaaaaaaaaaaaaaaaaaaaaaaaaaaaaaaaaaaaaaaaaaaaaaaaaaaaugcaucccccccccccccccccccccccccccccccaaaggcucuuuucagagccaccagaauu

SEQ ID NO: 15622 - RNA, 1910 nt, Artificial Sequence
  mRNA product Design e-5 comprising derived and/or modified sequence from HRSV(Memphis-37)__AIY60640.1__F_DSCav1_mut3 (opt5)
gggagagcggcucggccauuuugucccagucaguccggaggcugcggcugcagaaguaccgccugcggaguaacugcaaagaagcuuaccauggagcugcccauccucaagaccaacgccauuacaacgauccuggcugccgugacccuuugcuucgcgagcucccagaauauuacagaagaguuuuaccaaucuaccuguagcgcugucuccaaaggcuaucugggggcccucagaacaggaugguacaccucuguuaucacaauugaacugagcaacaucaaggagaucaaaugcaauggcaccgacgccaaggugaaacuuauuaagcaggaacuggauaaguauaaaaacgcugugacggaccuccagcugcugaugcaguccaccccugccgcugggucuggaagcgccaucuguuccggcauugcggucugcaaggugcuccaccuggagggggagguuaauaaaaucaagaacgcccuucugagcacaaauaaagcuguggucucucucuccaacggagugagcguucugaccuucaaggugcuugaucugaagaauuacauugacaaacaacuccugccgauccugaacaagcagucuuguuccauucccaauaucgaaacagucaucgaguuucagcagaaaaacaaucggcuccuggaaauuacccgcgaguucagcgugaacgccggcgugacgacaccugucucuaccuauaugcuuacaaauuccgagcugcucagccugaucaacgauaugcccauuaccaacgaccaaaagaaacuuauguccaauaacguucagaucgugagacagcagucuuacagcauuaugugcaucaucaaggaagaggugcuggcuuaugucgugcaacucccucuguacggcguuauugauacccccuguuggaaacugcauacauccccucucugcacgaccaauacaaaggaagggagcaacaucugucugacccggacagaccgcggaugguacugcgauaaugccggcucuguguccuuuuucccgcaggcggagaccuguaagguccagagcaacagaguguuuugcgacacgaugaacucucuuacacugcccagcgaaguuaaucucugcaauauugauaucuucaacccuaaauaugacuguaagauuaugaccuccaaaaccgaugugucuagcuccgucaucacaagccugggggccaucgugucuugcuacggaaagaccaaauguacagcuuccaauaagaaccggggcauuaucaagacguuuagcaaugggugcgacuaugucucuaacaaaggaguggacaccguuuccgugggcaauacacuuuacugugucaacaagcaagagggccagagccuguaugugaaaggggagcccauuaucaacuucuacgauccucucguuuuucccuccgacgaguucgaugccucuauuagccaggugaaugaaaagaucaaccagucccuggcuuuuauucgcaaaucugacgaacugcuccacaaugucaacgugggaaagagcaccacaaauaucaugaucaccacgauuaucauugugaucauuguuauccugcuucugcucaucgccgucggccuguuccuguauugcaaggccagauccaccccggugacacuuagcaaagaucaacucucugggauuaacaauaucgcuuucuccaacugaggacuaguguccaccugucccuccugggcugcuggauugucucguuuuccugccaaauaaacaggaucagcgcuuuacagaucuaaaaaaaaaaaaaaaaaaaaaaaaaaaaaaaaaaaaaaaaaaaaaaaaaaaaaaaaaaaaaaaaugcaucccccccccccccccccccccccccccccccaaaggcucuuuucagagccaccagaauu

SEQ ID NO: 15623 - RNA, 1910 nt, Artificial Sequence
  mRNA product Design e-5 comprising derived and/or modified sequence from HRSV(Memphis-37)__AIY60640.1__F_DSCav1_mut3 (opt6)
gggagagcggcucggccauuuugucccagucaguccggaggcugcggcugcagaaguaccgccugcggaguaacugcaaagaagcuuaccauggaauuaccaauacuaaaaacaaaugccaucaccaccauccuggccgccguaacauuaugcuucgcaaguucacaaaauauaacagaagaauuuuaucaaucaacuugcagcgccguaucaaaaggcuacuuaggcgcacuacguacaggaugguacacaucaguaauaaccauagaacuauccaauauuaaagaaauaaaaugcaauggaacagacgcaaaaguuaaacuaauaaaacaagaauuagacaaauacaaaaacgcaguaaccgaccuucaauuacuaaugcaaucuacccccgcugcagguuccggaucagcaauauguucaggaauugcaguaugcaaaguccuacacuuagaaggagaaguaaacaaaauaaaaaacgcacuauuaagcaccaauaaagcagucguaucauuauccaacggcguuucaguacuaacauuuaaaguacuugaccuaaaaaacuauauagacaaacaacuacuucccauccuuaacaaacaaagcugcucaauaccuaauaucgaaacaguaauagaauuucaacaaaaaaacaaucgauuauuagaaaucacacgagaauuuucugucaacgcaggagucaccacacccguaucuacuuauauguuaaccaacucugaauuauuaucacuaaucaaugacaugccaauaacaaacgaucaaaaaaaauuaaugucaaauaacguacaaauaguaagacaacaaucauacucaauaaugugcauuauaaaagaagaaguacuagccuauguuguacaacucccacucuacggcguaauagacacaccaugcuggaaauuacacacuucaccacuaugcacaacaaacacaaaagaaggaucaaacaucugccuaaccagaaccgauagaggaugguauugcgacaaugccggaucaguuucauucuucccacaagcagaaacaugcaaaguacaauccaacagaguuuucugugacacaaugaacucgcuaacauuacccagcgaaguaaaccucugcaacauagacauauucaacccaaaauacgauugcaaaauaaugacuucuaaaacagauguuuccucaagcgucauaacgaguuuaggagcaauaguaagcuguuacggaaaaaccaaauguaccgcaucaaacaaaaaccgaggaauaauaaaaaccuuuucaaacggaugcgauuacgucuccaacaaaggagucgacacaguaucaguuggcaauacucuuuacugcguaaauaaacaagaaggacaaucacuauacguaaaaggcgaaccaauaauaaacuucuacgacccccucgucuucccuucagaugaauuugacgcaagcaucucacaaguuaaugaaaaaauaaaucaauccuuagcauucauacgaaaaucagacgaacuauuacacaacguaaacguaggaaaaucaacgacaaacauaaugauaacaacuaucauuauagucauaauagucauacuacuacuauuaauagccguaggcuuauuccuauacugcaaagcaagaucuacuccaguaacacucucaaaagaccaauuaucuggaauaaauaacauagcauucucuaauuaaggacuaguguccaccugucccuccugggcugcuggauugucucguuuuccugccaaauaaacaggaucagcgcuuuacagaucuaaaaaaaaaaaaaaaaaaaaaaaaaaaaaaaaaaaaaaaaaaaaaaaaaaaaaaaaaaaaaaaaugcaucccccccccccccccccccccccccccccccaaaggcucuuuucagagccaccagaauu

SEQ ID NO: 15624 - RNA, 1910 nt, Artificial Sequence
  mRNA product Design e-5 comprising derived and/or modified sequence from HRSV(Memphis-37)__AIY60640.1__F_DSCav1_mut3 (opt11)
gggagagcggcucggccauuuugucccagucaguccggaggcugcggcugcagaaguaccgccugcggaguaacugcaaagaagcuuaccauggaacuccccauccucaaaaccaacgccauuaccacgauccucgccgcagucacccucugcuucgccuccucacaaaacaucacagaagaauuuuaccaaaguaccugcuccgccgucagcaaaggauaccucggcgcccuccgcaccggcugguacacauccgucauaaccaucgaacucagcaacaucaaagaaaucaaauguaacggaaccgacgccaaaguaaaacuaauaaaacaagaacucgacaaauacaagaacgccgucaccgaccuccaacuccucaugcaaucuacccccgccgccggcucagguagcgccaucugcagcgguauugccgucugcaaaguacuccaccuagaaggagaagucaauaaaaucaaaaacgcccuacucuccaccaacaaggcagucgucagccucuccaacggcgucucagucuuaaccuucaaagugcucgaccucaaaaauuacauagacaaacaacuacuccccauucucaacaaacaauccugcuccauacccaacauagaaaccgucauugaauuucaacagaaaaacaaccgccuccucgaaaucacgcgcgaguucagugucaacgccggcgucaccaccccagucucgacauacaugcucacaaacucagaacuccucucguuaaucaacgacaugccaauaaccaacgaccaaaagaaacuaauguccaacaacguucaaauaguucgccaacaaucauacuccauaaugugcaucaucaaagaagaaguccucgccuacguuguacaauuaccccucuacggcgucaucgacacaccaugcuggaaacuccacacaucgccccucugcaccaccaacaccaaagaaggcagcaacauuugccucacccggacagaccgcggcugguacugcgacaaugcaggcagcgucucauucuucccacaagccgaaaccugcaaaguccaaagcaaccgugucuucugcgacacaaugaacucccuuacccucccaagcgaaguaaaccucugcaauauugacaucuucaaccccaaauacgacugcaaaaucaugaccuccaaaaccgacgucuccucaucagucaucaccucccuuggcgccauugucuccuguuacgguaaaaccaaaugcaccgccuccaacaaaaaccgcggcaucaucaaaaccuucucuaacggcugcgacuacgucucaaacaaaggcgucgacacugucuccgucggcaacacccuauacugcgucaacaagcaagaaggacagucccuauacguaaaaggugaaccaauuaucaacuucuacgacccccuagucuucccauccgacgaguucgaugccuccaucucccaaguaaaugaaaagaucaaucaaagccuggccuucauccgcaaauccgacgaacuacuccacaaugucaacgucggaaaaucaacaacaaacaucaugaucaccaccaucaucaucgucaucauaguaauccuccuacugcucaucgccgucggucucuuccuauacugcaaagcccguucuacuccagucacccucuccaaagaccaacuaucaggaaucaacaacaucgccuucagcaacuaaggacuaguguccaccugucccuccugggcugcuggauugucucguuuuccugccaaauaaacaggaucagcgcuuuacagaucuaaaaaaaaaaaaaaaaaaaaaaaaaaaaaaaaaaaaaaaaaaaaaaaaaaaaaaaaaaaaaaaaugcaucccccccccccccccccccccccccccccccaaaggcucuuuucagagccaccagaauu

SEQ ID NO: 15625 - RNA, 1977 nt, Artificial Sequence
  mRNA product Design e-6 comprising derived and/or modified sequence from HRSV(Memphis-37)__AIY60640.1__F_DSCav1_mut3 (opt1)
gggagagcggcucggccauuuugucccagucaguccggaggcugcggcugcagaaguaccgccugcggaguaacugcaaagaagcuuaccauggagcugcccauccucaagaccaacgccaucaccacgauccuggccgcggugacccugugcuucgccagcucccagaacaucaccgaggaguucuaccagagcacgugcuccgccgucagcaagggcuaccucggcgcccugcgcaccgggugguacaccagcgugaucaccaucgagcuguccaacaucaaggagaucaagugcaacggcaccgacgccaaggugaagcucaucaagcaggagcuggacaaguacaagaacgcggucacggaccugcagcuccugaugcagagcaccccggccgccggcuccgggagcgcgaucugcuccggcaucgccgucugcaaggugcugcaccucgagggcgaggugaacaagaucaagaacgcccugcuguccaccaacaaggccgucgugagccucuccaacggggugagcguccugaccuucaaggugcuggaccucaagaacuacaucgacaagcagcugcugcccauccugaacaagcagagcugcuccauccccaacaucgagaccgucaucgaguuccagcagaagaacaaccgccuccuggagaucacgcgggaguucagcgugaacgcgggcgugaccacccccgucuccaccuacaugcugacgaacagcgagcuccugucccugaucaacgacaugccgaucaccaacgaccagaagaagcucaugagcaacaacgugcagaucgugcgccagcaguccuacagcaucaugugcaucaucaaggaggagguccuggccuacguggugcagcugccccucuacggggucaucgacacccccugcuggaagcugcacaccagcccccugugcacgaccaacaccaaggagggcuccaacaucugccucacccggacggaccgcgggugguacugcgacaacgccggcagcguguccuucuucccgcaggccgagaccugcaagguccagagcaaccggguguucugcgacaccaugaacucccugacccugcccagcgaggugaaccucugcaacaucgacaucuucaaccccaaguacgacugcaagaucaugacguccaagaccgacgucagcuccagcgugaucaccucccugggcgccaucgugagcugcuacgggaagaccaagugcacggcgagcaacaagaaccgcggcaucaucaagaccuucuccaacgggugcgacuacgucagcaacaagggcguggacaccguguccgucggcaacacccuguacugcgugaacaagcaggagggccagagccucuacgugaagggggagcccaucaucaacuucuacgacccgcuggucuuccccuccgacgaguucgacgccagcaucucccaggugaacgagaagaucaaccagagccuggccuucauccggaaguccgacgagcuccugcacaacgugaacgucggcaagagcaccacgaacaucaugaucaccaccaucaucaucgugaucaucgugauccugcugcuccugaucgccgucgggcuguuccucuacugcaaggcccgcuccacccccgugacgcugagcaaggaccagcuguccgggaucaacaacaucgcguucagcaacugaggacuaguacuggcugcaucucccuuuccucuguccuccauccuucucccaggauggugaagggggaccugguacccagugauccccaccccaggauccuaaaucaugacuuaccugcuaauaaaaacucauuggaaaagugagaagaucuaaaaaaaaaaaaaaaaaaaaaaaaaaaaaaaaaaaaaaaaaaaaaaaaaaaaaaaaaaaaaaaaugcaucccccccccccccccccccccccccccccccaaaggcucuuuucagagccaccagaauu

SEQ ID NO: 15626 - RNA, 1977 nt, Artificial Sequence
  mRNA product Design e-6 comprising derived and/or modified sequence from HRSV(Memphis-37)__AIY60640.1__F_DSCav1_mut3 (opt1)
gggagagcggcucggccauuuugucccagucaguccggaggcugcggcugcagaaguaccgccugcggaguaacugcaaagaagcuuaccauggagcugcccauccucaagaccaacgccaucaccacgauccuggccgcggugacccugugcuucgccagcucccagaacaucaccgaggaguucuaccagagcacgugcuccgccgucagcaagggcuaccucggggcccugcgcaccggcugguacaccuccgugaucaccaucgagcugagcaacaucaaggagaucaagugcaacgggaccgacgccaaggugaagcucaucaagcaggagcuggacaaguacaagaacgcggucacggaccugcagcuccugaugcaguccaccccggccgccggcagcggguccgccaucugcagcggcaucgcggugugcaaggugcugcaccucgagggcgaggucaacaagaucaagaacgcccugcuguccaccaacaaggccguggugagccucuccaacggggucagcgugcugaccuucaaggugcuggaccucaagaacuacaucgacaagcagcugcugcccauccucaacaagcaguccugcagcauccccaacaucgagacggucaucgaguuccagcagaagaacaaccggcugcuggagaucacccgcgaguucuccgugaacgccggcgugaccacccccgucagcacguacaugcucaccaacuccgagcugcugagccucaucaacgacaugccgaucaccaacgaccagaagaagcugaugagcaacaacgugcagaucgugcggcagcaguccuacagcaucaugugcaucaucaaggaggagguccuggccuacguggugcagcucccccuguacggggucaucgacacccccugcuggaagcugcacacgagcccccucugcaccaccaacaccaaggagggcuccaacaucugccugacgcgcaccgaccgggggugguacugcgacaacgcgggcuccgugagcuucuucccgcaggccgagaccugcaaggugcaguccaaccgcgucuucugcgacaccaugaacagccugacgcuccccuccgaggugaaccugugcaacaucgacaucuucaaccccaaguacgacugcaagaucaugaccagcaagaccgacgucuccagcuccgugaucaccagccugggcgccaucguguccugcuacgggaagacgaagugcaccgccagcaacaagaaccggggcaucaucaagaccuucuccaacgggugcgacuacgucagcaacaagggcguggacaccguguccgucggcaacacgcucuacugcgugaacaagcaggaggggcagagccuguacgugaagggcgagcccaucaucaacuucuacgacccgcuggucuuccccagcgacgaguucgacgccuccaucagccaggugaacgagaagaucaaccagucccucgcguucauccgcaagagcgacgagcugcugcacaacgugaacgucgggaaguccaccaccaacaucaugaucaccaccaucaucaucgugaucaucgugauccuccugcugcucaucgccgucggccuguuccuguacugcaaggcccggagcacgcccgugacccuguccaaggaccagcucagcgggaucaacaacaucgccuucuccaacugaggacuaguacuggcugcaucucccuuuccucuguccuccauccuucucccaggauggugaagggggaccugguacccagugauccccaccccaggauccuaaaucaugacuuaccugcuaauaaaaacucauuggaaaagugagaagaucuaaaaaaaaaaaaaaaaaaaaaaaaaaaaaaaaaaaaaaaaaaaaaaaaaaaaaaaaaaaaaaaaugcaucccccccccccccccccccccccccccccccaaaggcucuuuucagagccaccagaauu

SEQ ID NO: 15627 - RNA, 1977 nt, Artificial Sequence
  mRNA product Design e-6 comprising derived and/or modified sequence from HRSV(Memphis-37)__AIY60640.1__F_DSCav1_mut3 (opt2)
gggagagcggcucggccauuuugucccagucaguccggaggcugcggcugcagaaguaccgccugcggaguaacugcaaagaagcuuaccauggagcuccccauccucaagaccaacgccaucaccaccauccucgccgccgucacccucugcuucgccuccucccagaacaucaccgaggaguucuaccaguccaccugcuccgccgucuccaagggcuaccucggcgcccuccgcaccggcugguacaccuccgucaucaccaucgagcucuccaacaucaaggagaucaagugcaacggcaccgacgccaaggucaagcucaucaagcaggagcucgacaaguacaagaacgccgucaccgaccuccagcuccucaugcaguccacccccgccgccggcuccggcuccgccaucugcuccggcaucgccgucugcaagguccuccaccucgagggcgaggucaacaagaucaagaacgcccuccucuccaccaacaaggccgucgucucccucuccaacggcgucuccguccucaccuucaagguccucgaccucaagaacuacaucgacaagcagcuccuccccauccucaacaagcaguccugcuccauccccaacaucgagaccgucaucgaguuccagcagaagaacaaccgccuccucgagaucacccgcgaguucuccgucaacgccggcgucaccacccccgucuccaccuacaugcucaccaacuccgagcuccucucccucaucaacgacaugcccaucaccaacgaccagaagaagcucauguccaacaacguccagaucguccgccagcaguccuacuccaucaugugcaucaucaaggaggagguccucgccuacgucguccagcucccccucuacggcgucaucgacacccccugcuggaagcuccacaccuccccccucugcaccaccaacaccaaggagggcuccaacaucugccucacccgcaccgaccgcggcugguacugcgacaacgccggcuccgucuccuucuucccccaggccgagaccugcaagguccaguccaaccgcgucuucugcgacaccaugaacucccucacccuccccuccgaggucaaccucugcaacaucgacaucuucaaccccaaguacgacugcaagaucaugaccuccaagaccgacgucuccuccuccgucaucaccucccucggcgccaucgucuccugcuacggcaagaccaagugcaccgccuccaacaagaaccgcggcaucaucaagaccuucuccaacggcugcgacuacgucuccaacaagggcgucgacaccgucuccgucggcaacacccucuacugcgucaacaagcaggagggccagucccucuacgucaagggcgagcccaucaucaacuucuacgacccccucgucuuccccuccgacgaguucgacgccuccaucucccaggucaacgagaagaucaaccagucccucgccuucauccgcaaguccgacgagcuccuccacaacgucaacgucggcaaguccaccaccaacaucaugaucaccaccaucaucaucgucaucaucgucauccuccuccuccucaucgccgucggccucuuccucuacugcaaggcccgcuccacccccgucacccucuccaaggaccagcucuccggcaucaacaacaucgccuucuccaacugaggacuaguacuggcugcaucucccuuuccucuguccuccauccuucucccaggauggugaagggggaccugguacccagugauccccaccccaggauccuaaaucaugacuuaccugcuaauaaaaacucauuggaaaagugagaagaucuaaaaaaaaaaaaaaaaaaaaaaaaaaaaaaaaaaaaaaaaaaaaaaaaaaaaaaaaaaaaaaaaugcaucccccccccccccccccccccccccccccccaaaggcucuuuucagagccaccagaauu

SEQ ID NO: 15628 - RNA, 1977 nt, Artificial Sequence
  mRNA product Design e-6 comprising derived and/or modified sequence from HRSV(Memphis-37)__AIY60640.1__F_DSCav1_mut3 (opt3)
gggagagcggcucggccauuuugucccagucaguccggaggcugcggcugcagaaguaccgccugcggaguaacugcaaagaagcuuaccauggagcugcccauccucaagaccaacgccauuacaacuauacuugcugcagugacgcugugcuucgccagcucccagaauaucaccgaagaguuuuaccaaucuacauguucagcggucaguaaaggcuauuugggggcuuuaagaacuggaugguacaccagcguuauuacaaucgaacuguccaacauuaaggagaucaaaugcaaugguaccgacgccaaggugaaacuaauaaagcaggaacucgauaaguauaaaaacgcaguaacugaccugcagcuucugaugcagucuacuccugccgcuggcucggggucagcaaucuguagcggaauugccgugugcaaggucuugcaccucgagggcgaggugaauaaaaucaagaacgcucugcugaguaccaauaaagccguugugucccucucuaacggugucagcguguuaacguucaagguacuggaucuuaagaauuacauugacaaacaauugcugccaauccuaaacaagcaguccuguucaauaccgaauauugaaacuguuaucgaguuucagcagaaaaacaauaggcuccuggaaauuacccgggaguucagugugaacgcgggggucacaacucccgugagcaccuauaugcuuacaaauucugagcuguugucccucaucaacgauaugccuaucaccaacgaccaaaagaaacugaugucaaauaacgugcagauuguccgccagcagagcuacaguauaaugugcaucauuaaggaagagguuuuagcauaugugguacaacugccacucuacggagugaucgauacgcccuguuggaaacuucauacuucuccucugugcacaaccaauacuaaggaaggcuccaacauauguuugacacgaaccgaccguggcugguacugcgauaaugccgggagcgucucguuuuucccacaggcugagacguguaaggugcagucuaacagaguuuucugcgacaccaugaacucccuaacacugcccucagaagugaaucucugcaauauugauaucuucaacccuaaauaugacuguaagaucaugacaaguaaaaccgaugucagcuccucugugauuacaagccugggagccaucguaucaugcuacgguaagacuaaauguaccgcaaguaauaagaacaggggcauuauaaagacauuuuccaaugggugcgacuauguuagcaacaaaggaguggacaccgucucugugggcaauacucuuuacugugucaacaagcaagagggucagucacuguaugugaaaggggagccaaucauuaacuucuacgauccguugguuuuucccagugacgaauuugaugcuagcaucucccaggugaaugagaagaucaaccagucucucgccuuuauucggaaaucggacgaacuguuacacaauguaaacgucggaaagagcacgacaaauauaaugaucaccacuauuaucauugugaucauaguuauccugcuacuccugauugcggugggccuuuucuuguauugcaaggcccgcuccaccccugucacacugucaaaagaucaacucaguggcaucaacaauauugcauucucuaacugaggacuaguacuggcugcaucucccuuuccucuguccuccauccuucucccaggauggugaagggggaccugguacccagugauccccaccccaggauccuaaaucaugacuuaccugcuaauaaaaacucauuggaaaagugagaagaucuaaaaaaaaaaaaaaaaaaaaaaaaaaaaaaaaaaaaaaaaaaaaaaaaaaaaaaaaaaaaaaaaugcaucccccccccccccccccccccccccccccccaaaggcucuuuucagagccaccagaauu

SEQ ID NO: 15629 - RNA, 1977 nt, Artificial Sequence
  mRNA product Design e-6 comprising derived and/or modified sequence from HRSV(Memphis-37)__AIY60640.1__F_DSCav1_mut3 (opt4)
gggagagcggcucggccauuuugucccagucaguccggaggcugcggcugcagaaguaccgccugcggaguaacugcaaagaagcuuaccauggagcugcccauccugaagaccaacgccaucaccaccauccuggccgccgugacccugugcuucgccagcagccagaacaucaccgaggaguucuaccagagcaccugcagcgccgugagcaagggcuaccugggcgcccugagaaccggcugguacaccagcgugaucaccaucgagcugagcaacaucaaggagaucaagugcaacggcaccgacgccaaggugaagcugaucaagcaggagcuggacaaguacaagaacgccgugaccgaccugcagcugcugaugcagagcacccccgccgccggcagcggcagcgccaucugcagcggcaucgccgugugcaaggugcugcaccuggagggcgaggugaacaagaucaagaacgcccugcugagcaccaacaaggccguggugagccugagcaacggcgugagcgugcugaccuucaaggugcuggaccugaagaacuacaucgacaagcagcugcugcccauccugaacaagcagagcugcagcauccccaacaucgagaccgugaucgaguuccagcagaagaacaacagacugcuggagaucaccagagaguucagcgugaacgccggcgugaccacccccgugagcaccuacaugcugaccaacagcgagcugcugagccugaucaacgacaugcccaucaccaacgaccagaagaagcugaugagcaacaacgugcagaucgugagacagcagagcuacagcaucaugugcaucaucaaggaggaggugcuggccuacguggugcagcugccccuguacggcgugaucgacacccccugcuggaagcugcacaccagcccccugugcaccaccaacaccaaggagggcagcaacaucugccugaccagaaccgacagaggcugguacugcgacaacgccggcagcgugagcuucuucccccaggccgagaccugcaaggugcagagcaacagaguguucugcgacaccaugaacagccugacccugcccagcgaggugaaccugugcaacaucgacaucuucaaccccaaguacgacugcaagaucaugaccagcaagaccgacgugagcagcagcgugaucaccagccugggcgccaucgugagcugcuacggcaagaccaagugcaccgccagcaacaagaacagaggcaucaucaagaccuucagcaacggcugcgacuacgugagcaacaagggcguggacaccgugagcgugggcaacacccuguacugcgugaacaagcaggagggccagagccuguacgugaagggcgagcccaucaucaacuucuacgacccccugguguuccccagcgacgaguucgacgccagcaucagccaggugaacgagaagaucaaccagagccuggccuucaucagaaagagcgacgagcugcugcacaacgugaacgugggcaagagcaccaccaacaucaugaucaccaccaucaucaucgugaucaucgugauccugcugcugcugaucgccgugggccuguuccuguacugcaaggccagaagcacccccgugacccugagcaaggaccagcugagcggcaucaacaacaucgccuucagcaacugaggacuaguacuggcugcaucucccuuuccucuguccuccauccuucucccaggauggugaagggggaccugguacccagugauccccaccccaggauccuaaaucaugacuuaccugcuaauaaaaacucauuggaaaagugagaagaucuaaaaaaaaaaaaaaaaaaaaaaaaaaaaaaaaaaaaaaaaaaaaaaaaaaaaaaaaaaaaaaaaugcaucccccccccccccccccccccccccccccccaaaggcucuuuucagagccaccagaauu

SEQ ID NO: 15630 - RNA, 1977 nt, Artificial Sequence
  mRNA product Design e-6 comprising derived and/or modified sequence from HRSV(Memphis-37)__AIY60640.1__F_DSCav1_mut3 (opt5)
gggagagcggcucggccauuuugucccagucaguccggaggcugcggcugcagaaguaccgccugcggaguaacugcaaagaagcuuaccauggagcugcccauccucaagaccaacgccauuacaacgauccuggcugccgugacccuuugcuucgcgagcucccagaauauuacagaagaguuuuaccaaucuaccuguagcgcugucuccaaaggcuaucugggggcccucagaacaggaugguacaccucuguuaucacaauugaacugagcaacaucaaggagaucaaaugcaauggcaccgacgccaaggugaaacuuauuaagcaggaacuggauaaguauaaaaacgcugugacggaccuccagcugcugaugcaguccaccccugccgcugggucuggaagcgccaucuguuccggcauugcggucugcaaggugcuccaccuggagggggagguuaauaaaaucaagaacgcccuucugagcacaaauaaagcuguggucucucucuccaacggagugagcguucugaccuucaaggugcuugaucugaagaauuacauugacaaacaacuccugccgauccugaacaagcagucuuguuccauucccaauaucgaaacagucaucgaguuucagcagaaaaacaaucggcuccuggaaauuacccgcgaguucagcgugaacgccggcgugacgacaccugucucuaccuauaugcuuacaaauuccgagcugcucagccugaucaacgauaugcccauuaccaacgaccaaaagaaacuuauguccaauaacguucagaucgugagacagcagucuuacagcauuaugugcaucaucaaggaagaggugcuggcuuaugucgugcaacucccucuguacggcguuauugauacccccuguuggaaacugcauacauccccucucugcacgaccaauacaaaggaagggagcaacaucugucugacccggacagaccgcggaugguacugcgauaaugccggcucuguguccuuuuucccgcaggcggagaccuguaagguccagagcaacagaguguuuugcgacacgaugaacucucuuacacugcccagcgaaguuaaucucugcaauauugauaucuucaacccuaaauaugacuguaagauuaugaccuccaaaaccgaugugucuagcuccgucaucacaagccugggggccaucgugucuugcuacggaaagaccaaauguacagcuuccaauaagaaccggggcauuaucaagacguuuagcaaugggugcgacuaugucucuaacaaaggaguggacaccguuuccgugggcaauacacuuuacugugucaacaagcaagagggccagagccuguaugugaaaggggagcccauuaucaacuucuacgauccucucguuuuucccuccgacgaguucgaugccucuauuagccaggugaaugaaaagaucaaccagucccuggcuuuuauucgcaaaucugacgaacugcuccacaaugucaacgugggaaagagcaccacaaauaucaugaucaccacgauuaucauugugaucauuguuauccugcuucugcucaucgccgucggccuguuccuguauugcaaggccagauccaccccggugacacuuagcaaagaucaacucucugggauuaacaauaucgcuuucuccaacugaggacuaguacuggcugcaucucccuuuccucuguccuccauccuucucccaggauggugaagggggaccugguacccagugauccccaccccaggauccuaaaucaugacuuaccugcuaauaaaaacucauuggaaaagugagaagaucuaaaaaaaaaaaaaaaaaaaaaaaaaaaaaaaaaaaaaaaaaaaaaaaaaaaaaaaaaaaaaaaaugcaucccccccccccccccccccccccccccccccaaaggcucuuuucagagccaccagaauu

SEQ ID NO: 15631 - RNA, 1977 nt, Artificial Sequence
  mRNA product Design e-6 comprising derived and/or modified sequence from HRSV(Memphis-37)__AIY60640.1__F_DSCav1_mut3 (opt6)
gggagagcggcucggccauuuugucccagucaguccggaggcugcggcugcagaaguaccgccugcggaguaacugcaaagaagcuuaccauggaauuaccaauacuaaaaacaaaugccaucaccaccauccuggccgccguaacauuaugcuucgcaaguucacaaaauauaacagaagaauuuuaucaaucaacuugcagcgccguaucaaaaggcuacuuaggcgcacuacguacaggaugguacacaucaguaauaaccauagaacuauccaauauuaaagaaauaaaaugcaauggaacagacgcaaaaguuaaacuaauaaaacaagaauuagacaaauacaaaaacgcaguaaccgaccuucaauuacuaaugcaaucuacccccgcugcagguuccggaucagcaauauguucaggaauugcaguaugcaaaguccuacacuuagaaggagaaguaaacaaaauaaaaaacgcacuauuaagcaccaauaaagcagucguaucauuauccaacggcguuucaguacuaacauuuaaaguacuugaccuaaaaaacuauauagacaaacaacuacuucccauccuuaacaaacaaagcugcucaauaccuaauaucgaaacaguaauagaauuucaacaaaaaaacaaucgauuauuagaaaucacacgagaauuuucugucaacgcaggagucaccacacccguaucuacuuauauguuaaccaacucugaauuauuaucacuaaucaaugacaugccaauaacaaacgaucaaaaaaaauuaaugucaaauaacguacaaauaguaagacaacaaucauacucaauaaugugcauuauaaaagaagaaguacuagccuauguuguacaacucccacucuacggcguaauagacacaccaugcuggaaauuacacacuucaccacuaugcacaacaaacacaaaagaaggaucaaacaucugccuaaccagaaccgauagaggaugguauugcgacaaugccggaucaguuucauucuucccacaagcagaaacaugcaaaguacaauccaacagaguuuucugugacacaaugaacucgcuaacauuacccagcgaaguaaaccucugcaacauagacauauucaacccaaaauacgauugcaaaauaaugacuucuaaaacagauguuuccucaagcgucauaacgaguuuaggagcaauaguaagcuguuacggaaaaaccaaauguaccgcaucaaacaaaaaccgaggaauaauaaaaaccuuuucaaacggaugcgauuacgucuccaacaaaggagucgacacaguaucaguuggcaauacucuuuacugcguaaauaaacaagaaggacaaucacuauacguaaaaggcgaaccaauaauaaacuucuacgacccccucgucuucccuucagaugaauuugacgcaagcaucucacaaguuaaugaaaaaauaaaucaauccuuagcauucauacgaaaaucagacgaacuauuacacaacguaaacguaggaaaaucaacgacaaacauaaugauaacaacuaucauuauagucauaauagucauacuacuacuauuaauagccguaggcuuauuccuauacugcaaagcaagaucuacuccaguaacacucucaaaagaccaauuaucuggaauaaauaacauagcauucucuaauuaaggacuaguacuggcugcaucucccuuuccucuguccuccauccuucucccaggauggugaagggggaccugguacccagugauccccaccccaggauccuaaaucaugacuuaccugcuaauaaaaacucauuggaaaagugagaagaucuaaaaaaaaaaaaaaaaaaaaaaaaaaaaaaaaaaaaaaaaaaaaaaaaaaaaaaaaaaaaaaaaugcaucccccccccccccccccccccccccccccccaaaggcucuuuucagagccaccagaauu

SEQ ID NO: 15632 - RNA, 1977 nt, Artificial Sequence
  mRNA product Design e-6 comprising derived and/or modified sequence from HRSV(Memphis-37)__AIY60640.1__F_DSCav1_mut3 (opt11)
gggagagcggcucggccauuuugucccagucaguccggaggcugcggcugcagaaguaccgccugcggaguaacugcaaagaagcuuaccauggaacuccccauccucaaaaccaacgccauuaccacgauccucgccgcagucacccucugcuucgccuccucacaaaacaucacagaagaauuuuaccaaaguaccugcuccgccgucagcaaaggauaccucggcgcccuccgcaccggcugguacacauccgucauaaccaucgaacucagcaacaucaaagaaaucaaauguaacggaaccgacgccaaaguaaaacuaauaaaacaagaacucgacaaauacaagaacgccgucaccgaccuccaacuccucaugcaaucuacccccgccgccggcucagguagcgccaucugcagcgguauugccgucugcaaaguacuccaccuagaaggagaagucaauaaaaucaaaaacgcccuacucuccaccaacaaggcagucgucagccucuccaacggcgucucagucuuaaccuucaaagugcucgaccucaaaaauuacauagacaaacaacuacuccccauucucaacaaacaauccugcuccauacccaacauagaaaccgucauugaauuucaacagaaaaacaaccgccuccucgaaaucacgcgcgaguucagugucaacgccggcgucaccaccccagucucgacauacaugcucacaaacucagaacuccucucguuaaucaacgacaugccaauaaccaacgaccaaaagaaacuaauguccaacaacguucaaauaguucgccaacaaucauacuccauaaugugcaucaucaaagaagaaguccucgccuacguuguacaauuaccccucuacggcgucaucgacacaccaugcuggaaacuccacacaucgccccucugcaccaccaacaccaaagaaggcagcaacauuugccucacccggacagaccgcggcugguacugcgacaaugcaggcagcgucucauucuucccacaagccgaaaccugcaaaguccaaagcaaccgugucuucugcgacacaaugaacucccuuacccucccaagcgaaguaaaccucugcaauauugacaucuucaaccccaaauacgacugcaaaaucaugaccuccaaaaccgacgucuccucaucagucaucaccucccuuggcgccauugucuccuguuacgguaaaaccaaaugcaccgccuccaacaaaaaccgcggcaucaucaaaaccuucucuaacggcugcgacuacgucucaaacaaaggcgucgacacugucuccgucggcaacacccuauacugcgucaacaagcaagaaggacagucccuauacguaaaaggugaaccaauuaucaacuucuacgacccccuagucuucccauccgacgaguucgaugccuccaucucccaaguaaaugaaaagaucaaucaaagccuggccuucauccgcaaauccgacgaacuacuccacaaugucaacgucggaaaaucaacaacaaacaucaugaucaccaccaucaucaucgucaucauaguaauccuccuacugcucaucgccgucggucucuuccuauacugcaaagcccguucuacuccagucacccucuccaaagaccaacuaucaggaaucaacaacaucgccuucagcaacuaaggacuaguacuggcugcaucucccuuuccucuguccuccauccuucucccaggauggugaagggggaccugguacccagugauccccaccccaggauccuaaaucaugacuuaccugcuaauaaaaacucauuggaaaagugagaagaucuaaaaaaaaaaaaaaaaaaaaaaaaaaaaaaaaaaaaaaaaaaaaaaaaaaaaaaaaaaaaaaaaugcaucccccccccccccccccccccccccccccccaaaggcucuuuucagagccaccagaauu

SEQ ID NO: 15633 - RNA, 2193 nt, Artificial Sequence
  mRNA product Design f-1 comprising derived and/or modified sequence from HRSV(Memphis-37)__AIY60640.1__F_DSCav1_mut3 (opt1)
gggagagcggcucggccauuuugucccagucaguccggaggcugcggcugcagaaguaccgccugcggaguaacugcaaagaagcuuaccauggagcugcccauccucaagaccaacgccaucaccacgauccuggccgcggugacccugugcuucgccagcucccagaacaucaccgaggaguucuaccagagcacgugcuccgccgucagcaagggcuaccucggcgcccugcgcaccgggugguacaccagcgugaucaccaucgagcuguccaacaucaaggagaucaagugcaacggcaccgacgccaaggugaagcucaucaagcaggagcuggacaaguacaagaacgcggucacggaccugcagcuccugaugcagagcaccccggccgccggcuccgggagcgcgaucugcuccggcaucgccgucugcaaggugcugcaccucgagggcgaggugaacaagaucaagaacgcccugcuguccaccaacaaggccgucgugagccucuccaacggggugagcguccugaccuucaaggugcuggaccucaagaacuacaucgacaagcagcugcugcccauccugaacaagcagagcugcuccauccccaacaucgagaccgucaucgaguuccagcagaagaacaaccgccuccuggagaucacgcgggaguucagcgugaacgcgggcgugaccacccccgucuccaccuacaugcugacgaacagcgagcuccugucccugaucaacgacaugccgaucaccaacgaccagaagaagcucaugagcaacaacgugcagaucgugcgccagcaguccuacagcaucaugugcaucaucaaggaggagguccuggccuacguggugcagcugccccucuacggggucaucgacacccccugcuggaagcugcacaccagcccccugugcacgaccaacaccaaggagggcuccaacaucugccucacccggacggaccgcgggugguacugcgacaacgccggcagcguguccuucuucccgcaggccgagaccugcaagguccagagcaaccggguguucugcgacaccaugaacucccugacccugcccagcgaggugaaccucugcaacaucgacaucuucaaccccaaguacgacugcaagaucaugacguccaagaccgacgucagcuccagcgugaucaccucccugggcgccaucgugagcugcuacgggaagaccaagugcacggcgagcaacaagaaccgcggcaucaucaagaccuucuccaacgggugcgacuacgucagcaacaagggcguggacaccguguccgucggcaacacccuguacugcgugaacaagcaggagggccagagccucuacgugaagggggagcccaucaucaacuucuacgacccgcuggucuuccccuccgacgaguucgacgccagcaucucccaggugaacgagaagaucaaccagagccuggccuucauccggaaguccgacgagcuccugcacaacgugaacgucggcaagagcaccacgaacaucaugaucaccaccaucaucaucgugaucaucgugauccugcugcuccugaucgccgucgggcuguuccucuacugcaaggcccgcuccacccccgugacgcugagcaaggaccagcuguccgggaucaacaacaucgcguucagcaacugaggacuagugaagggaacacccaaauuuaauucagccuuaagcacaauuaauuaagagugaaacguaauuguacaagcaguuggucacccaccauagggcaugaucaacaccgcaaccuuuccuuuuucccccagugauucugaaaaaccccucuucccuucagcuugcuuagauguuccaaauuuaguaagcuuaaggcggccuacagaagaaaaagaaaaaaaaggccacaaaaguucccucucacuuucaguaaauaaaauaaaagcagcaacagaaauaaagaaauaaaugaaauucaaaaugaaauaaauauuguguugugcagcauuaaaaaaucaauaaaaauuaaaaaugagcaagaucuaaaaaaaaaaaaaaaaaaaaaaaaaaaaaaaaaaaaaaaaaaaaaaaaaaaaaaaaaaaaaaaaugcaucccccccccccccccccccccccccccccccaaaggcucuuuucagagccaccagaauu

SEQ ID NO: 15634 - RNA, 2193 nt, Artificial Sequence
  mRNA product Design f-1 comprising derived and/or modified sequence from HRSV(Memphis-37)__AIY60640.1__F_DSCav1_mut3 (opt1)
gggagagcggcucggccauuuugucccagucaguccggaggcugcggcugcagaaguaccgccugcggaguaacugcaaagaagcuuaccauggagcugcccauccucaagaccaacgccaucaccacgauccuggccgcggugacccugugcuucgccagcucccagaacaucaccgaggaguucuaccagagcacgugcuccgccgucagcaagggcuaccucggggcccugcgcaccggcugguacaccuccgugaucaccaucgagcugagcaacaucaaggagaucaagugcaacgggaccgacgccaaggugaagcucaucaagcaggagcuggacaaguacaagaacgcggucacggaccugcagcuccugaugcaguccaccccggccgccggcagcggguccgccaucugcagcggcaucgcggugugcaaggugcugcaccucgagggcgaggucaacaagaucaagaacgcccugcuguccaccaacaaggccguggugagccucuccaacggggucagcgugcugaccuucaaggugcuggaccucaagaacuacaucgacaagcagcugcugcccauccucaacaagcaguccugcagcauccccaacaucgagacggucaucgaguuccagcagaagaacaaccggcugcuggagaucacccgcgaguucuccgugaacgccggcgugaccacccccgucagcacguacaugcucaccaacuccgagcugcugagccucaucaacgacaugccgaucaccaacgaccagaagaagcugaugagcaacaacgugcagaucgugcggcagcaguccuacagcaucaugugcaucaucaaggaggagguccuggccuacguggugcagcucccccuguacggggucaucgacacccccugcuggaagcugcacacgagcccccucugcaccaccaacaccaaggagggcuccaacaucugccugacgcgcaccgaccgggggugguacugcgacaacgcgggcuccgugagcuucuucccgcaggccgagaccugcaaggugcaguccaaccgcgucuucugcgacaccaugaacagccugacgcuccccuccgaggugaaccugugcaacaucgacaucuucaaccccaaguacgacugcaagaucaugaccagcaagaccgacgucuccagcuccgugaucaccagccugggcgccaucguguccugcuacgggaagacgaagugcaccgccagcaacaagaaccggggcaucaucaagaccuucuccaacgggugcgacuacgucagcaacaagggcguggacaccguguccgucggcaacacgcucuacugcgugaacaagcaggaggggcagagccuguacgugaagggcgagcccaucaucaacuucuacgacccgcuggucuuccccagcgacgaguucgacgccuccaucagccaggugaacgagaagaucaaccagucccucgcguucauccgcaagagcgacgagcugcugcacaacgugaacgucgggaaguccaccaccaacaucaugaucaccaccaucaucaucgugaucaucgugauccuccugcugcucaucgccgucggccuguuccuguacugcaaggcccggagcacgcccgugacccuguccaaggaccagcucagcgggaucaacaacaucgccuucuccaacugaggacuagugaagggaacacccaaauuuaauucagccuuaagcacaauuaauuaagagugaaacguaauuguacaagcaguuggucacccaccauagggcaugaucaacaccgcaaccuuuccuuuuucccccagugauucugaaaaaccccucuucccuucagcuugcuuagauguuccaaauuuaguaagcuuaaggcggccuacagaagaaaaagaaaaaaaaggccacaaaaguucccucucacuuucaguaaauaaaauaaaagcagcaacagaaauaaagaaauaaaugaaauucaaaaugaaauaaauauuguguugugcagcauuaaaaaaucaauaaaaauuaaaaaugagcaagaucuaaaaaaaaaaaaaaaaaaaaaaaaaaaaaaaaaaaaaaaaaaaaaaaaaaaaaaaaaaaaaaaaugcaucccccccccccccccccccccccccccccccaaaggcucuuuucagagccaccagaauu

SEQ ID NO: 15635 - RNA, 2193 nt, Artificial Sequence
  mRNA product Design f-1 comprising derived and/or modified sequence from HRSV(Memphis-37)__AIY60640.1__F_DSCav1_mut3 (opt2)
gggagagcggcucggccauuuugucccagucaguccggaggcugcggcugcagaaguaccgccugcggaguaacugcaaagaagcuuaccauggagcuccccauccucaagaccaacgccaucaccaccauccucgccgccgucacccucugcuucgccuccucccagaacaucaccgaggaguucuaccaguccaccugcuccgccgucuccaagggcuaccucggcgcccuccgcaccggcugguacaccuccgucaucaccaucgagcucuccaacaucaaggagaucaagugcaacggcaccgacgccaaggucaagcucaucaagcaggagcucgacaaguacaagaacgccgucaccgaccuccagcuccucaugcaguccacccccgccgccggcuccggcuccgccaucugcuccggcaucgccgucugcaagguccuccaccucgagggcgaggucaacaagaucaagaacgcccuccucuccaccaacaaggccgucgucucccucuccaacggcgucuccguccucaccuucaagguccucgaccucaagaacuacaucgacaagcagcuccuccccauccucaacaagcaguccugcuccauccccaacaucgagaccgucaucgaguuccagcagaagaacaaccgccuccucgagaucacccgcgaguucuccgucaacgccggcgucaccacccccgucuccaccuacaugcucaccaacuccgagcuccucucccucaucaacgacaugcccaucaccaacgaccagaagaagcucauguccaacaacguccagaucguccgccagcaguccuacuccaucaugugcaucaucaaggaggagguccucgccuacgucguccagcucccccucuacggcgucaucgacacccccugcuggaagcuccacaccuccccccucugcaccaccaacaccaaggagggcuccaacaucugccucacccgcaccgaccgcggcugguacugcgacaacgccggcuccgucuccuucuucccccaggccgagaccugcaagguccaguccaaccgcgucuucugcgacaccaugaacucccucacccuccccuccgaggucaaccucugcaacaucgacaucuucaaccccaaguacgacugcaagaucaugaccuccaagaccgacgucuccuccuccgucaucaccucccucggcgccaucgucuccugcuacggcaagaccaagugcaccgccuccaacaagaaccgcggcaucaucaagaccuucuccaacggcugcgacuacgucuccaacaagggcgucgacaccgucuccgucggcaacacccucuacugcgucaacaagcaggagggccagucccucuacgucaagggcgagcccaucaucaacuucuacgacccccucgucuuccccuccgacgaguucgacgccuccaucucccaggucaacgagaagaucaaccagucccucgccuucauccgcaaguccgacgagcuccuccacaacgucaacgucggcaaguccaccaccaacaucaugaucaccaccaucaucaucgucaucaucgucauccuccuccuccucaucgccgucggccucuuccucuacugcaaggcccgcuccacccccgucacccucuccaaggaccagcucuccggcaucaacaacaucgccuucuccaacugaggacuagugaagggaacacccaaauuuaauucagccuuaagcacaauuaauuaagagugaaacguaauuguacaagcaguuggucacccaccauagggcaugaucaacaccgcaaccuuuccuuuuucccccagugauucugaaaaaccccucuucccuucagcuugcuuagauguuccaaauuuaguaagcuuaaggcggccuacagaagaaaaagaaaaaaaaggccacaaaaguucccucucacuuucaguaaauaaaauaaaagcagcaacagaaauaaagaaauaaaugaaauucaaaaugaaauaaauauuguguugugcagcauuaaaaaaucaauaaaaauuaaaaaugagcaagaucuaaaaaaaaaaaaaaaaaaaaaaaaaaaaaaaaaaaaaaaaaaaaaaaaaaaaaaaaaaaaaaaaugcaucccccccccccccccccccccccccccccccaaaggcucuuuucagagccaccagaauu

SEQ ID NO: 15636 - RNA, 2193 nt, Artificial Sequence
  mRNA product Design f-1 comprising derived and/or modified sequence from HRSV(Memphis-37)__AIY60640.1__F_DSCav1_mut3 (opt3)
gggagagcggcucggccauuuugucccagucaguccggaggcugcggcugcagaaguaccgccugcggaguaacugcaaagaagcuuaccauggagcugcccauccucaagaccaacgccauuacaacuauacuugcugcagugacgcugugcuucgccagcucccagaauaucaccgaagaguuuuaccaaucuacauguucagcggucaguaaaggcuauuugggggcuuuaagaacuggaugguacaccagcguuauuacaaucgaacuguccaacauuaaggagaucaaaugcaaugguaccgacgccaaggugaaacuaauaaagcaggaacucgauaaguauaaaaacgcaguaacugaccugcagcuucugaugcagucuacuccugccgcuggcucggggucagcaaucuguagcggaauugccgugugcaaggucuugcaccucgagggcgaggugaauaaaaucaagaacgcucugcugaguaccaauaaagccguugugucccucucuaacggugucagcguguuaacguucaagguacuggaucuuaagaauuacauugacaaacaauugcugccaauccuaaacaagcaguccuguucaauaccgaauauugaaacuguuaucgaguuucagcagaaaaacaauaggcuccuggaaauuacccgggaguucagugugaacgcgggggucacaacucccgugagcaccuauaugcuuacaaauucugagcuguugucccucaucaacgauaugccuaucaccaacgaccaaaagaaacugaugucaaauaacgugcagauuguccgccagcagagcuacaguauaaugugcaucauuaaggaagagguuuuagcauaugugguacaacugccacucuacggagugaucgauacgcccuguuggaaacuucauacuucuccucugugcacaaccaauacuaaggaaggcuccaacauauguuugacacgaaccgaccguggcugguacugcgauaaugccgggagcgucucguuuuucccacaggcugagacguguaaggugcagucuaacagaguuuucugcgacaccaugaacucccuaacacugcccucagaagugaaucucugcaauauugauaucuucaacccuaaauaugacuguaagaucaugacaaguaaaaccgaugucagcuccucugugauuacaagccugggagccaucguaucaugcuacgguaagacuaaauguaccgcaaguaauaagaacaggggcauuauaaagacauuuuccaaugggugcgacuauguuagcaacaaaggaguggacaccgucucugugggcaauacucuuuacugugucaacaagcaagagggucagucacuguaugugaaaggggagccaaucauuaacuucuacgauccguugguuuuucccagugacgaauuugaugcuagcaucucccaggugaaugagaagaucaaccagucucucgccuuuauucggaaaucggacgaacuguuacacaauguaaacgucggaaagagcacgacaaauauaaugaucaccacuauuaucauugugaucauaguuauccugcuacuccugauugcggugggccuuuucuuguauugcaaggcccgcuccaccccugucacacugucaaaagaucaacucaguggcaucaacaauauugcauucucuaacugaggacuagugaagggaacacccaaauuuaauucagccuuaagcacaauuaauuaagagugaaacguaauuguacaagcaguuggucacccaccauagggcaugaucaacaccgcaaccuuuccuuuuucccccagugauucugaaaaaccccucuucccuucagcuugcuuagauguuccaaauuuaguaagcuuaaggcggccuacagaagaaaaagaaaaaaaaggccacaaaaguucccucucacuuucaguaaauaaaauaaaagcagcaacagaaauaaagaaauaaaugaaauucaaaaugaaauaaauauuguguugugcagcauuaaaaaaucaauaaaaauuaaaaaugagcaagaucuaaaaaaaaaaaaaaaaaaaaaaaaaaaaaaaaaaaaaaaaaaaaaaaaaaaaaaaaaaaaaaaaugcaucccccccccccccccccccccccccccccccaaaggcucuuuucagagccaccagaauu

SEQ ID NO: 15637 - RNA, 2193 nt, Artificial Sequence
  mRNA product Design f-1 comprising derived and/or modified sequence from HRSV(Memphis-37)__AIY60640.1__F_DSCav1_mut3 (opt4)
gggagagcggcucggccauuuugucccagucaguccggaggcugcggcugcagaaguaccgccugcggaguaacugcaaagaagcuuaccauggagcugcccauccugaagaccaacgccaucaccaccauccuggccgccgugacccugugcuucgccagcagccagaacaucaccgaggaguucuaccagagcaccugcagcgccgugagcaagggcuaccugggcgcccugagaaccggcugguacaccagcgugaucaccaucgagcugagcaacaucaaggagaucaagugcaacggcaccgacgccaaggugaagcugaucaagcaggagcuggacaaguacaagaacgccgugaccgaccugcagcugcugaugcagagcacccccgccgccggcagcggcagcgccaucugcagcggcaucgccgugugcaaggugcugcaccuggagggcgaggugaacaagaucaagaacgcccugcugagcaccaacaaggccguggugagccugagcaacggcgugagcgugcugaccuucaaggugcuggaccugaagaacuacaucgacaagcagcugcugcccauccugaacaagcagagcugcagcauccccaacaucgagaccgugaucgaguuccagcagaagaacaacagacugcuggagaucaccagagaguucagcgugaacgccggcgugaccacccccgugagcaccuacaugcugaccaacagcgagcugcugagccugaucaacgacaugcccaucaccaacgaccagaagaagcugaugagcaacaacgugcagaucgugagacagcagagcuacagcaucaugugcaucaucaaggaggaggugcuggccuacguggugcagcugccccuguacggcgugaucgacacccccugcuggaagcugcacaccagcccccugugcaccaccaacaccaaggagggcagcaacaucugccugaccagaaccgacagaggcugguacugcgacaacgccggcagcgugagcuucuucccccaggccgagaccugcaaggugcagagcaacagaguguucugcgacaccaugaacagccugacccugcccagcgaggugaaccugugcaacaucgacaucuucaaccccaaguacgacugcaagaucaugaccagcaagaccgacgugagcagcagcgugaucaccagccugggcgccaucgugagcugcuacggcaagaccaagugcaccgccagcaacaagaacagaggcaucaucaagaccuucagcaacggcugcgacuacgugagcaacaagggcguggacaccgugagcgugggcaacacccuguacugcgugaacaagcaggagggccagagccuguacgugaagggcgagcccaucaucaacuucuacgacccccugguguuccccagcgacgaguucgacgccagcaucagccaggugaacgagaagaucaaccagagccuggccuucaucagaaagagcgacgagcugcugcacaacgugaacgugggcaagagcaccaccaacaucaugaucaccaccaucaucaucgugaucaucgugauccugcugcugcugaucgccgugggccuguuccuguacugcaaggccagaagcacccccgugacccugagcaaggaccagcugagcggcaucaacaacaucgccuucagcaacugaggacuagugaagggaacacccaaauuuaauucagccuuaagcacaauuaauuaagagugaaacguaauuguacaagcaguuggucacccaccauagggcaugaucaacaccgcaaccuuuccuuuuucccccagugauucugaaaaaccccucuucccuucagcuugcuuagauguuccaaauuuaguaagcuuaaggcggccuacagaagaaaaagaaaaaaaaggccacaaaaguucccucucacuuucaguaaauaaaauaaaagcagcaacagaaauaaagaaauaaaugaaauucaaaaugaaauaaauauuguguugugcagcauuaaaaaaucaauaaaaauuaaaaaugagcaagaucuaaaaaaaaaaaaaaaaaaaaaaaaaaaaaaaaaaaaaaaaaaaaaaaaaaaaaaaaaaaaaaaaugcaucccccccccccccccccccccccccccccccaaaggcucuuuucagagccaccagaauu

SEQ ID NO: 15638 - RNA, 2193 nt, Artificial Sequence
  mRNA product Design f-1 comprising derived and/or modified sequence from HRSV(Memphis-37)__AIY60640.1__F_DSCav1_mut3 (opt5)
gggagagcggcucggccauuuugucccagucaguccggaggcugcggcugcagaaguaccgccugcggaguaacugcaaagaagcuuaccauggagcugcccauccucaagaccaacgccauuacaacgauccuggcugccgugacccuuugcuucgcgagcucccagaauauuacagaagaguuuuaccaaucuaccuguagcgcugucuccaaaggcuaucugggggcccucagaacaggaugguacaccucuguuaucacaauugaacugagcaacaucaaggagaucaaaugcaauggcaccgacgccaaggugaaacuuauuaagcaggaacuggauaaguauaaaaacgcugugacggaccuccagcugcugaugcaguccaccccugccgcugggucuggaagcgccaucuguuccggcauugcggucugcaaggugcuccaccuggagggggagguuaauaaaaucaagaacgcccuucugagcacaaauaaagcuguggucucucucuccaacggagugagcguucugaccuucaaggugcuugaucugaagaauuacauugacaaacaacuccugccgauccugaacaagcagucuuguuccauucccaauaucgaaacagucaucgaguuucagcagaaaaacaaucggcuccuggaaauuacccgcgaguucagcgugaacgccggcgugacgacaccugucucuaccuauaugcuuacaaauuccgagcugcucagccugaucaacgauaugcccauuaccaacgaccaaaagaaacuuauguccaauaacguucagaucgugagacagcagucuuacagcauuaugugcaucaucaaggaagaggugcuggcuuaugucgugcaacucccucuguacggcguuauugauacccccuguuggaaacugcauacauccccucucugcacgaccaauacaaaggaagggagcaacaucugucugacccggacagaccgcggaugguacugcgauaaugccggcucuguguccuuuuucccgcaggcggagaccuguaagguccagagcaacagaguguuuugcgacacgaugaacucucuuacacugcccagcgaaguuaaucucugcaauauugauaucuucaacccuaaauaugacuguaagauuaugaccuccaaaaccgaugugucuagcuccgucaucacaagccugggggccaucgugucuugcuacggaaagaccaaauguacagcuuccaauaagaaccggggcauuaucaagacguuuagcaaugggugcgacuaugucucuaacaaaggaguggacaccguuuccgugggcaauacacuuuacugugucaacaagcaagagggccagagccuguaugugaaaggggagcccauuaucaacuucuacgauccucucguuuuucccuccgacgaguucgaugccucuauuagccaggugaaugaaaagaucaaccagucccuggcuuuuauucgcaaaucugacgaacugcuccacaaugucaacgugggaaagagcaccacaaauaucaugaucaccacgauuaucauugugaucauuguuauccugcuucugcucaucgccgucggccuguuccuguauugcaaggccagauccaccccggugacacuuagcaaagaucaacucucugggauuaacaauaucgcuuucuccaacugaggacuagugaagggaacacccaaauuuaauucagccuuaagcacaauuaauuaagagugaaacguaauuguacaagcaguuggucacccaccauagggcaugaucaacaccgcaaccuuuccuuuuucccccagugauucugaaaaaccccucuucccuucagcuugcuuagauguuccaaauuuaguaagcuuaaggcggccuacagaagaaaaagaaaaaaaaggccacaaaaguucccucucacuuucaguaaauaaaauaaaagcagcaacagaaauaaagaaauaaaugaaauucaaaaugaaauaaauauuguguugugcagcauuaaaaaaucaauaaaaauuaaaaaugagcaagaucuaaaaaaaaaaaaaaaaaaaaaaaaaaaaaaaaaaaaaaaaaaaaaaaaaaaaaaaaaaaaaaaaugcaucccccccccccccccccccccccccccccccaaaggcucuuuucagagccaccagaauu

SEQ ID NO: 15639 - RNA, 2193 nt, Artificial Sequence
  mRNA product Design f-1 comprising derived and/or modified sequence from HRSV(Memphis-37)__AIY60640.1__F_DSCav1_mut3 (opt6)
gggagagcggcucggccauuuugucccagucaguccggaggcugcggcugcagaaguaccgccugcggaguaacugcaaagaagcuuaccauggaauuaccaauacuaaaaacaaaugccaucaccaccauccuggccgccguaacauuaugcuucgcaaguucacaaaauauaacagaagaauuuuaucaaucaacuugcagcgccguaucaaaaggcuacuuaggcgcacuacguacaggaugguacacaucaguaauaaccauagaacuauccaauauuaaagaaauaaaaugcaauggaacagacgcaaaaguuaaacuaauaaaacaagaauuagacaaauacaaaaacgcaguaaccgaccuucaauuacuaaugcaaucuacccccgcugcagguuccggaucagcaauauguucaggaauugcaguaugcaaaguccuacacuuagaaggagaaguaaacaaaauaaaaaacgcacuauuaagcaccaauaaagcagucguaucauuauccaacggcguuucaguacuaacauuuaaaguacuugaccuaaaaaacuauauagacaaacaacuacuucccauccuuaacaaacaaagcugcucaauaccuaauaucgaaacaguaauagaauuucaacaaaaaaacaaucgauuauuagaaaucacacgagaauuuucugucaacgcaggagucaccacacccguaucuacuuauauguuaaccaacucugaauuauuaucacuaaucaaugacaugccaauaacaaacgaucaaaaaaaauuaaugucaaauaacguacaaauaguaagacaacaaucauacucaauaaugugcauuauaaaagaagaaguacuagccuauguuguacaacucccacucuacggcguaauagacacaccaugcuggaaauuacacacuucaccacuaugcacaacaaacacaaaagaaggaucaaacaucugccuaaccagaaccgauagaggaugguauugcgacaaugccggaucaguuucauucuucccacaagcagaaacaugcaaaguacaauccaacagaguuuucugugacacaaugaacucgcuaacauuacccagcgaaguaaaccucugcaacauagacauauucaacccaaaauacgauugcaaaauaaugacuucuaaaacagauguuuccucaagcgucauaacgaguuuaggagcaauaguaagcuguuacggaaaaaccaaauguaccgcaucaaacaaaaaccgaggaauaauaaaaaccuuuucaaacggaugcgauuacgucuccaacaaaggagucgacacaguaucaguuggcaauacucuuuacugcguaaauaaacaagaaggacaaucacuauacguaaaaggcgaaccaauaauaaacuucuacgacccccucgucuucccuucagaugaauuugacgcaagcaucucacaaguuaaugaaaaaauaaaucaauccuuagcauucauacgaaaaucagacgaacuauuacacaacguaaacguaggaaaaucaacgacaaacauaaugauaacaacuaucauuauagucauaauagucauacuacuacuauuaauagccguaggcuuauuccuauacugcaaagcaagaucuacuccaguaacacucucaaaagaccaauuaucuggaauaaauaacauagcauucucuaauuaaggacuagugaagggaacacccaaauuuaauucagccuuaagcacaauuaauuaagagugaaacguaauuguacaagcaguuggucacccaccauagggcaugaucaacaccgcaaccuuuccuuuuucccccagugauucugaaaaaccccucuucccuucagcuugcuuagauguuccaaauuuaguaagcuuaaggcggccuacagaagaaaaagaaaaaaaaggccacaaaaguucccucucacuuucaguaaauaaaauaaaagcagcaacagaaauaaagaaauaaaugaaauucaaaaugaaauaaauauuguguugugcagcauuaaaaaaucaauaaaaauuaaaaaugagcaagaucuaaaaaaaaaaaaaaaaaaaaaaaaaaaaaaaaaaaaaaaaaaaaaaaaaaaaaaaaaaaaaaaaugcaucccccccccccccccccccccccccccccccaaaggcucuuuucagagccaccagaauu

SEQ ID NO: 15640 - RNA, 2193 nt, Artificial Sequence
  mRNA product Design f-1 comprising derived and/or modified sequence from HRSV(Memphis-37)__AIY60640.1__F_DSCav1_mut3 (opt11)
gggagagcggcucggccauuuugucccagucaguccggaggcugcggcugcagaaguaccgccugcggaguaacugcaaagaagcuuaccauggaacuccccauccucaaaaccaacgccauuaccacgauccucgccgcagucacccucugcuucgccuccucacaaaacaucacagaagaauuuuaccaaaguaccugcuccgccgucagcaaaggauaccucggcgcccuccgcaccggcugguacacauccgucauaaccaucgaacucagcaacaucaaagaaaucaaauguaacggaaccgacgccaaaguaaaacuaauaaaacaagaacucgacaaauacaagaacgccgucaccgaccuccaacuccucaugcaaucuacccccgccgccggcucagguagcgccaucugcagcgguauugccgucugcaaaguacuccaccuagaaggagaagucaauaaaaucaaaaacgcccuacucuccaccaacaaggcagucgucagccucuccaacggcgucucagucuuaaccuucaaagugcucgaccucaaaaauuacauagacaaacaacuacuccccauucucaacaaacaauccugcuccauacccaacauagaaaccgucauugaauuucaacagaaaaacaaccgccuccucgaaaucacgcgcgaguucagugucaacgccggcgucaccaccccagucucgacauacaugcucacaaacucagaacuccucucguuaaucaacgacaugccaauaaccaacgaccaaaagaaacuaauguccaacaacguucaaauaguucgccaacaaucauacuccauaaugugcaucaucaaagaagaaguccucgccuacguuguacaauuaccccucuacggcgucaucgacacaccaugcuggaaacuccacacaucgccccucugcaccaccaacaccaaagaaggcagcaacauuugccucacccggacagaccgcggcugguacugcgacaaugcaggcagcgucucauucuucccacaagccgaaaccugcaaaguccaaagcaaccgugucuucugcgacacaaugaacucccuuacccucccaagcgaaguaaaccucugcaauauugacaucuucaaccccaaauacgacugcaaaaucaugaccuccaaaaccgacgucuccucaucagucaucaccucccuuggcgccauugucuccuguuacgguaaaaccaaaugcaccgccuccaacaaaaaccgcggcaucaucaaaaccuucucuaacggcugcgacuacgucucaaacaaaggcgucgacacugucuccgucggcaacacccuauacugcgucaacaagcaagaaggacagucccuauacguaaaaggugaaccaauuaucaacuucuacgacccccuagucuucccauccgacgaguucgaugccuccaucucccaaguaaaugaaaagaucaaucaaagccuggccuucauccgcaaauccgacgaacuacuccacaaugucaacgucggaaaaucaacaacaaacaucaugaucaccaccaucaucaucgucaucauaguaauccuccuacugcucaucgccgucggucucuuccuauacugcaaagcccguucuacuccagucacccucuccaaagaccaacuaucaggaaucaacaacaucgccuucagcaacuaaggacuagugaagggaacacccaaauuuaauucagccuuaagcacaauuaauuaagagugaaacguaauuguacaagcaguuggucacccaccauagggcaugaucaacaccgcaaccuuuccuuuuucccccagugauucugaaaaaccccucuucccuucagcuugcuuagauguuccaaauuuaguaagcuuaaggcggccuacagaagaaaaagaaaaaaaaggccacaaaaguucccucucacuuucaguaaauaaaauaaaagcagcaacagaaauaaagaaauaaaugaaauucaaaaugaaauaaauauuguguugugcagcauuaaaaaaucaauaaaaauuaaaaaugagcaagaucuaaaaaaaaaaaaaaaaaaaaaaaaaaaaaaaaaaaaaaaaaaaaaaaaaaaaaaaaaaaaaaaaugcaucccccccccccccccccccccccccccccccaaaggcucuuuucagagccaccagaauu

SEQ ID NO: 15641 - RNA, 1973 nt, Artificial Sequence
  mRNA product Design f-2 comprising derived and/or modified sequence from HRSV(Memphis-37)__AIY60640.1__F_DSCav1_mut3 (opt1)
gggagagcggcucggccauuuugucccagucaguccggaggcugcggcugcagaaguaccgccugcggaguaacugcaaagaagcuuaccauggagcugcccauccucaagaccaacgccaucaccacgauccuggccgcggugacccugugcuucgccagcucccagaacaucaccgaggaguucuaccagagcacgugcuccgccgucagcaagggcuaccucggcgcccugcgcaccgggugguacaccagcgugaucaccaucgagcuguccaacaucaaggagaucaagugcaacggcaccgacgccaaggugaagcucaucaagcaggagcuggacaaguacaagaacgcggucacggaccugcagcuccugaugcagagcaccccggccgccggcuccgggagcgcgaucugcuccggcaucgccgucugcaaggugcugcaccucgagggcgaggugaacaagaucaagaacgcccugcuguccaccaacaaggccgucgugagccucuccaacggggugagcguccugaccuucaaggugcuggaccucaagaacuacaucgacaagcagcugcugcccauccugaacaagcagagcugcuccauccccaacaucgagaccgucaucgaguuccagcagaagaacaaccgccuccuggagaucacgcgggaguucagcgugaacgcgggcgugaccacccccgucuccaccuacaugcugacgaacagcgagcuccugucccugaucaacgacaugccgaucaccaacgaccagaagaagcucaugagcaacaacgugcagaucgugcgccagcaguccuacagcaucaugugcaucaucaaggaggagguccuggccuacguggugcagcugccccucuacggggucaucgacacccccugcuggaagcugcacaccagcccccugugcacgaccaacaccaaggagggcuccaacaucugccucacccggacggaccgcgggugguacugcgacaacgccggcagcguguccuucuucccgcaggccgagaccugcaagguccagagcaaccggguguucugcgacaccaugaacucccugacccugcccagcgaggugaaccucugcaacaucgacaucuucaaccccaaguacgacugcaagaucaugacguccaagaccgacgucagcuccagcgugaucaccucccugggcgccaucgugagcugcuacgggaagaccaagugcacggcgagcaacaagaaccgcggcaucaucaagaccuucuccaacgggugcgacuacgucagcaacaagggcguggacaccguguccgucggcaacacccuguacugcgugaacaagcaggagggccagagccucuacgugaagggggagcccaucaucaacuucuacgacccgcuggucuuccccuccgacgaguucgacgccagcaucucccaggugaacgagaagaucaaccagagccuggccuucauccggaaguccgacgagcuccugcacaacgugaacgucggcaagagcaccacgaacaucaugaucaccaccaucaucaucgugaucaucgugauccugcugcuccugaucgccgucgggcuguuccucuacugcaaggcccgcuccacccccgugacgcugagcaaggaccagcuguccgggaucaacaacaucgcguucagcaacugaggacuaguggaagcauuuuccuggcugauuaaaagaaauuacucagcuauggucaucuguuccuguuagaaggcuaugcagcauauuauauacuaugcgcauguuaugaaaugcauaauaaaaaauuuuaaaaaaucuaaaagaucuaaaaaaaaaaaaaaaaaaaaaaaaaaaaaaaaaaaaaaaaaaaaaaaaaaaaaaaaaaaaaaaaugcaucccccccccccccccccccccccccccccccaaaggcucuuuucagagccaccagaauu

SEQ ID NO: 15642 - RNA, 1973 nt, Artificial Sequence
  mRNA product Design f-2 comprising derived and/or modified sequence from HRSV(Memphis-37)__AIY60640.1__F_DSCav1_mut3 (opt1)
gggagagcggcucggccauuuugucccagucaguccggaggcugcggcugcagaaguaccgccugcggaguaacugcaaagaagcuuaccauggagcugcccauccucaagaccaacgccaucaccacgauccuggccgcggugacccugugcuucgccagcucccagaacaucaccgaggaguucuaccagagcacgugcuccgccgucagcaagggcuaccucggggcccugcgcaccggcugguacaccuccgugaucaccaucgagcugagcaacaucaaggagaucaagugcaacgggaccgacgccaaggugaagcucaucaagcaggagcuggacaaguacaagaacgcggucacggaccugcagcuccugaugcaguccaccccggccgccggcagcggguccgccaucugcagcggcaucgcggugugcaaggugcugcaccucgagggcgaggucaacaagaucaagaacgcccugcuguccaccaacaaggccguggugagccucuccaacggggucagcgugcugaccuucaaggugcuggaccucaagaacuacaucgacaagcagcugcugcccauccucaacaagcaguccugcagcauccccaacaucgagacggucaucgaguuccagcagaagaacaaccggcugcuggagaucacccgcgaguucuccgugaacgccggcgugaccacccccgucagcacguacaugcucaccaacuccgagcugcugagccucaucaacgacaugccgaucaccaacgaccagaagaagcugaugagcaacaacgugcagaucgugcggcagcaguccuacagcaucaugugcaucaucaaggaggagguccuggccuacguggugcagcucccccuguacggggucaucgacacccccugcuggaagcugcacacgagcccccucugcaccaccaacaccaaggagggcuccaacaucugccugacgcgcaccgaccgggggugguacugcgacaacgcgggcuccgugagcuucuucccgcaggccgagaccugcaaggugcaguccaaccgcgucuucugcgacaccaugaacagccugacgcuccccuccgaggugaaccugugcaacaucgacaucuucaaccccaaguacgacugcaagaucaugaccagcaagaccgacgucuccagcuccgugaucaccagccugggcgccaucguguccugcuacgggaagacgaagugcaccgccagcaacaagaaccggggcaucaucaagaccuucuccaacgggugcgacuacgucagcaacaagggcguggacaccguguccgucggcaacacgcucuacugcgugaacaagcaggaggggcagagccuguacgugaagggcgagcccaucaucaacuucuacgacccgcuggucuuccccagcgacgaguucgacgccuccaucagccaggugaacgagaagaucaaccagucccucgcguucauccgcaagagcgacgagcugcugcacaacgugaacgucgggaaguccaccaccaacaucaugaucaccaccaucaucaucgugaucaucgugauccuccugcugcucaucgccgucggccuguuccuguacugcaaggcccggagcacgcccgugacccuguccaaggaccagcucagcgggaucaacaacaucgccuucuccaacugaggacuaguggaagcauuuuccuggcugauuaaaagaaauuacucagcuauggucaucuguuccuguuagaaggcuaugcagcauauuauauacuaugcgcauguuaugaaaugcauaauaaaaaauuuuaaaaaaucuaaaagaucuaaaaaaaaaaaaaaaaaaaaaaaaaaaaaaaaaaaaaaaaaaaaaaaaaaaaaaaaaaaaaaaaugcaucccccccccccccccccccccccccccccccaaaggcucuuuucagagccaccagaauu

SEQ ID NO: 15643 - RNA, 1973 nt, Artificial Sequence
  mRNA product Design f-2 comprising derived and/or modified sequence from HRSV(Memphis-37)__AIY60640.1__F_DSCav1_mut3 (opt2)
gggagagcggcucggccauuuugucccagucaguccggaggcugcggcugcagaaguaccgccugcggaguaacugcaaagaagcuuaccauggagcuccccauccucaagaccaacgccaucaccaccauccucgccgccgucacccucugcuucgccuccucccagaacaucaccgaggaguucuaccaguccaccugcuccgccgucuccaagggcuaccucggcgcccuccgcaccggcugguacaccuccgucaucaccaucgagcucuccaacaucaaggagaucaagugcaacggcaccgacgccaaggucaagcucaucaagcaggagcucgacaaguacaagaacgccgucaccgaccuccagcuccucaugcaguccacccccgccgccggcuccggcuccgccaucugcuccggcaucgccgucugcaagguccuccaccucgagggcgaggucaacaagaucaagaacgcccuccucuccaccaacaaggccgucgucucccucuccaacggcgucuccguccucaccuucaagguccucgaccucaagaacuacaucgacaagcagcuccuccccauccucaacaagcaguccugcuccauccccaacaucgagaccgucaucgaguuccagcagaagaacaaccgccuccucgagaucacccgcgaguucuccgucaacgccggcgucaccacccccgucuccaccuacaugcucaccaacuccgagcuccucucccucaucaacgacaugcccaucaccaacgaccagaagaagcucauguccaacaacguccagaucguccgccagcaguccuacuccaucaugugcaucaucaaggaggagguccucgccuacgucguccagcucccccucuacggcgucaucgacacccccugcuggaagcuccacaccuccccccucugcaccaccaacaccaaggagggcuccaacaucugccucacccgcaccgaccgcggcugguacugcgacaacgccggcuccgucuccuucuucccccaggccgagaccugcaagguccaguccaaccgcgucuucugcgacaccaugaacucccucacccuccccuccgaggucaaccucugcaacaucgacaucuucaaccccaaguacgacugcaagaucaugaccuccaagaccgacgucuccuccuccgucaucaccucccucggcgccaucgucuccugcuacggcaagaccaagugcaccgccuccaacaagaaccgcggcaucaucaagaccuucuccaacggcugcgacuacgucuccaacaagggcgucgacaccgucuccgucggcaacacccucuacugcgucaacaagcaggagggccagucccucuacgucaagggcgagcccaucaucaacuucuacgacccccucgucuuccccuccgacgaguucgacgccuccaucucccaggucaacgagaagaucaaccagucccucgccuucauccgcaaguccgacgagcuccuccacaacgucaacgucggcaaguccaccaccaacaucaugaucaccaccaucaucaucgucaucaucgucauccuccuccuccucaucgccgucggccucuuccucuacugcaaggcccgcuccacccccgucacccucuccaaggaccagcucuccggcaucaacaacaucgccuucuccaacugaggacuaguggaagcauuuuccuggcugauuaaaagaaauuacucagcuauggucaucuguuccuguuagaaggcuaugcagcauauuauauacuaugcgcauguuaugaaaugcauaauaaaaaauuuuaaaaaaucuaaaagaucuaaaaaaaaaaaaaaaaaaaaaaaaaaaaaaaaaaaaaaaaaaaaaaaaaaaaaaaaaaaaaaaaugcaucccccccccccccccccccccccccccccccaaaggcucuuuucagagccaccagaauu

SEQ ID NO: 15644 - RNA, 1973 nt, Artificial Sequence
  mRNA product Design f-2 comprising derived and/or modified sequence from HRSV(Memphis-37)__AIY60640.1__F_DSCav1_mut3 (opt3)
gggagagcggcucggccauuuugucccagucaguccggaggcugcggcugcagaaguaccgccugcggaguaacugcaaagaagcuuaccauggagcugcccauccucaagaccaacgccauuacaacuauacuugcugcagugacgcugugcuucgccagcucccagaauaucaccgaagaguuuuaccaaucuacauguucagcggucaguaaaggcuauuugggggcuuuaagaacuggaugguacaccagcguuauuacaaucgaacuguccaacauuaaggagaucaaaugcaaugguaccgacgccaaggugaaacuaauaaagcaggaacucgauaaguauaaaaacgcaguaacugaccugcagcuucugaugcagucuacuccugccgcuggcucggggucagcaaucuguagcggaauugccgugugcaaggucuugcaccucgagggcgaggugaauaaaaucaagaacgcucugcugaguaccaauaaagccguugugucccucucuaacggugucagcguguuaacguucaagguacuggaucuuaagaauuacauugacaaacaauugcugccaauccuaaacaagcaguccuguucaauaccgaauauugaaacuguuaucgaguuucagcagaaaaacaauaggcuccuggaaauuacccgggaguucagugugaacgcgggggucacaacucccgugagcaccuauaugcuuacaaauucugagcuguugucccucaucaacgauaugccuaucaccaacgaccaaaagaaacugaugucaaauaacgugcagauuguccgccagcagagcuacaguauaaugugcaucauuaaggaagagguuuuagcauaugugguacaacugccacucuacggagugaucgauacgcccuguuggaaacuucauacuucuccucugugcacaaccaauacuaaggaaggcuccaacauauguuugacacgaaccgaccguggcugguacugcgauaaugccgggagcgucucguuuuucccacaggcugagacguguaaggugcagucuaacagaguuuucugcgacaccaugaacucccuaacacugcccucagaagugaaucucugcaauauugauaucuucaacccuaaauaugacuguaagaucaugacaaguaaaaccgaugucagcuccucugugauuacaagccugggagccaucguaucaugcuacgguaagacuaaauguaccgcaaguaauaagaacaggggcauuauaaagacauuuuccaaugggugcgacuauguuagcaacaaaggaguggacaccgucucugugggcaauacucuuuacugugucaacaagcaagagggucagucacuguaugugaaaggggagccaaucauuaacuucuacgauccguugguuuuucccagugacgaauuugaugcuagcaucucccaggugaaugagaagaucaaccagucucucgccuuuauucggaaaucggacgaacuguuacacaauguaaacgucggaaagagcacgacaaauauaaugaucaccacuauuaucauugugaucauaguuauccugcuacuccugauugcggugggccuuuucuuguauugcaaggcccgcuccaccccugucacacugucaaaagaucaacucaguggcaucaacaauauugcauucucuaacugaggacuaguggaagcauuuuccuggcugauuaaaagaaauuacucagcuauggucaucuguuccuguuagaaggcuaugcagcauauuauauacuaugcgcauguuaugaaaugcauaauaaaaaauuuuaaaaaaucuaaaagaucuaaaaaaaaaaaaaaaaaaaaaaaaaaaaaaaaaaaaaaaaaaaaaaaaaaaaaaaaaaaaaaaaugcaucccccccccccccccccccccccccccccccaaaggcucuuuucagagccaccagaauu

SEQ ID NO: 15645 - RNA, 1973 nt, Artificial Sequence
  mRNA product Design f-2 comprising derived and/or modified sequence from HRSV(Memphis-37)__AIY60640.1__F_DSCav1_mut3 (opt4)
gggagagcggcucggccauuuugucccagucaguccggaggcugcggcugcagaaguaccgccugcggaguaacugcaaagaagcuuaccauggagcugcccauccugaagaccaacgccaucaccaccauccuggccgccgugacccugugcuucgccagcagccagaacaucaccgaggaguucuaccagagcaccugcagcgccgugagcaagggcuaccugggcgcccugagaaccggcugguacaccagcgugaucaccaucgagcugagcaacaucaaggagaucaagugcaacggcaccgacgccaaggugaagcugaucaagcaggagcuggacaaguacaagaacgccgugaccgaccugcagcugcugaugcagagcacccccgccgccggcagcggcagcgccaucugcagcggcaucgccgugugcaaggugcugcaccuggagggcgaggugaacaagaucaagaacgcccugcugagcaccaacaaggccguggugagccugagcaacggcgugagcgugcugaccuucaaggugcuggaccugaagaacuacaucgacaagcagcugcugcccauccugaacaagcagagcugcagcauccccaacaucgagaccgugaucgaguuccagcagaagaacaacagacugcuggagaucaccagagaguucagcgugaacgccggcgugaccacccccgugagcaccuacaugcugaccaacagcgagcugcugagccugaucaacgacaugcccaucaccaacgaccagaagaagcugaugagcaacaacgugcagaucgugagacagcagagcuacagcaucaugugcaucaucaaggaggaggugcuggccuacguggugcagcugccccuguacggcgugaucgacacccccugcuggaagcugcacaccagcccccugugcaccaccaacaccaaggagggcagcaacaucugccugaccagaaccgacagaggcugguacugcgacaacgccggcagcgugagcuucuucccccaggccgagaccugcaaggugcagagcaacagaguguucugcgacaccaugaacagccugacccugcccagcgaggugaaccugugcaacaucgacaucuucaaccccaaguacgacugcaagaucaugaccagcaagaccgacgugagcagcagcgugaucaccagccugggcgccaucgugagcugcuacggcaagaccaagugcaccgccagcaacaagaacagaggcaucaucaagaccuucagcaacggcugcgacuacgugagcaacaagggcguggacaccgugagcgugggcaacacccuguacugcgugaacaagcaggagggccagagccuguacgugaagggcgagcccaucaucaacuucuacgacccccugguguuccccagcgacgaguucgacgccagcaucagccaggugaacgagaagaucaaccagagccuggccuucaucagaaagagcgacgagcugcugcacaacgugaacgugggcaagagcaccaccaacaucaugaucaccaccaucaucaucgugaucaucgugauccugcugcugcugaucgccgugggccuguuccuguacugcaaggccagaagcacccccgugacccugagcaaggaccagcugagcggcaucaacaacaucgccuucagcaacugaggacuaguggaagcauuuuccuggcugauuaaaagaaauuacucagcuauggucaucuguuccuguuagaaggcuaugcagcauauuauauacuaugcgcauguuaugaaaugcauaauaaaaaauuuuaaaaaaucuaaaagaucuaaaaaaaaaaaaaaaaaaaaaaaaaaaaaaaaaaaaaaaaaaaaaaaaaaaaaaaaaaaaaaaaugcaucccccccccccccccccccccccccccccccaaaggcucuuuucagagccaccagaauu

SEQ ID NO: 15646 - RNA, 1973 nt, Artificial Sequence
  mRNA product Design f-2 comprising derived and/or modified sequence from HRSV(Memphis-37)__AIY60640.1__F_DSCav1_mut3 (opt5)
gggagagcggcucggccauuuugucccagucaguccggaggcugcggcugcagaaguaccgccugcggaguaacugcaaagaagcuuaccauggagcugcccauccucaagaccaacgccauuacaacgauccuggcugccgugacccuuugcuucgcgagcucccagaauauuacagaagaguuuuaccaaucuaccuguagcgcugucuccaaaggcuaucugggggcccucagaacaggaugguacaccucuguuaucacaauugaacugagcaacaucaaggagaucaaaugcaauggcaccgacgccaaggugaaacuuauuaagcaggaacuggauaaguauaaaaacgcugugacggaccuccagcugcugaugcaguccaccccugccgcugggucuggaagcgccaucuguuccggcauugcggucugcaaggugcuccaccuggagggggagguuaauaaaaucaagaacgcccuucugagcacaaauaaagcuguggucucucucuccaacggagugagcguucugaccuucaaggugcuugaucugaagaauuacauugacaaacaacuccugccgauccugaacaagcagucuuguuccauucccaauaucgaaacagucaucgaguuucagcagaaaaacaaucggcuccuggaaauuacccgcgaguucagcgugaacgccggcgugacgacaccugucucuaccuauaugcuuacaaauuccgagcugcucagccugaucaacgauaugcccauuaccaacgaccaaaagaaacuuauguccaauaacguucagaucgugagacagcagucuuacagcauuaugugcaucaucaaggaagaggugcuggcuuaugucgugcaacucccucuguacggcguuauugauacccccuguuggaaacugcauacauccccucucugcacgaccaauacaaaggaagggagcaacaucugucugacccggacagaccgcggaugguacugcgauaaugccggcucuguguccuuuuucccgcaggcggagaccuguaagguccagagcaacagaguguuuugcgacacgaugaacucucuuacacugcccagcgaaguuaaucucugcaauauugauaucuucaacccuaaauaugacuguaagauuaugaccuccaaaaccgaugugucuagcuccgucaucacaagccugggggccaucgugucuugcuacggaaagaccaaauguacagcuuccaauaagaaccggggcauuaucaagacguuuagcaaugggugcgacuaugucucuaacaaaggaguggacaccguuuccgugggcaauacacuuuacugugucaacaagcaagagggccagagccuguaugugaaaggggagcccauuaucaacuucuacgauccucucguuuuucccuccgacgaguucgaugccucuauuagccaggugaaugaaaagaucaaccagucccuggcuuuuauucgcaaaucugacgaacugcuccacaaugucaacgugggaaagagcaccacaaauaucaugaucaccacgauuaucauugugaucauuguuauccugcuucugcucaucgccgucggccuguuccuguauugcaaggccagauccaccccggugacacuuagcaaagaucaacucucugggauuaacaauaucgcuuucuccaacugaggacuaguggaagcauuuuccuggcugauuaaaagaaauuacucagcuauggucaucuguuccuguuagaaggcuaugcagcauauuauauacuaugcgcauguuaugaaaugcauaauaaaaaauuuuaaaaaaucuaaaagaucuaaaaaaaaaaaaaaaaaaaaaaaaaaaaaaaaaaaaaaaaaaaaaaaaaaaaaaaaaaaaaaaaugcaucccccccccccccccccccccccccccccccaaaggcucuuuucagagccaccagaauu

SEQ ID NO: 15647 - RNA, 1973 nt, Artificial Sequence
  mRNA product Design f-2 comprising derived and/or modified sequence from HRSV(Memphis-37)__AIY60640.1__F_DSCav1_mut3 (opt6)
gggagagcggcucggccauuuugucccagucaguccggaggcugcggcugcagaaguaccgccugcggaguaacugcaaagaagcuuaccauggaauuaccaauacuaaaaacaaaugccaucaccaccauccuggccgccguaacauuaugcuucgcaaguucacaaaauauaacagaagaauuuuaucaaucaacuugcagcgccguaucaaaaggcuacuuaggcgcacuacguacaggaugguacacaucaguaauaaccauagaacuauccaauauuaaagaaauaaaaugcaauggaacagacgcaaaaguuaaacuaauaaaacaagaauuagacaaauacaaaaacgcaguaaccgaccuucaauuacuaaugcaaucuacccccgcugcagguuccggaucagcaauauguucaggaauugcaguaugcaaaguccuacacuuagaaggagaaguaaacaaaauaaaaaacgcacuauuaagcaccaauaaagcagucguaucauuauccaacggcguuucaguacuaacauuuaaaguacuugaccuaaaaaacuauauagacaaacaacuacuucccauccuuaacaaacaaagcugcucaauaccuaauaucgaaacaguaauagaauuucaacaaaaaaacaaucgauuauuagaaaucacacgagaauuuucugucaacgcaggagucaccacacccguaucuacuuauauguuaaccaacucugaauuauuaucacuaaucaaugacaugccaauaacaaacgaucaaaaaaaauuaaugucaaauaacguacaaauaguaagacaacaaucauacucaauaaugugcauuauaaaagaagaaguacuagccuauguuguacaacucccacucuacggcguaauagacacaccaugcuggaaauuacacacuucaccacuaugcacaacaaacacaaaagaaggaucaaacaucugccuaaccagaaccgauagaggaugguauugcgacaaugccggaucaguuucauucuucccacaagcagaaacaugcaaaguacaauccaacagaguuuucugugacacaaugaacucgcuaacauuacccagcgaaguaaaccucugcaacauagacauauucaacccaaaauacgauugcaaaauaaugacuucuaaaacagauguuuccucaagcgucauaacgaguuuaggagcaauaguaagcuguuacggaaaaaccaaauguaccgcaucaaacaaaaaccgaggaauaauaaaaaccuuuucaaacggaugcgauuacgucuccaacaaaggagucgacacaguaucaguuggcaauacucuuuacugcguaaauaaacaagaaggacaaucacuauacguaaaaggcgaaccaauaauaaacuucuacgacccccucgucuucccuucagaugaauuugacgcaagcaucucacaaguuaaugaaaaaauaaaucaauccuuagcauucauacgaaaaucagacgaacuauuacacaacguaaacguaggaaaaucaacgacaaacauaaugauaacaacuaucauuauagucauaauagucauacuacuacuauuaauagccguaggcuuauuccuauacugcaaagcaagaucuacuccaguaacacucucaaaagaccaauuaucuggaauaaauaacauagcauucucuaauuaaggacuaguggaagcauuuuccuggcugauuaaaagaaauuacucagcuauggucaucuguuccuguuagaaggcuaugcagcauauuauauacuaugcgcauguuaugaaaugcauaauaaaaaauuuuaaaaaaucuaaaagaucuaaaaaaaaaaaaaaaaaaaaaaaaaaaaaaaaaaaaaaaaaaaaaaaaaaaaaaaaaaaaaaaaugcaucccccccccccccccccccccccccccccccaaaggcucuuuucagagccaccagaauu

SEQ ID NO: 15648 - RNA, 1973 nt, Artificial Sequence
  mRNA product Design f-2 comprising derived and/or modified sequence from HRSV(Memphis-37)__AIY60640.1__F_DSCav1_mut3 (opt11)
gggagagcggcucggccauuuugucccagucaguccggaggcugcggcugcagaaguaccgccugcggaguaacugcaaagaagcuuaccauggaacuccccauccucaaaaccaacgccauuaccacgauccucgccgcagucacccucugcuucgccuccucacaaaacaucacagaagaauuuuaccaaaguaccugcuccgccgucagcaaaggauaccucggcgcccuccgcaccggcugguacacauccgucauaaccaucgaacucagcaacaucaaagaaaucaaauguaacggaaccgacgccaaaguaaaacuaauaaaacaagaacucgacaaauacaagaacgccgucaccgaccuccaacuccucaugcaaucuacccccgccgccggcucagguagcgccaucugcagcgguauugccgucugcaaaguacuccaccuagaaggagaagucaauaaaaucaaaaacgcccuacucuccaccaacaaggcagucgucagccucuccaacggcgucucagucuuaaccuucaaagugcucgaccucaaaaauuacauagacaaacaacuacuccccauucucaacaaacaauccugcuccauacccaacauagaaaccgucauugaauuucaacagaaaaacaaccgccuccucgaaaucacgcgcgaguucagugucaacgccggcgucaccaccccagucucgacauacaugcucacaaacucagaacuccucucguuaaucaacgacaugccaauaaccaacgaccaaaagaaacuaauguccaacaacguucaaauaguucgccaacaaucauacuccauaaugugcaucaucaaagaagaaguccucgccuacguuguacaauuaccccucuacggcgucaucgacacaccaugcuggaaacuccacacaucgccccucugcaccaccaacaccaaagaaggcagcaacauuugccucacccggacagaccgcggcugguacugcgacaaugcaggcagcgucucauucuucccacaagccgaaaccugcaaaguccaaagcaaccgugucuucugcgacacaaugaacucccuuacccucccaagcgaaguaaaccucugcaauauugacaucuucaaccccaaauacgacugcaaaaucaugaccuccaaaaccgacgucuccucaucagucaucaccucccuuggcgccauugucuccuguuacgguaaaaccaaaugcaccgccuccaacaaaaaccgcggcaucaucaaaaccuucucuaacggcugcgacuacgucucaaacaaaggcgucgacacugucuccgucggcaacacccuauacugcgucaacaagcaagaaggacagucccuauacguaaaaggugaaccaauuaucaacuucuacgacccccuagucuucccauccgacgaguucgaugccuccaucucccaaguaaaugaaaagaucaaucaaagccuggccuucauccgcaaauccgacgaacuacuccacaaugucaacgucggaaaaucaacaacaaacaucaugaucaccaccaucaucaucgucaucauaguaauccuccuacugcucaucgccgucggucucuuccuauacugcaaagcccguucuacuccagucacccucuccaaagaccaacuaucaggaaucaacaacaucgccuucagcaacuaaggacuaguggaagcauuuuccuggcugauuaaaagaaauuacucagcuauggucaucuguuccuguuagaaggcuaugcagcauauuauauacuaugcgcauguuaugaaaugcauaauaaaaaauuuuaaaaaaucuaaaagaucuaaaaaaaaaaaaaaaaaaaaaaaaaaaaaaaaaaaaaaaaaaaaaaaaaaaaaaaaaaaaaaaaugcaucccccccccccccccccccccccccccccccaaaggcucuuuucagagccaccagaauu

SEQ ID NO: 15649 - RNA, 1964 nt, Artificial Sequence
  mRNA product Design f-3 comprising derived and/or modified sequence from HRSV(Memphis-37)__AIY60640.1__F_DSCav1_mut3 (opt1)
gggagagucccgcagucggcguccagcggcucugcuuguucgugugugugucguugcaggccuuauucaagcuuaccauggagcugcccauccucaagaccaacgccaucaccacgauccuggccgcggugacccugugcuucgccagcucccagaacaucaccgaggaguucuaccagagcacgugcuccgccgucagcaagggcuaccucggcgcccugcgcaccgggugguacaccagcgugaucaccaucgagcuguccaacaucaaggagaucaagugcaacggcaccgacgccaaggugaagcucaucaagcaggagcuggacaaguacaagaacgcggucacggaccugcagcuccugaugcagagcaccccggccgccggcuccgggagcgcgaucugcuccggcaucgccgucugcaaggugcugcaccucgagggcgaggugaacaagaucaagaacgcccugcuguccaccaacaaggccgucgugagccucuccaacggggugagcguccugaccuucaaggugcuggaccucaagaacuacaucgacaagcagcugcugcccauccugaacaagcagagcugcuccauccccaacaucgagaccgucaucgaguuccagcagaagaacaaccgccuccuggagaucacgcgggaguucagcgugaacgcgggcgugaccacccccgucuccaccuacaugcugacgaacagcgagcuccugucccugaucaacgacaugccgaucaccaacgaccagaagaagcucaugagcaacaacgugcagaucgugcgccagcaguccuacagcaucaugugcaucaucaaggaggagguccuggccuacguggugcagcugccccucuacggggucaucgacacccccugcuggaagcugcacaccagcccccugugcacgaccaacaccaaggagggcuccaacaucugccucacccggacggaccgcgggugguacugcgacaacgccggcagcguguccuucuucccgcaggccgagaccugcaagguccagagcaaccggguguucugcgacaccaugaacucccugacccugcccagcgaggugaaccucugcaacaucgacaucuucaaccccaaguacgacugcaagaucaugacguccaagaccgacgucagcuccagcgugaucaccucccugggcgccaucgugagcugcuacgggaagaccaagugcacggcgagcaacaagaaccgcggcaucaucaagaccuucuccaacgggugcgacuacgucagcaacaagggcguggacaccguguccgucggcaacacccuguacugcgugaacaagcaggagggccagagccucuacgugaagggggagcccaucaucaacuucuacgacccgcuggucuuccccuccgacgaguucgacgccagcaucucccaggugaacgagaagaucaaccagagccuggccuucauccggaaguccgacgagcuccugcacaacgugaacgucggcaagagcaccacgaacaucaugaucaccaccaucaucaucgugaucaucgugauccugcugcuccugaucgccgucgggcuguuccucuacugcaaggcccgcuccacccccgugacgcugagcaaggaccagcuguccgggaucaacaacaucgcguucagcaacugaggacuaguacuggcugcaucucccuuuccucuguccuccauccuucucccaggauggugaagggggaccugguacccagugauccccaccccaggauccuaaaucaugacuuaccugcuaauaaaaacucauuggaaaagugagaagaucuaaaaaaaaaaaaaaaaaaaaaaaaaaaaaaaaaaaaaaaaaaaaaaaaaaaaaaaaaaaaaaaaugcaucccccccccccccccccccccccccccccccaaaggcucuuuucagagccaccagaauu

SEQ ID NO: 15650 - RNA, 1964 nt, Artificial Sequence
  mRNA product Design f-3 comprising derived and/or modified sequence from HRSV(Memphis-37)__AIY60640.1__F_DSCav1_mut3 (opt1)
gggagagucccgcagucggcguccagcggcucugcuuguucgugugugugucguugcaggccuuauucaagcuuaccauggagcugcccauccucaagaccaacgccaucaccacgauccuggccgcggugacccugugcuucgccagcucccagaacaucaccgaggaguucuaccagagcacgugcuccgccgucagcaagggcuaccucggggcccugcgcaccggcugguacaccuccgugaucaccaucgagcugagcaacaucaaggagaucaagugcaacgggaccgacgccaaggugaagcucaucaagcaggagcuggacaaguacaagaacgcggucacggaccugcagcuccugaugcaguccaccccggccgccggcagcggguccgccaucugcagcggcaucgcggugugcaaggugcugcaccucgagggcgaggucaacaagaucaagaacgcccugcuguccaccaacaaggccguggugagccucuccaacggggucagcgugcugaccuucaaggugcuggaccucaagaacuacaucgacaagcagcugcugcccauccucaacaagcaguccugcagcauccccaacaucgagacggucaucgaguuccagcagaagaacaaccggcugcuggagaucacccgcgaguucuccgugaacgccggcgugaccacccccgucagcacguacaugcucaccaacuccgagcugcugagccucaucaacgacaugccgaucaccaacgaccagaagaagcugaugagcaacaacgugcagaucgugcggcagcaguccuacagcaucaugugcaucaucaaggaggagguccuggccuacguggugcagcucccccuguacggggucaucgacacccccugcuggaagcugcacacgagcccccucugcaccaccaacaccaaggagggcuccaacaucugccugacgcgcaccgaccgggggugguacugcgacaacgcgggcuccgugagcuucuucccgcaggccgagaccugcaaggugcaguccaaccgcgucuucugcgacaccaugaacagccugacgcuccccuccgaggugaaccugugcaacaucgacaucuucaaccccaaguacgacugcaagaucaugaccagcaagaccgacgucuccagcuccgugaucaccagccugggcgccaucguguccugcuacgggaagacgaagugcaccgccagcaacaagaaccggggcaucaucaagaccuucuccaacgggugcgacuacgucagcaacaagggcguggacaccguguccgucggcaacacgcucuacugcgugaacaagcaggaggggcagagccuguacgugaagggcgagcccaucaucaacuucuacgacccgcuggucuuccccagcgacgaguucgacgccuccaucagccaggugaacgagaagaucaaccagucccucgcguucauccgcaagagcgacgagcugcugcacaacgugaacgucgggaaguccaccaccaacaucaugaucaccaccaucaucaucgugaucaucgugauccuccugcugcucaucgccgucggccuguuccuguacugcaaggcccggagcacgcccgugacccuguccaaggaccagcucagcgggaucaacaacaucgccuucuccaacugaggacuaguacuggcugcaucucccuuuccucuguccuccauccuucucccaggauggugaagggggaccugguacccagugauccccaccccaggauccuaaaucaugacuuaccugcuaauaaaaacucauuggaaaagugagaagaucuaaaaaaaaaaaaaaaaaaaaaaaaaaaaaaaaaaaaaaaaaaaaaaaaaaaaaaaaaaaaaaaaugcaucccccccccccccccccccccccccccccccaaaggcucuuuucagagccaccagaauu

SEQ ID NO: 15651 - RNA, 1964 nt, Artificial Sequence
  mRNA product Design f-3 comprising derived and/or modified sequence from HRSV(Memphis-37)__AIY60640.1__F_DSCav1_mut3 (opt2)
gggagagucccgcagucggcguccagcggcucugcuuguucgugugugugucguugcaggccuuauucaagcuuaccauggagcuccccauccucaagaccaacgccaucaccaccauccucgccgccgucacccucugcuucgccuccucccagaacaucaccgaggaguucuaccaguccaccugcuccgccgucuccaagggcuaccucggcgcccuccgcaccggcugguacaccuccgucaucaccaucgagcucuccaacaucaaggagaucaagugcaacggcaccgacgccaaggucaagcucaucaagcaggagcucgacaaguacaagaacgccgucaccgaccuccagcuccucaugcaguccacccccgccgccggcuccggcuccgccaucugcuccggcaucgccgucugcaagguccuccaccucgagggcgaggucaacaagaucaagaacgcccuccucuccaccaacaaggccgucgucucccucuccaacggcgucuccguccucaccuucaagguccucgaccucaagaacuacaucgacaagcagcuccuccccauccucaacaagcaguccugcuccauccccaacaucgagaccgucaucgaguuccagcagaagaacaaccgccuccucgagaucacccgcgaguucuccgucaacgccggcgucaccacccccgucuccaccuacaugcucaccaacuccgagcuccucucccucaucaacgacaugcccaucaccaacgaccagaagaagcucauguccaacaacguccagaucguccgccagcaguccuacuccaucaugugcaucaucaaggaggagguccucgccuacgucguccagcucccccucuacggcgucaucgacacccccugcuggaagcuccacaccuccccccucugcaccaccaacaccaaggagggcuccaacaucugccucacccgcaccgaccgcggcugguacugcgacaacgccggcuccgucuccuucuucccccaggccgagaccugcaagguccaguccaaccgcgucuucugcgacaccaugaacucccucacccuccccuccgaggucaaccucugcaacaucgacaucuucaaccccaaguacgacugcaagaucaugaccuccaagaccgacgucuccuccuccgucaucaccucccucggcgccaucgucuccugcuacggcaagaccaagugcaccgccuccaacaagaaccgcggcaucaucaagaccuucuccaacggcugcgacuacgucuccaacaagggcgucgacaccgucuccgucggcaacacccucuacugcgucaacaagcaggagggccagucccucuacgucaagggcgagcccaucaucaacuucuacgacccccucgucuuccccuccgacgaguucgacgccuccaucucccaggucaacgagaagaucaaccagucccucgccuucauccgcaaguccgacgagcuccuccacaacgucaacgucggcaaguccaccaccaacaucaugaucaccaccaucaucaucgucaucaucgucauccuccuccuccucaucgccgucggccucuuccucuacugcaaggcccgcuccacccccgucacccucuccaaggaccagcucuccggcaucaacaacaucgccuucuccaacugaggacuaguacuggcugcaucucccuuuccucuguccuccauccuucucccaggauggugaagggggaccugguacccagugauccccaccccaggauccuaaaucaugacuuaccugcuaauaaaaacucauuggaaaagugagaagaucuaaaaaaaaaaaaaaaaaaaaaaaaaaaaaaaaaaaaaaaaaaaaaaaaaaaaaaaaaaaaaaaaugcaucccccccccccccccccccccccccccccccaaaggcucuuuucagagccaccagaauu

SEQ ID NO: 15652 - RNA, 1964 nt, Artificial Sequence
  mRNA product Design f-3 comprising derived and/or modified sequence from HRSV(Memphis-37)__AIY60640.1__F_DSCav1_mut3 (opt3)
gggagagucccgcagucggcguccagcggcucugcuuguucgugugugugucguugcaggccuuauucaagcuuaccauggagcugcccauccucaagaccaacgccauuacaacuauacuugcugcagugacgcugugcuucgccagcucccagaauaucaccgaagaguuuuaccaaucuacauguucagcggucaguaaaggcuauuugggggcuuuaagaacuggaugguacaccagcguuauuacaaucgaacuguccaacauuaaggagaucaaaugcaaugguaccgacgccaaggugaaacuaauaaagcaggaacucgauaaguauaaaaacgcaguaacugaccugcagcuucugaugcagucuacuccugccgcuggcucggggucagcaaucuguagcggaauugccgugugcaaggucuugcaccucgagggcgaggugaauaaaaucaagaacgcucugcugaguaccaauaaagccguugugucccucucuaacggugucagcguguuaacguucaagguacuggaucuuaagaauuacauugacaaacaauugcugccaauccuaaacaagcaguccuguucaauaccgaauauugaaacuguuaucgaguuucagcagaaaaacaauaggcuccuggaaauuacccgggaguucagugugaacgcgggggucacaacucccgugagcaccuauaugcuuacaaauucugagcuguugucccucaucaacgauaugccuaucaccaacgaccaaaagaaacugaugucaaauaacgugcagauuguccgccagcagagcuacaguauaaugugcaucauuaaggaagagguuuuagcauaugugguacaacugccacucuacggagugaucgauacgcccuguuggaaacuucauacuucuccucugugcacaaccaauacuaaggaaggcuccaacauauguuugacacgaaccgaccguggcugguacugcgauaaugccgggagcgucucguuuuucccacaggcugagacguguaaggugcagucuaacagaguuuucugcgacaccaugaacucccuaacacugcccucagaagugaaucucugcaauauugauaucuucaacccuaaauaugacuguaagaucaugacaaguaaaaccgaugucagcuccucugugauuacaagccugggagccaucguaucaugcuacgguaagacuaaauguaccgcaaguaauaagaacaggggcauuauaaagacauuuuccaaugggugcgacuauguuagcaacaaaggaguggacaccgucucugugggcaauacucuuuacugugucaacaagcaagagggucagucacuguaugugaaaggggagccaaucauuaacuucuacgauccguugguuuuucccagugacgaauuugaugcuagcaucucccaggugaaugagaagaucaaccagucucucgccuuuauucggaaaucggacgaacuguuacacaauguaaacgucggaaagagcacgacaaauauaaugaucaccacuauuaucauugugaucauaguuauccugcuacuccugauugcggugggccuuuucuuguauugcaaggcccgcuccaccccugucacacugucaaaagaucaacucaguggcaucaacaauauugcauucucuaacugaggacuaguacuggcugcaucucccuuuccucuguccuccauccuucucccaggauggugaagggggaccugguacccagugauccccaccccaggauccuaaaucaugacuuaccugcuaauaaaaacucauuggaaaagugagaagaucuaaaaaaaaaaaaaaaaaaaaaaaaaaaaaaaaaaaaaaaaaaaaaaaaaaaaaaaaaaaaaaaaugcaucccccccccccccccccccccccccccccccaaaggcucuuuucagagccaccagaauu

SEQ ID NO: 15653 - RNA, 1964 nt, Artificial Sequence
  mRNA product Design f-3 comprising derived and/or modified sequence from HRSV(Memphis-37)__AIY60640.1__F_DSCav1_mut3 (opt4)
gggagagucccgcagucggcguccagcggcucugcuuguucgugugugugucguugcaggccuuauucaagcuuaccauggagcugcccauccugaagaccaacgccaucaccaccauccuggccgccgugacccugugcuucgccagcagccagaacaucaccgaggaguucuaccagagcaccugcagcgccgugagcaagggcuaccugggcgcccugagaaccggcugguacaccagcgugaucaccaucgagcugagcaacaucaaggagaucaagugcaacggcaccgacgccaaggugaagcugaucaagcaggagcuggacaaguacaagaacgccgugaccgaccugcagcugcugaugcagagcacccccgccgccggcagcggcagcgccaucugcagcggcaucgccgugugcaaggugcugcaccuggagggcgaggugaacaagaucaagaacgcccugcugagcaccaacaaggccguggugagccugagcaacggcgugagcgugcugaccuucaaggugcuggaccugaagaacuacaucgacaagcagcugcugcccauccugaacaagcagagcugcagcauccccaacaucgagaccgugaucgaguuccagcagaagaacaacagacugcuggagaucaccagagaguucagcgugaacgccggcgugaccacccccgugagcaccuacaugcugaccaacagcgagcugcugagccugaucaacgacaugcccaucaccaacgaccagaagaagcugaugagcaacaacgugcagaucgugagacagcagagcuacagcaucaugugcaucaucaaggaggaggugcuggccuacguggugcagcugccccuguacggcgugaucgacacccccugcuggaagcugcacaccagcccccugugcaccaccaacaccaaggagggcagcaacaucugccugaccagaaccgacagaggcugguacugcgacaacgccggcagcgugagcuucuucccccaggccgagaccugcaaggugcagagcaacagaguguucugcgacaccaugaacagccugacccugcccagcgaggugaaccugugcaacaucgacaucuucaaccccaaguacgacugcaagaucaugaccagcaagaccgacgugagcagcagcgugaucaccagccugggcgccaucgugagcugcuacggcaagaccaagugcaccgccagcaacaagaacagaggcaucaucaagaccuucagcaacggcugcgacuacgugagcaacaagggcguggacaccgugagcgugggcaacacccuguacugcgugaacaagcaggagggccagagccuguacgugaagggcgagcccaucaucaacuucuacgacccccugguguuccccagcgacgaguucgacgccagcaucagccaggugaacgagaagaucaaccagagccuggccuucaucagaaagagcgacgagcugcugcacaacgugaacgugggcaagagcaccaccaacaucaugaucaccaccaucaucaucgugaucaucgugauccugcugcugcugaucgccgugggccuguuccuguacugcaaggccagaagcacccccgugacccugagcaaggaccagcugagcggcaucaacaacaucgccuucagcaacugaggacuaguacuggcugcaucucccuuuccucuguccuccauccuucucccaggauggugaagggggaccugguacccagugauccccaccccaggauccuaaaucaugacuuaccugcuaauaaaaacucauuggaaaagugagaagaucuaaaaaaaaaaaaaaaaaaaaaaaaaaaaaaaaaaaaaaaaaaaaaaaaaaaaaaaaaaaaaaaaugcaucccccccccccccccccccccccccccccccaaaggcucuuuucagagccaccagaauu

SEQ ID NO: 15654 - RNA, 1964 nt, Artificial Sequence
  mRNA product Design f-3 comprising derived and/or modified sequence from HRSV(Memphis-37)__AIY60640.1__F_DSCav1_mut3 (opt5)
gggagagucccgcagucggcguccagcggcucugcuuguucgugugugugucguugcaggccuuauucaagcuuaccauggagcugcccauccucaagaccaacgccauuacaacgauccuggcugccgugacccuuugcuucgcgagcucccagaauauuacagaagaguuuuaccaaucuaccuguagcgcugucuccaaaggcuaucugggggcccucagaacaggaugguacaccucuguuaucacaauugaacugagcaacaucaaggagaucaaaugcaauggcaccgacgccaaggugaaacuuauuaagcaggaacuggauaaguauaaaaacgcugugacggaccuccagcugcugaugcaguccaccccugccgcugggucuggaagcgccaucuguuccggcauugcggucugcaaggugcuccaccuggagggggagguuaauaaaaucaagaacgcccuucugagcacaaauaaagcuguggucucucucuccaacggagugagcguucugaccuucaaggugcuugaucugaagaauuacauugacaaacaacuccugccgauccugaacaagcagucuuguuccauucccaauaucgaaacagucaucgaguuucagcagaaaaacaaucggcuccuggaaauuacccgcgaguucagcgugaacgccggcgugacgacaccugucucuaccuauaugcuuacaaauuccgagcugcucagccugaucaacgauaugcccauuaccaacgaccaaaagaaacuuauguccaauaacguucagaucgugagacagcagucuuacagcauuaugugcaucaucaaggaagaggugcuggcuuaugucgugcaacucccucuguacggcguuauugauacccccuguuggaaacugcauacauccccucucugcacgaccaauacaaaggaagggagcaacaucugucugacccggacagaccgcggaugguacugcgauaaugccggcucuguguccuuuuucccgcaggcggagaccuguaagguccagagcaacagaguguuuugcgacacgaugaacucucuuacacugcccagcgaaguuaaucucugcaauauugauaucuucaacccuaaauaugacuguaagauuaugaccuccaaaaccgaugugucuagcuccgucaucacaagccugggggccaucgugucuugcuacggaaagaccaaauguacagcuuccaauaagaaccggggcauuaucaagacguuuagcaaugggugcgacuaugucucuaacaaaggaguggacaccguuuccgugggcaauacacuuuacugugucaacaagcaagagggccagagccuguaugugaaaggggagcccauuaucaacuucuacgauccucucguuuuucccuccgacgaguucgaugccucuauuagccaggugaaugaaaagaucaaccagucccuggcuuuuauucgcaaaucugacgaacugcuccacaaugucaacgugggaaagagcaccacaaauaucaugaucaccacgauuaucauugugaucauuguuauccugcuucugcucaucgccgucggccuguuccuguauugcaaggccagauccaccccggugacacuuagcaaagaucaacucucugggauuaacaauaucgcuuucuccaacugaggacuaguacuggcugcaucucccuuuccucuguccuccauccuucucccaggauggugaagggggaccugguacccagugauccccaccccaggauccuaaaucaugacuuaccugcuaauaaaaacucauuggaaaagugagaagaucuaaaaaaaaaaaaaaaaaaaaaaaaaaaaaaaaaaaaaaaaaaaaaaaaaaaaaaaaaaaaaaaaugcaucccccccccccccccccccccccccccccccaaaggcucuuuucagagccaccagaauu

SEQ ID NO: 15655 - RNA, 1964 nt, Artificial Sequence
  mRNA product Design f-3 comprising derived and/or modified sequence from HRSV(Memphis-37)__AIY60640.1__F_DSCav1_mut3 (opt6)
gggagagucccgcagucggcguccagcggcucugcuuguucgugugugugucguugcaggccuuauucaagcuuaccauggaauuaccaauacuaaaaacaaaugccaucaccaccauccuggccgccguaacauuaugcuucgcaaguucacaaaauauaacagaagaauuuuaucaaucaacuugcagcgccguaucaaaaggcuacuuaggcgcacuacguacaggaugguacacaucaguaauaaccauagaacuauccaauauuaaagaaauaaaaugcaauggaacagacgcaaaaguuaaacuaauaaaacaagaauuagacaaauacaaaaacgcaguaaccgaccuucaauuacuaaugcaaucuacccccgcugcagguuccggaucagcaauauguucaggaauugcaguaugcaaaguccuacacuuagaaggagaaguaaacaaaauaaaaaacgcacuauuaagcaccaauaaagcagucguaucauuauccaacggcguuucaguacuaacauuuaaaguacuugaccuaaaaaacuauauagacaaacaacuacuucccauccuuaacaaacaaagcugcucaauaccuaauaucgaaacaguaauagaauuucaacaaaaaaacaaucgauuauuagaaaucacacgagaauuuucugucaacgcaggagucaccacacccguaucuacuuauauguuaaccaacucugaauuauuaucacuaaucaaugacaugccaauaacaaacgaucaaaaaaaauuaaugucaaauaacguacaaauaguaagacaacaaucauacucaauaaugugcauuauaaaagaagaaguacuagccuauguuguacaacucccacucuacggcguaauagacacaccaugcuggaaauuacacacuucaccacuaugcacaacaaacacaaaagaaggaucaaacaucugccuaaccagaaccgauagaggaugguauugcgacaaugccggaucaguuucauucuucccacaagcagaaacaugcaaaguacaauccaacagaguuuucugugacacaaugaacucgcuaacauuacccagcgaaguaaaccucugcaacauagacauauucaacccaaaauacgauugcaaaauaaugacuucuaaaacagauguuuccucaagcgucauaacgaguuuaggagcaauaguaagcuguuacggaaaaaccaaauguaccgcaucaaacaaaaaccgaggaauaauaaaaaccuuuucaaacggaugcgauuacgucuccaacaaaggagucgacacaguaucaguuggcaauacucuuuacugcguaaauaaacaagaaggacaaucacuauacguaaaaggcgaaccaauaauaaacuucuacgacccccucgucuucccuucagaugaauuugacgcaagcaucucacaaguuaaugaaaaaauaaaucaauccuuagcauucauacgaaaaucagacgaacuauuacacaacguaaacguaggaaaaucaacgacaaacauaaugauaacaacuaucauuauagucauaauagucauacuacuacuauuaauagccguaggcuuauuccuauacugcaaagcaagaucuacuccaguaacacucucaaaagaccaauuaucuggaauaaauaacauagcauucucuaauuaaggacuaguacuggcugcaucucccuuuccucuguccuccauccuucucccaggauggugaagggggaccugguacccagugauccccaccccaggauccuaaaucaugacuuaccugcuaauaaaaacucauuggaaaagugagaagaucuaaaaaaaaaaaaaaaaaaaaaaaaaaaaaaaaaaaaaaaaaaaaaaaaaaaaaaaaaaaaaaaaugcaucccccccccccccccccccccccccccccccaaaggcucuuuucagagccaccagaauu

SEQ ID NO: 15656 - RNA, 1964 nt, Artificial Sequence
  mRNA product Design f-3 comprising derived and/or modified sequence from HRSV(Memphis-37)__AIY60640.1__F_DSCav1_mut3 (opt11)
gggagagucccgcagucggcguccagcggcucugcuuguucgugugugugucguugcaggccuuauucaagcuuaccauggaacuccccauccucaaaaccaacgccauuaccacgauccucgccgcagucacccucugcuucgccuccucacaaaacaucacagaagaauuuuaccaaaguaccugcuccgccgucagcaaaggauaccucggcgcccuccgcaccggcugguacacauccgucauaaccaucgaacucagcaacaucaaagaaaucaaauguaacggaaccgacgccaaaguaaaacuaauaaaacaagaacucgacaaauacaagaacgccgucaccgaccuccaacuccucaugcaaucuacccccgccgccggcucagguagcgccaucugcagcgguauugccgucugcaaaguacuccaccuagaaggagaagucaauaaaaucaaaaacgcccuacucuccaccaacaaggcagucgucagccucuccaacggcgucucagucuuaaccuucaaagugcucgaccucaaaaauuacauagacaaacaacuacuccccauucucaacaaacaauccugcuccauacccaacauagaaaccgucauugaauuucaacagaaaaacaaccgccuccucgaaaucacgcgcgaguucagugucaacgccggcgucaccaccccagucucgacauacaugcucacaaacucagaacuccucucguuaaucaacgacaugccaauaaccaacgaccaaaagaaacuaauguccaacaacguucaaauaguucgccaacaaucauacuccauaaugugcaucaucaaagaagaaguccucgccuacguuguacaauuaccccucuacggcgucaucgacacaccaugcuggaaacuccacacaucgccccucugcaccaccaacaccaaagaaggcagcaacauuugccucacccggacagaccgcggcugguacugcgacaaugcaggcagcgucucauucuucccacaagccgaaaccugcaaaguccaaagcaaccgugucuucugcgacacaaugaacucccuuacccucccaagcgaaguaaaccucugcaauauugacaucuucaaccccaaauacgacugcaaaaucaugaccuccaaaaccgacgucuccucaucagucaucaccucccuuggcgccauugucuccuguuacgguaaaaccaaaugcaccgccuccaacaaaaaccgcggcaucaucaaaaccuucucuaacggcugcgacuacgucucaaacaaaggcgucgacacugucuccgucggcaacacccuauacugcgucaacaagcaagaaggacagucccuauacguaaaaggugaaccaauuaucaacuucuacgacccccuagucuucccauccgacgaguucgaugccuccaucucccaaguaaaugaaaagaucaaucaaagccuggccuucauccgcaaauccgacgaacuacuccacaaugucaacgucggaaaaucaacaacaaacaucaugaucaccaccaucaucaucgucaucauaguaauccuccuacugcucaucgccgucggucucuuccuauacugcaaagcccguucuacuccagucacccucuccaaagaccaacuaucaggaaucaacaacaucgccuucagcaacuaaggacuaguacuggcugcaucucccuuuccucuguccuccauccuucucccaggauggugaagggggaccugguacccagugauccccaccccaggauccuaaaucaugacuuaccugcuaauaaaaacucauuggaaaagugagaagaucuaaaaaaaaaaaaaaaaaaaaaaaaaaaaaaaaaaaaaaaaaaaaaaaaaaaaaaaaaaaaaaaaugcaucccccccccccccccccccccccccccccccaaaggcucuuuucagagccaccagaauu

SEQ ID NO: 15657 - RNA, 2180 nt, Artificial Sequence
  mRNA product Design f-4 comprising derived and/or modified sequence from HRSV(Memphis-37)__AIY60640.1__F_DSCav1_mut3 (opt1)
gggagagucccgcagucggcguccagcggcucugcuuguucgugugugugucguugcaggccuuauucaagcuuaccauggagcugcccauccucaagaccaacgccaucaccacgauccuggccgcggugacccugugcuucgccagcucccagaacaucaccgaggaguucuaccagagcacgugcuccgccgucagcaagggcuaccucggcgcccugcgcaccgggugguacaccagcgugaucaccaucgagcuguccaacaucaaggagaucaagugcaacggcaccgacgccaaggugaagcucaucaagcaggagcuggacaaguacaagaacgcggucacggaccugcagcuccugaugcagagcaccccggccgccggcuccgggagcgcgaucugcuccggcaucgccgucugcaaggugcugcaccucgagggcgaggugaacaagaucaagaacgcccugcuguccaccaacaaggccgucgugagccucuccaacggggugagcguccugaccuucaaggugcuggaccucaagaacuacaucgacaagcagcugcugcccauccugaacaagcagagcugcuccauccccaacaucgagaccgucaucgaguuccagcagaagaacaaccgccuccuggagaucacgcgggaguucagcgugaacgcgggcgugaccacccccgucuccaccuacaugcugacgaacagcgagcuccugucccugaucaacgacaugccgaucaccaacgaccagaagaagcucaugagcaacaacgugcagaucgugcgccagcaguccuacagcaucaugugcaucaucaaggaggagguccuggccuacguggugcagcugccccucuacggggucaucgacacccccugcuggaagcugcacaccagcccccugugcacgaccaacaccaaggagggcuccaacaucugccucacccggacggaccgcgggugguacugcgacaacgccggcagcguguccuucuucccgcaggccgagaccugcaagguccagagcaaccggguguucugcgacaccaugaacucccugacccugcccagcgaggugaaccucugcaacaucgacaucuucaaccccaaguacgacugcaagaucaugacguccaagaccgacgucagcuccagcgugaucaccucccugggcgccaucgugagcugcuacgggaagaccaagugcacggcgagcaacaagaaccgcggcaucaucaagaccuucuccaacgggugcgacuacgucagcaacaagggcguggacaccguguccgucggcaacacccuguacugcgugaacaagcaggagggccagagccucuacgugaagggggagcccaucaucaacuucuacgacccgcuggucuuccccuccgacgaguucgacgccagcaucucccaggugaacgagaagaucaaccagagccuggccuucauccggaaguccgacgagcuccugcacaacgugaacgucggcaagagcaccacgaacaucaugaucaccaccaucaucaucgugaucaucgugauccugcugcuccugaucgccgucgggcuguuccucuacugcaaggcccgcuccacccccgugacgcugagcaaggaccagcuguccgggaucaacaacaucgcguucagcaacugaggacuagugaagggaacacccaaauuuaauucagccuuaagcacaauuaauuaagagugaaacguaauuguacaagcaguuggucacccaccauagggcaugaucaacaccgcaaccuuuccuuuuucccccagugauucugaaaaaccccucuucccuucagcuugcuuagauguuccaaauuuaguaagcuuaaggcggccuacagaagaaaaagaaaaaaaaggccacaaaaguucccucucacuuucaguaaauaaaauaaaagcagcaacagaaauaaagaaauaaaugaaauucaaaaugaaauaaauauuguguugugcagcauuaaaaaaucaauaaaaauuaaaaaugagcaagaucuaaaaaaaaaaaaaaaaaaaaaaaaaaaaaaaaaaaaaaaaaaaaaaaaaaaaaaaaaaaaaaaaugcaucccccccccccccccccccccccccccccccaaaggcucuuuucagagccaccagaauu

SEQ ID NO: 15658 - RNA, 2180 nt, Artificial Sequence
  mRNA product Design f-4 comprising derived and/or modified sequence from HRSV(Memphis-37)__AIY60640.1__F_DSCav1_mut3 (opt1)
gggagagucccgcagucggcguccagcggcucugcuuguucgugugugugucguugcaggccuuauucaagcuuaccauggagcugcccauccucaagaccaacgccaucaccacgauccuggccgcggugacccugugcuucgccagcucccagaacaucaccgaggaguucuaccagagcacgugcuccgccgucagcaagggcuaccucggggcccugcgcaccggcugguacaccuccgugaucaccaucgagcugagcaacaucaaggagaucaagugcaacgggaccgacgccaaggugaagcucaucaagcaggagcuggacaaguacaagaacgcggucacggaccugcagcuccugaugcaguccaccccggccgccggcagcggguccgccaucugcagcggcaucgcggugugcaaggugcugcaccucgagggcgaggucaacaagaucaagaacgcccugcuguccaccaacaaggccguggugagccucuccaacggggucagcgugcugaccuucaaggugcuggaccucaagaacuacaucgacaagcagcugcugcccauccucaacaagcaguccugcagcauccccaacaucgagacggucaucgaguuccagcagaagaacaaccggcugcuggagaucacccgcgaguucuccgugaacgccggcgugaccacccccgucagcacguacaugcucaccaacuccgagcugcugagccucaucaacgacaugccgaucaccaacgaccagaagaagcugaugagcaacaacgugcagaucgugcggcagcaguccuacagcaucaugugcaucaucaaggaggagguccuggccuacguggugcagcucccccuguacggggucaucgacacccccugcuggaagcugcacacgagcccccucugcaccaccaacaccaaggagggcuccaacaucugccugacgcgcaccgaccgggggugguacugcgacaacgcgggcuccgugagcuucuucccgcaggccgagaccugcaaggugcaguccaaccgcgucuucugcgacaccaugaacagccugacgcuccccuccgaggugaaccugugcaacaucgacaucuucaaccccaaguacgacugcaagaucaugaccagcaagaccgacgucuccagcuccgugaucaccagccugggcgccaucguguccugcuacgggaagacgaagugcaccgccagcaacaagaaccggggcaucaucaagaccuucuccaacgggugcgacuacgucagcaacaagggcguggacaccguguccgucggcaacacgcucuacugcgugaacaagcaggaggggcagagccuguacgugaagggcgagcccaucaucaacuucuacgacccgcuggucuuccccagcgacgaguucgacgccuccaucagccaggugaacgagaagaucaaccagucccucgcguucauccgcaagagcgacgagcugcugcacaacgugaacgucgggaaguccaccaccaacaucaugaucaccaccaucaucaucgugaucaucgugauccuccugcugcucaucgccgucggccuguuccuguacugcaaggcccggagcacgcccgugacccuguccaaggaccagcucagcgggaucaacaacaucgccuucuccaacugaggacuagugaagggaacacccaaauuuaauucagccuuaagcacaauuaauuaagagugaaacguaauuguacaagcaguuggucacccaccauagggcaugaucaacaccgcaaccuuuccuuuuucccccagugauucugaaaaaccccucuucccuucagcuugcuuagauguuccaaauuuaguaagcuuaaggcggccuacagaagaaaaagaaaaaaaaggccacaaaaguucccucucacuuucaguaaauaaaauaaaagcagcaacagaaauaaagaaauaaaugaaauucaaaaugaaauaaauauuguguugugcagcauuaaaaaaucaauaaaaauuaaaaaugagcaagaucuaaaaaaaaaaaaaaaaaaaaaaaaaaaaaaaaaaaaaaaaaaaaaaaaaaaaaaaaaaaaaaaaugcaucccccccccccccccccccccccccccccccaaaggcucuuuucagagccaccagaauu

SEQ ID NO: 15659 - RNA, 2180 nt, Artificial Sequence
  mRNA product Design f-4 comprising derived and/or modified sequence from HRSV(Memphis-37)__AIY60640.1__F_DSCav1_mut3 (opt2)
gggagagucccgcagucggcguccagcggcucugcuuguucgugugugugucguugcaggccuuauucaagcuuaccauggagcuccccauccucaagaccaacgccaucaccaccauccucgccgccgucacccucugcuucgccuccucccagaacaucaccgaggaguucuaccaguccaccugcuccgccgucuccaagggcuaccucggcgcccuccgcaccggcugguacaccuccgucaucaccaucgagcucuccaacaucaaggagaucaagugcaacggcaccgacgccaaggucaagcucaucaagcaggagcucgacaaguacaagaacgccgucaccgaccuccagcuccucaugcaguccacccccgccgccggcuccggcuccgccaucugcuccggcaucgccgucugcaagguccuccaccucgagggcgaggucaacaagaucaagaacgcccuccucuccaccaacaaggccgucgucucccucuccaacggcgucuccguccucaccuucaagguccucgaccucaagaacuacaucgacaagcagcuccuccccauccucaacaagcaguccugcuccauccccaacaucgagaccgucaucgaguuccagcagaagaacaaccgccuccucgagaucacccgcgaguucuccgucaacgccggcgucaccacccccgucuccaccuacaugcucaccaacuccgagcuccucucccucaucaacgacaugcccaucaccaacgaccagaagaagcucauguccaacaacguccagaucguccgccagcaguccuacuccaucaugugcaucaucaaggaggagguccucgccuacgucguccagcucccccucuacggcgucaucgacacccccugcuggaagcuccacaccuccccccucugcaccaccaacaccaaggagggcuccaacaucugccucacccgcaccgaccgcggcugguacugcgacaacgccggcuccgucuccuucuucccccaggccgagaccugcaagguccaguccaaccgcgucuucugcgacaccaugaacucccucacccuccccuccgaggucaaccucugcaacaucgacaucuucaaccccaaguacgacugcaagaucaugaccuccaagaccgacgucuccuccuccgucaucaccucccucggcgccaucgucuccugcuacggcaagaccaagugcaccgccuccaacaagaaccgcggcaucaucaagaccuucuccaacggcugcgacuacgucuccaacaagggcgucgacaccgucuccgucggcaacacccucuacugcgucaacaagcaggagggccagucccucuacgucaagggcgagcccaucaucaacuucuacgacccccucgucuuccccuccgacgaguucgacgccuccaucucccaggucaacgagaagaucaaccagucccucgccuucauccgcaaguccgacgagcuccuccacaacgucaacgucggcaaguccaccaccaacaucaugaucaccaccaucaucaucgucaucaucgucauccuccuccuccucaucgccgucggccucuuccucuacugcaaggcccgcuccacccccgucacccucuccaaggaccagcucuccggcaucaacaacaucgccuucuccaacugaggacuagugaagggaacacccaaauuuaauucagccuuaagcacaauuaauuaagagugaaacguaauuguacaagcaguuggucacccaccauagggcaugaucaacaccgcaaccuuuccuuuuucccccagugauucugaaaaaccccucuucccuucagcuugcuuagauguuccaaauuuaguaagcuuaaggcggccuacagaagaaaaagaaaaaaaaggccacaaaaguucccucucacuuucaguaaauaaaauaaaagcagcaacagaaauaaagaaauaaaugaaauucaaaaugaaauaaauauuguguugugcagcauuaaaaaaucaauaaaaauuaaaaaugagcaagaucuaaaaaaaaaaaaaaaaaaaaaaaaaaaaaaaaaaaaaaaaaaaaaaaaaaaaaaaaaaaaaaaaugcaucccccccccccccccccccccccccccccccaaaggcucuuuucagagccaccagaauu

SEQ ID NO: 15660 - RNA, 2180 nt, Artificial Sequence
  mRNA product Design f-4 comprising derived and/or modified sequence from HRSV(Memphis-37)__AIY60640.1__F_DSCav1_mut3 (opt3)
gggagagucccgcagucggcguccagcggcucugcuuguucgugugugugucguugcaggccuuauucaagcuuaccauggagcugcccauccucaagaccaacgccauuacaacuauacuugcugcagugacgcugugcuucgccagcucccagaauaucaccgaagaguuuuaccaaucuacauguucagcggucaguaaaggcuauuugggggcuuuaagaacuggaugguacaccagcguuauuacaaucgaacuguccaacauuaaggagaucaaaugcaaugguaccgacgccaaggugaaacuaauaaagcaggaacucgauaaguauaaaaacgcaguaacugaccugcagcuucugaugcagucuacuccugccgcuggcucggggucagcaaucuguagcggaauugccgugugcaaggucuugcaccucgagggcgaggugaauaaaaucaagaacgcucugcugaguaccaauaaagccguugugucccucucuaacggugucagcguguuaacguucaagguacuggaucuuaagaauuacauugacaaacaauugcugccaauccuaaacaagcaguccuguucaauaccgaauauugaaacuguuaucgaguuucagcagaaaaacaauaggcuccuggaaauuacccgggaguucagugugaacgcgggggucacaacucccgugagcaccuauaugcuuacaaauucugagcuguugucccucaucaacgauaugccuaucaccaacgaccaaaagaaacugaugucaaauaacgugcagauuguccgccagcagagcuacaguauaaugugcaucauuaaggaagagguuuuagcauaugugguacaacugccacucuacggagugaucgauacgcccuguuggaaacuucauacuucuccucugugcacaaccaauacuaaggaaggcuccaacauauguuugacacgaaccgaccguggcugguacugcgauaaugccgggagcgucucguuuuucccacaggcugagacguguaaggugcagucuaacagaguuuucugcgacaccaugaacucccuaacacugcccucagaagugaaucucugcaauauugauaucuucaacccuaaauaugacuguaagaucaugacaaguaaaaccgaugucagcuccucugugauuacaagccugggagccaucguaucaugcuacgguaagacuaaauguaccgcaaguaauaagaacaggggcauuauaaagacauuuuccaaugggugcgacuauguuagcaacaaaggaguggacaccgucucugugggcaauacucuuuacugugucaacaagcaagagggucagucacuguaugugaaaggggagccaaucauuaacuucuacgauccguugguuuuucccagugacgaauuugaugcuagcaucucccaggugaaugagaagaucaaccagucucucgccuuuauucggaaaucggacgaacuguuacacaauguaaacgucggaaagagcacgacaaauauaaugaucaccacuauuaucauugugaucauaguuauccugcuacuccugauugcggugggccuuuucuuguauugcaaggcccgcuccaccccugucacacugucaaaagaucaacucaguggcaucaacaauauugcauucucuaacugaggacuagugaagggaacacccaaauuuaauucagccuuaagcacaauuaauuaagagugaaacguaauuguacaagcaguuggucacccaccauagggcaugaucaacaccgcaaccuuuccuuuuucccccagugauucugaaaaaccccucuucccuucagcuugcuuagauguuccaaauuuaguaagcuuaaggcggccuacagaagaaaaagaaaaaaaaggccacaaaaguucccucucacuuucaguaaauaaaauaaaagcagcaacagaaauaaagaaauaaaugaaauucaaaaugaaauaaauauuguguugugcagcauuaaaaaaucaauaaaaauuaaaaaugagcaagaucuaaaaaaaaaaaaaaaaaaaaaaaaaaaaaaaaaaaaaaaaaaaaaaaaaaaaaaaaaaaaaaaaugcaucccccccccccccccccccccccccccccccaaaggcucuuuucagagccaccagaauu

SEQ ID NO: 15661 - RNA, 2180 nt, Artificial Sequence
  mRNA product Design f-4 comprising derived and/or modified sequence from HRSV(Memphis-37)__AIY60640.1__F_DSCav1_mut3 (opt4)
gggagagucccgcagucggcguccagcggcucugcuuguucgugugugugucguugcaggccuuauucaagcuuaccauggagcugcccauccugaagaccaacgccaucaccaccauccuggccgccgugacccugugcuucgccagcagccagaacaucaccgaggaguucuaccagagcaccugcagcgccgugagcaagggcuaccugggcgcccugagaaccggcugguacaccagcgugaucaccaucgagcugagcaacaucaaggagaucaagugcaacggcaccgacgccaaggugaagcugaucaagcaggagcuggacaaguacaagaacgccgugaccgaccugcagcugcugaugcagagcacccccgccgccggcagcggcagcgccaucugcagcggcaucgccgugugcaaggugcugcaccuggagggcgaggugaacaagaucaagaacgcccugcugagcaccaacaaggccguggugagccugagcaacggcgugagcgugcugaccuucaaggugcuggaccugaagaacuacaucgacaagcagcugcugcccauccugaacaagcagagcugcagcauccccaacaucgagaccgugaucgaguuccagcagaagaacaacagacugcuggagaucaccagagaguucagcgugaacgccggcgugaccacccccgugagcaccuacaugcugaccaacagcgagcugcugagccugaucaacgacaugcccaucaccaacgaccagaagaagcugaugagcaacaacgugcagaucgugagacagcagagcuacagcaucaugugcaucaucaaggaggaggugcuggccuacguggugcagcugccccuguacggcgugaucgacacccccugcuggaagcugcacaccagcccccugugcaccaccaacaccaaggagggcagcaacaucugccugaccagaaccgacagaggcugguacugcgacaacgccggcagcgugagcuucuucccccaggccgagaccugcaaggugcagagcaacagaguguucugcgacaccaugaacagccugacccugcccagcgaggugaaccugugcaacaucgacaucuucaaccccaaguacgacugcaagaucaugaccagcaagaccgacgugagcagcagcgugaucaccagccugggcgccaucgugagcugcuacggcaagaccaagugcaccgccagcaacaagaacagaggcaucaucaagaccuucagcaacggcugcgacuacgugagcaacaagggcguggacaccgugagcgugggcaacacccuguacugcgugaacaagcaggagggccagagccuguacgugaagggcgagcccaucaucaacuucuacgacccccugguguuccccagcgacgaguucgacgccagcaucagccaggugaacgagaagaucaaccagagccuggccuucaucagaaagagcgacgagcugcugcacaacgugaacgugggcaagagcaccaccaacaucaugaucaccaccaucaucaucgugaucaucgugauccugcugcugcugaucgccgugggccuguuccuguacugcaaggccagaagcacccccgugacccugagcaaggaccagcugagcggcaucaacaacaucgccuucagcaacugaggacuagugaagggaacacccaaauuuaauucagccuuaagcacaauuaauuaagagugaaacguaauuguacaagcaguuggucacccaccauagggcaugaucaacaccgcaaccuuuccuuuuucccccagugauucugaaaaaccccucuucccuucagcuugcuuagauguuccaaauuuaguaagcuuaaggcggccuacagaagaaaaagaaaaaaaaggccacaaaaguucccucucacuuucaguaaauaaaauaaaagcagcaacagaaauaaagaaauaaaugaaauucaaaaugaaauaaauauuguguugugcagcauuaaaaaaucaauaaaaauuaaaaaugagcaagaucuaaaaaaaaaaaaaaaaaaaaaaaaaaaaaaaaaaaaaaaaaaaaaaaaaaaaaaaaaaaaaaaaugcaucccccccccccccccccccccccccccccccaaaggcucuuuucagagccaccagaauu

SEQ ID NO: 15662 - RNA, 2180 nt, Artificial Sequence
  mRNA product Design f-4 comprising derived and/or modified sequence from HRSV(Memphis-37)__AIY60640.1__F_DSCav1_mut3 (opt5)
gggagagucccgcagucggcguccagcggcucugcuuguucgugugugugucguugcaggccuuauucaagcuuaccauggagcugcccauccucaagaccaacgccauuacaacgauccuggcugccgugacccuuugcuucgcgagcucccagaauauuacagaagaguuuuaccaaucuaccuguagcgcugucuccaaaggcuaucugggggcccucagaacaggaugguacaccucuguuaucacaauugaacugagcaacaucaaggagaucaaaugcaauggcaccgacgccaaggugaaacuuauuaagcaggaacuggauaaguauaaaaacgcugugacggaccuccagcugcugaugcaguccaccccugccgcugggucuggaagcgccaucuguuccggcauugcggucugcaaggugcuccaccuggagggggagguuaauaaaaucaagaacgcccuucugagcacaaauaaagcuguggucucucucuccaacggagugagcguucugaccuucaaggugcuugaucugaagaauuacauugacaaacaacuccugccgauccugaacaagcagucuuguuccauucccaauaucgaaacagucaucgaguuucagcagaaaaacaaucggcuccuggaaauuacccgcgaguucagcgugaacgccggcgugacgacaccugucucuaccuauaugcuuacaaauuccgagcugcucagccugaucaacgauaugcccauuaccaacgaccaaaagaaacuuauguccaauaacguucagaucgugagacagcagucuuacagcauuaugugcaucaucaaggaagaggugcuggcuuaugucgugcaacucccucuguacggcguuauugauacccccuguuggaaacugcauacauccccucucugcacgaccaauacaaaggaagggagcaacaucugucugacccggacagaccgcggaugguacugcgauaaugccggcucuguguccuuuuucccgcaggcggagaccuguaagguccagagcaacagaguguuuugcgacacgaugaacucucuuacacugcccagcgaaguuaaucucugcaauauugauaucuucaacccuaaauaugacuguaagauuaugaccuccaaaaccgaugugucuagcuccgucaucacaagccugggggccaucgugucuugcuacggaaagaccaaauguacagcuuccaauaagaaccggggcauuaucaagacguuuagcaaugggugcgacuaugucucuaacaaaggaguggacaccguuuccgugggcaauacacuuuacugugucaacaagcaagagggccagagccuguaugugaaaggggagcccauuaucaacuucuacgauccucucguuuuucccuccgacgaguucgaugccucuauuagccaggugaaugaaaagaucaaccagucccuggcuuuuauucgcaaaucugacgaacugcuccacaaugucaacgugggaaagagcaccacaaauaucaugaucaccacgauuaucauugugaucauuguuauccugcuucugcucaucgccgucggccuguuccuguauugcaaggccagauccaccccggugacacuuagcaaagaucaacucucugggauuaacaauaucgcuuucuccaacugaggacuagugaagggaacacccaaauuuaauucagccuuaagcacaauuaauuaagagugaaacguaauuguacaagcaguuggucacccaccauagggcaugaucaacaccgcaaccuuuccuuuuucccccagugauucugaaaaaccccucuucccuucagcuugcuuagauguuccaaauuuaguaagcuuaaggcggccuacagaagaaaaagaaaaaaaaggccacaaaaguucccucucacuuucaguaaauaaaauaaaagcagcaacagaaauaaagaaauaaaugaaauucaaaaugaaauaaauauuguguugugcagcauuaaaaaaucaauaaaaauuaaaaaugagcaagaucuaaaaaaaaaaaaaaaaaaaaaaaaaaaaaaaaaaaaaaaaaaaaaaaaaaaaaaaaaaaaaaaaugcaucccccccccccccccccccccccccccccccaaaggcucuuuucagagccaccagaauu

SEQ ID NO: 15663 - RNA, 2180 nt, Artificial Sequence
  mRNA product Design f-4 comprising derived and/or modified sequence from HRSV(Memphis-37)__AIY60640.1__F_DSCav1_mut3 (opt6)
gggagagucccgcagucggcguccagcggcucugcuuguucgugugugugucguugcaggccuuauucaagcuuaccauggaauuaccaauacuaaaaacaaaugccaucaccaccauccuggccgccguaacauuaugcuucgcaaguucacaaaauauaacagaagaauuuuaucaaucaacuugcagcgccguaucaaaaggcuacuuaggcgcacuacguacaggaugguacacaucaguaauaaccauagaacuauccaauauuaaagaaauaaaaugcaauggaacagacgcaaaaguuaaacuaauaaaacaagaauuagacaaauacaaaaacgcaguaaccgaccuucaauuacuaaugcaaucuacccccgcugcagguuccggaucagcaauauguucaggaauugcaguaugcaaaguccuacacuuagaaggagaaguaaacaaaauaaaaaacgcacuauuaagcaccaauaaagcagucguaucauuauccaacggcguuucaguacuaacauuuaaaguacuugaccuaaaaaacuauauagacaaacaacuacuucccauccuuaacaaacaaagcugcucaauaccuaauaucgaaacaguaauagaauuucaacaaaaaaacaaucgauuauuagaaaucacacgagaauuuucugucaacgcaggagucaccacacccguaucuacuuauauguuaaccaacucugaauuauuaucacuaaucaaugacaugccaauaacaaacgaucaaaaaaaauuaaugucaaauaacguacaaauaguaagacaacaaucauacucaauaaugugcauuauaaaagaagaaguacuagccuauguuguacaacucccacucuacggcguaauagacacaccaugcuggaaauuacacacuucaccacuaugcacaacaaacacaaaagaaggaucaaacaucugccuaaccagaaccgauagaggaugguauugcgacaaugccggaucaguuucauucuucccacaagcagaaacaugcaaaguacaauccaacagaguuuucugugacacaaugaacucgcuaacauuacccagcgaaguaaaccucugcaacauagacauauucaacccaaaauacgauugcaaaauaaugacuucuaaaacagauguuuccucaagcgucauaacgaguuuaggagcaauaguaagcuguuacggaaaaaccaaauguaccgcaucaaacaaaaaccgaggaauaauaaaaaccuuuucaaacggaugcgauuacgucuccaacaaaggagucgacacaguaucaguuggcaauacucuuuacugcguaaauaaacaagaaggacaaucacuauacguaaaaggcgaaccaauaauaaacuucuacgacccccucgucuucccuucagaugaauuugacgcaagcaucucacaaguuaaugaaaaaauaaaucaauccuuagcauucauacgaaaaucagacgaacuauuacacaacguaaacguaggaaaaucaacgacaaacauaaugauaacaacuaucauuauagucauaauagucauacuacuacuauuaauagccguaggcuuauuccuauacugcaaagcaagaucuacuccaguaacacucucaaaagaccaauuaucuggaauaaauaacauagcauucucuaauuaaggacuagugaagggaacacccaaauuuaauucagccuuaagcacaauuaauuaagagugaaacguaauuguacaagcaguuggucacccaccauagggcaugaucaacaccgcaaccuuuccuuuuucccccagugauucugaaaaaccccucuucccuucagcuugcuuagauguuccaaauuuaguaagcuuaaggcggccuacagaagaaaaagaaaaaaaaggccacaaaaguucccucucacuuucaguaaauaaaauaaaagcagcaacagaaauaaagaaauaaaugaaauucaaaaugaaauaaauauuguguugugcagcauuaaaaaaucaauaaaaauuaaaaaugagcaagaucuaaaaaaaaaaaaaaaaaaaaaaaaaaaaaaaaaaaaaaaaaaaaaaaaaaaaaaaaaaaaaaaaugcaucccccccccccccccccccccccccccccccaaaggcucuuuucagagccaccagaauu

SEQ ID NO: 15664 - RNA, 2180 nt, Artificial Sequence
  mRNA product Design f-4 comprising derived and/or modified sequence from HRSV(Memphis-37)__AIY60640.1__F_DSCav1_mut3 (opt11)
gggagagucccgcagucggcguccagcggcucugcuuguucgugugugugucguugcaggccuuauucaagcuuaccauggaacuccccauccucaaaaccaacgccauuaccacgauccucgccgcagucacccucugcuucgccuccucacaaaacaucacagaagaauuuuaccaaaguaccugcuccgccgucagcaaaggauaccucggcgcccuccgcaccggcugguacacauccgucauaaccaucgaacucagcaacaucaaagaaaucaaauguaacggaaccgacgccaaaguaaaacuaauaaaacaagaacucgacaaauacaagaacgccgucaccgaccuccaacuccucaugcaaucuacccccgccgccggcucagguagcgccaucugcagcgguauugccgucugcaaaguacuccaccuagaaggagaagucaauaaaaucaaaaacgcccuacucuccaccaacaaggcagucgucagccucuccaacggcgucucagucuuaaccuucaaagugcucgaccucaaaaauuacauagacaaacaacuacuccccauucucaacaaacaauccugcuccauacccaacauagaaaccgucauugaauuucaacagaaaaacaaccgccuccucgaaaucacgcgcgaguucagugucaacgccggcgucaccaccccagucucgacauacaugcucacaaacucagaacuccucucguuaaucaacgacaugccaauaaccaacgaccaaaagaaacuaauguccaacaacguucaaauaguucgccaacaaucauacuccauaaugugcaucaucaaagaagaaguccucgccuacguuguacaauuaccccucuacggcgucaucgacacaccaugcuggaaacuccacacaucgccccucugcaccaccaacaccaaagaaggcagcaacauuugccucacccggacagaccgcggcugguacugcgacaaugcaggcagcgucucauucuucccacaagccgaaaccugcaaaguccaaagcaaccgugucuucugcgacacaaugaacucccuuacccucccaagcgaaguaaaccucugcaauauugacaucuucaaccccaaauacgacugcaaaaucaugaccuccaaaaccgacgucuccucaucagucaucaccucccuuggcgccauugucuccuguuacgguaaaaccaaaugcaccgccuccaacaaaaaccgcggcaucaucaaaaccuucucuaacggcugcgacuacgucucaaacaaaggcgucgacacugucuccgucggcaacacccuauacugcgucaacaagcaagaaggacagucccuauacguaaaaggugaaccaauuaucaacuucuacgacccccuagucuucccauccgacgaguucgaugccuccaucucccaaguaaaugaaaagaucaaucaaagccuggccuucauccgcaaauccgacgaacuacuccacaaugucaacgucggaaaaucaacaacaaacaucaugaucaccaccaucaucaucgucaucauaguaauccuccuacugcucaucgccgucggucucuuccuauacugcaaagcccguucuacuccagucacccucuccaaagaccaacuaucaggaaucaacaacaucgccuucagcaacuaaggacuagugaagggaacacccaaauuuaauucagccuuaagcacaauuaauuaagagugaaacguaauuguacaagcaguuggucacccaccauagggcaugaucaacaccgcaaccuuuccuuuuucccccagugauucugaaaaaccccucuucccuucagcuugcuuagauguuccaaauuuaguaagcuuaaggcggccuacagaagaaaaagaaaaaaaaggccacaaaaguucccucucacuuucaguaaauaaaauaaaagcagcaacagaaauaaagaaauaaaugaaauucaaaaugaaauaaauauuguguugugcagcauuaaaaaaucaauaaaaauuaaaaaugagcaagaucuaaaaaaaaaaaaaaaaaaaaaaaaaaaaaaaaaaaaaaaaaaaaaaaaaaaaaaaaaaaaaaaaugcaucccccccccccccccccccccccccccccccaaaggcucuuuucagagccaccagaauu

SEQ ID NO: 15665 - RNA, 1956 nt, Artificial Sequence
  mRNA product Design f-5 comprising derived and/or modified sequence from HRSV(Memphis-37)__AIY60640.1__F_DSCav1_mut3 (opt1)
gggagacuuucccauucuguagcagaauuugguguugccuguggucuuggucccgcggagaagcuuaccauggagcugcccauccucaagaccaacgccaucaccacgauccuggccgcggugacccugugcuucgccagcucccagaacaucaccgaggaguucuaccagagcacgugcuccgccgucagcaagggcuaccucggcgcccugcgcaccgggugguacaccagcgugaucaccaucgagcuguccaacaucaaggagaucaagugcaacggcaccgacgccaaggugaagcucaucaagcaggagcuggacaaguacaagaacgcggucacggaccugcagcuccugaugcagagcaccccggccgccggcuccgggagcgcgaucugcuccggcaucgccgucugcaaggugcugcaccucgagggcgaggugaacaagaucaagaacgcccugcuguccaccaacaaggccgucgugagccucuccaacggggugagcguccugaccuucaaggugcuggaccucaagaacuacaucgacaagcagcugcugcccauccugaacaagcagagcugcuccauccccaacaucgagaccgucaucgaguuccagcagaagaacaaccgccuccuggagaucacgcgggaguucagcgugaacgcgggcgugaccacccccgucuccaccuacaugcugacgaacagcgagcuccugucccugaucaacgacaugccgaucaccaacgaccagaagaagcucaugagcaacaacgugcagaucgugcgccagcaguccuacagcaucaugugcaucaucaaggaggagguccuggccuacguggugcagcugccccucuacggggucaucgacacccccugcuggaagcugcacaccagcccccugugcacgaccaacaccaaggagggcuccaacaucugccucacccggacggaccgcgggugguacugcgacaacgccggcagcguguccuucuucccgcaggccgagaccugcaagguccagagcaaccggguguucugcgacaccaugaacucccugacccugcccagcgaggugaaccucugcaacaucgacaucuucaaccccaaguacgacugcaagaucaugacguccaagaccgacgucagcuccagcgugaucaccucccugggcgccaucgugagcugcuacgggaagaccaagugcacggcgagcaacaagaaccgcggcaucaucaagaccuucuccaacgggugcgacuacgucagcaacaagggcguggacaccguguccgucggcaacacccuguacugcgugaacaagcaggagggccagagccucuacgugaagggggagcccaucaucaacuucuacgacccgcuggucuuccccuccgacgaguucgacgccagcaucucccaggugaacgagaagaucaaccagagccuggccuucauccggaaguccgacgagcuccugcacaacgugaacgucggcaagagcaccacgaacaucaugaucaccaccaucaucaucgugaucaucgugauccugcugcuccugaucgccgucgggcuguuccucuacugcaaggcccgcuccacccccgugacgcugagcaaggaccagcuguccgggaucaacaacaucgcguucagcaacugaggacuaguacuggcugcaucucccuuuccucuguccuccauccuucucccaggauggugaagggggaccugguacccagugauccccaccccaggauccuaaaucaugacuuaccugcuaauaaaaacucauuggaaaagugagaagaucuaaaaaaaaaaaaaaaaaaaaaaaaaaaaaaaaaaaaaaaaaaaaaaaaaaaaaaaaaaaaaaaaugcaucccccccccccccccccccccccccccccccaaaggcucuuuucagagccaccagaauu

SEQ ID NO: 15666 - RNA, 1956 nt, Artificial Sequence
  mRNA product Design f-5 comprising derived and/or modified sequence from HRSV(Memphis-37)__AIY60640.1__F_DSCav1_mut3 (opt1)
gggagacuuucccauucuguagcagaauuugguguugccuguggucuuggucccgcggagaagcuuaccauggagcugcccauccucaagaccaacgccaucaccacgauccuggccgcggugacccugugcuucgccagcucccagaacaucaccgaggaguucuaccagagcacgugcuccgccgucagcaagggcuaccucggggcccugcgcaccggcugguacaccuccgugaucaccaucgagcugagcaacaucaaggagaucaagugcaacgggaccgacgccaaggugaagcucaucaagcaggagcuggacaaguacaagaacgcggucacggaccugcagcuccugaugcaguccaccccggccgccggcagcggguccgccaucugcagcggcaucgcggugugcaaggugcugcaccucgagggcgaggucaacaagaucaagaacgcccugcuguccaccaacaaggccguggugagccucuccaacggggucagcgugcugaccuucaaggugcuggaccucaagaacuacaucgacaagcagcugcugcccauccucaacaagcaguccugcagcauccccaacaucgagacggucaucgaguuccagcagaagaacaaccggcugcuggagaucacccgcgaguucuccgugaacgccggcgugaccacccccgucagcacguacaugcucaccaacuccgagcugcugagccucaucaacgacaugccgaucaccaacgaccagaagaagcugaugagcaacaacgugcagaucgugcggcagcaguccuacagcaucaugugcaucaucaaggaggagguccuggccuacguggugcagcucccccuguacggggucaucgacacccccugcuggaagcugcacacgagcccccucugcaccaccaacaccaaggagggcuccaacaucugccugacgcgcaccgaccgggggugguacugcgacaacgcgggcuccgugagcuucuucccgcaggccgagaccugcaaggugcaguccaaccgcgucuucugcgacaccaugaacagccugacgcuccccuccgaggugaaccugugcaacaucgacaucuucaaccccaaguacgacugcaagaucaugaccagcaagaccgacgucuccagcuccgugaucaccagccugggcgccaucguguccugcuacgggaagacgaagugcaccgccagcaacaagaaccggggcaucaucaagaccuucuccaacgggugcgacuacgucagcaacaagggcguggacaccguguccgucggcaacacgcucuacugcgugaacaagcaggaggggcagagccuguacgugaagggcgagcccaucaucaacuucuacgacccgcuggucuuccccagcgacgaguucgacgccuccaucagccaggugaacgagaagaucaaccagucccucgcguucauccgcaagagcgacgagcugcugcacaacgugaacgucgggaaguccaccaccaacaucaugaucaccaccaucaucaucgugaucaucgugauccuccugcugcucaucgccgucggccuguuccuguacugcaaggcccggagcacgcccgugacccuguccaaggaccagcucagcgggaucaacaacaucgccuucuccaacugaggacuaguacuggcugcaucucccuuuccucuguccuccauccuucucccaggauggugaagggggaccugguacccagugauccccaccccaggauccuaaaucaugacuuaccugcuaauaaaaacucauuggaaaagugagaagaucuaaaaaaaaaaaaaaaaaaaaaaaaaaaaaaaaaaaaaaaaaaaaaaaaaaaaaaaaaaaaaaaaugcaucccccccccccccccccccccccccccccccaaaggcucuuuucagagccaccagaauu

SEQ ID NO: 15667 - RNA, 1956 nt, Artificial Sequence
  mRNA product Design f-5 comprising derived and/or modified sequence from HRSV(Memphis-37)__AIY60640.1__F_DSCav1_mut3 (opt2)
gggagacuuucccauucuguagcagaauuugguguugccuguggucuuggucccgcggagaagcuuaccauggagcuccccauccucaagaccaacgccaucaccaccauccucgccgccgucacccucugcuucgccuccucccagaacaucaccgaggaguucuaccaguccaccugcuccgccgucuccaagggcuaccucggcgcccuccgcaccggcugguacaccuccgucaucaccaucgagcucuccaacaucaaggagaucaagugcaacggcaccgacgccaaggucaagcucaucaagcaggagcucgacaaguacaagaacgccgucaccgaccuccagcuccucaugcaguccacccccgccgccggcuccggcuccgccaucugcuccggcaucgccgucugcaagguccuccaccucgagggcgaggucaacaagaucaagaacgcccuccucuccaccaacaaggccgucgucucccucuccaacggcgucuccguccucaccuucaagguccucgaccucaagaacuacaucgacaagcagcuccuccccauccucaacaagcaguccugcuccauccccaacaucgagaccgucaucgaguuccagcagaagaacaaccgccuccucgagaucacccgcgaguucuccgucaacgccggcgucaccacccccgucuccaccuacaugcucaccaacuccgagcuccucucccucaucaacgacaugcccaucaccaacgaccagaagaagcucauguccaacaacguccagaucguccgccagcaguccuacuccaucaugugcaucaucaaggaggagguccucgccuacgucguccagcucccccucuacggcgucaucgacacccccugcuggaagcuccacaccuccccccucugcaccaccaacaccaaggagggcuccaacaucugccucacccgcaccgaccgcggcugguacugcgacaacgccggcuccgucuccuucuucccccaggccgagaccugcaagguccaguccaaccgcgucuucugcgacaccaugaacucccucacccuccccuccgaggucaaccucugcaacaucgacaucuucaaccccaaguacgacugcaagaucaugaccuccaagaccgacgucuccuccuccgucaucaccucccucggcgccaucgucuccugcuacggcaagaccaagugcaccgccuccaacaagaaccgcggcaucaucaagaccuucuccaacggcugcgacuacgucuccaacaagggcgucgacaccgucuccgucggcaacacccucuacugcgucaacaagcaggagggccagucccucuacgucaagggcgagcccaucaucaacuucuacgacccccucgucuuccccuccgacgaguucgacgccuccaucucccaggucaacgagaagaucaaccagucccucgccuucauccgcaaguccgacgagcuccuccacaacgucaacgucggcaaguccaccaccaacaucaugaucaccaccaucaucaucgucaucaucgucauccuccuccuccucaucgccgucggccucuuccucuacugcaaggcccgcuccacccccgucacccucuccaaggaccagcucuccggcaucaacaacaucgccuucuccaacugaggacuaguacuggcugcaucucccuuuccucuguccuccauccuucucccaggauggugaagggggaccugguacccagugauccccaccccaggauccuaaaucaugacuuaccugcuaauaaaaacucauuggaaaagugagaagaucuaaaaaaaaaaaaaaaaaaaaaaaaaaaaaaaaaaaaaaaaaaaaaaaaaaaaaaaaaaaaaaaaugcaucccccccccccccccccccccccccccccccaaaggcucuuuucagagccaccagaauu

SEQ ID NO: 15668 - RNA, 1956 nt, Artificial Sequence
  mRNA product Design f-5 comprising derived and/or modified sequence from HRSV(Memphis-37)__AIY60640.1__F_DSCav1_mut3 (opt3)
gggagacuuucccauucuguagcagaauuugguguugccuguggucuuggucccgcggagaagcuuaccauggagcugcccauccucaagaccaacgccauuacaacuauacuugcugcagugacgcugugcuucgccagcucccagaauaucaccgaagaguuuuaccaaucuacauguucagcggucaguaaaggcuauuugggggcuuuaagaacuggaugguacaccagcguuauuacaaucgaacuguccaacauuaaggagaucaaaugcaaugguaccgacgccaaggugaaacuaauaaagcaggaacucgauaaguauaaaaacgcaguaacugaccugcagcuucugaugcagucuacuccugccgcuggcucggggucagcaaucuguagcggaauugccgugugcaaggucuugcaccucgagggcgaggugaauaaaaucaagaacgcucugcugaguaccaauaaagccguugugucccucucuaacggugucagcguguuaacguucaagguacuggaucuuaagaauuacauugacaaacaauugcugccaauccuaaacaagcaguccuguucaauaccgaauauugaaacuguuaucgaguuucagcagaaaaacaauaggcuccuggaaauuacccgggaguucagugugaacgcgggggucacaacucccgugagcaccuauaugcuuacaaauucugagcuguugucccucaucaacgauaugccuaucaccaacgaccaaaagaaacugaugucaaauaacgugcagauuguccgccagcagagcuacaguauaaugugcaucauuaaggaagagguuuuagcauaugugguacaacugccacucuacggagugaucgauacgcccuguuggaaacuucauacuucuccucugugcacaaccaauacuaaggaaggcuccaacauauguuugacacgaaccgaccguggcugguacugcgauaaugccgggagcgucucguuuuucccacaggcugagacguguaaggugcagucuaacagaguuuucugcgacaccaugaacucccuaacacugcccucagaagugaaucucugcaauauugauaucuucaacccuaaauaugacuguaagaucaugacaaguaaaaccgaugucagcuccucugugauuacaagccugggagccaucguaucaugcuacgguaagacuaaauguaccgcaaguaauaagaacaggggcauuauaaagacauuuuccaaugggugcgacuauguuagcaacaaaggaguggacaccgucucugugggcaauacucuuuacugugucaacaagcaagagggucagucacuguaugugaaaggggagccaaucauuaacuucuacgauccguugguuuuucccagugacgaauuugaugcuagcaucucccaggugaaugagaagaucaaccagucucucgccuuuauucggaaaucggacgaacuguuacacaauguaaacgucggaaagagcacgacaaauauaaugaucaccacuauuaucauugugaucauaguuauccugcuacuccugauugcggugggccuuuucuuguauugcaaggcccgcuccaccccugucacacugucaaaagaucaacucaguggcaucaacaauauugcauucucuaacugaggacuaguacuggcugcaucucccuuuccucuguccuccauccuucucccaggauggugaagggggaccugguacccagugauccccaccccaggauccuaaaucaugacuuaccugcuaauaaaaacucauuggaaaagugagaagaucuaaaaaaaaaaaaaaaaaaaaaaaaaaaaaaaaaaaaaaaaaaaaaaaaaaaaaaaaaaaaaaaaugcaucccccccccccccccccccccccccccccccaaaggcucuuuucagagccaccagaauu

SEQ ID NO: 15669 - RNA, 1956 nt, Artificial Sequence
  mRNA product Design f-5 comprising derived and/or modified sequence from HRSV(Memphis-37)__AIY60640.1__F_DSCav1_mut3 (opt4)
gggagacuuucccauucuguagcagaauuugguguugccuguggucuuggucccgcggagaagcuuaccauggagcugcccauccugaagaccaacgccaucaccaccauccuggccgccgugacccugugcuucgccagcagccagaacaucaccgaggaguucuaccagagcaccugcagcgccgugagcaagggcuaccugggcgcccugagaaccggcugguacaccagcgugaucaccaucgagcugagcaacaucaaggagaucaagugcaacggcaccgacgccaaggugaagcugaucaagcaggagcuggacaaguacaagaacgccgugaccgaccugcagcugcugaugcagagcacccccgccgccggcagcggcagcgccaucugcagcggcaucgccgugugcaaggugcugcaccuggagggcgaggugaacaagaucaagaacgcccugcugagcaccaacaaggccguggugagccugagcaacggcgugagcgugcugaccuucaaggugcuggaccugaagaacuacaucgacaagcagcugcugcccauccugaacaagcagagcugcagcauccccaacaucgagaccgugaucgaguuccagcagaagaacaacagacugcuggagaucaccagagaguucagcgugaacgccggcgugaccacccccgugagcaccuacaugcugaccaacagcgagcugcugagccugaucaacgacaugcccaucaccaacgaccagaagaagcugaugagcaacaacgugcagaucgugagacagcagagcuacagcaucaugugcaucaucaaggaggaggugcuggccuacguggugcagcugccccuguacggcgugaucgacacccccugcuggaagcugcacaccagcccccugugcaccaccaacaccaaggagggcagcaacaucugccugaccagaaccgacagaggcugguacugcgacaacgccggcagcgugagcuucuucccccaggccgagaccugcaaggugcagagcaacagaguguucugcgacaccaugaacagccugacccugcccagcgaggugaaccugugcaacaucgacaucuucaaccccaaguacgacugcaagaucaugaccagcaagaccgacgugagcagcagcgugaucaccagccugggcgccaucgugagcugcuacggcaagaccaagugcaccgccagcaacaagaacagaggcaucaucaagaccuucagcaacggcugcgacuacgugagcaacaagggcguggacaccgugagcgugggcaacacccuguacugcgugaacaagcaggagggccagagccuguacgugaagggcgagcccaucaucaacuucuacgacccccugguguuccccagcgacgaguucgacgccagcaucagccaggugaacgagaagaucaaccagagccuggccuucaucagaaagagcgacgagcugcugcacaacgugaacgugggcaagagcaccaccaacaucaugaucaccaccaucaucaucgugaucaucgugauccugcugcugcugaucgccgugggccuguuccuguacugcaaggccagaagcacccccgugacccugagcaaggaccagcugagcggcaucaacaacaucgccuucagcaacugaggacuaguacuggcugcaucucccuuuccucuguccuccauccuucucccaggauggugaagggggaccugguacccagugauccccaccccaggauccuaaaucaugacuuaccugcuaauaaaaacucauuggaaaagugagaagaucuaaaaaaaaaaaaaaaaaaaaaaaaaaaaaaaaaaaaaaaaaaaaaaaaaaaaaaaaaaaaaaaaugcaucccccccccccccccccccccccccccccccaaaggcucuuuucagagccaccagaauu

SEQ ID NO: 15670 - RNA, 1956 nt, Artificial Sequence
  mRNA product Design f-5 comprising derived and/or modified sequence from HRSV(Memphis-37)__AIY60640.1__F_DSCav1_mut3 (opt5)
gggagacuuucccauucuguagcagaauuugguguugccuguggucuuggucccgcggagaagcuuaccauggagcugcccauccucaagaccaacgccauuacaacgauccuggcugccgugacccuuugcuucgcgagcucccagaauauuacagaagaguuuuaccaaucuaccuguagcgcugucuccaaaggcuaucugggggcccucagaacaggaugguacaccucuguuaucacaauugaacugagcaacaucaaggagaucaaaugcaauggcaccgacgccaaggugaaacuuauuaagcaggaacuggauaaguauaaaaacgcugugacggaccuccagcugcugaugcaguccaccccugccgcugggucuggaagcgccaucuguuccggcauugcggucugcaaggugcuccaccuggagggggagguuaauaaaaucaagaacgcccuucugagcacaaauaaagcuguggucucucucuccaacggagugagcguucugaccuucaaggugcuugaucugaagaauuacauugacaaacaacuccugccgauccugaacaagcagucuuguuccauucccaauaucgaaacagucaucgaguuucagcagaaaaacaaucggcuccuggaaauuacccgcgaguucagcgugaacgccggcgugacgacaccugucucuaccuauaugcuuacaaauuccgagcugcucagccugaucaacgauaugcccauuaccaacgaccaaaagaaacuuauguccaauaacguucagaucgugagacagcagucuuacagcauuaugugcaucaucaaggaagaggugcuggcuuaugucgugcaacucccucuguacggcguuauugauacccccuguuggaaacugcauacauccccucucugcacgaccaauacaaaggaagggagcaacaucugucugacccggacagaccgcggaugguacugcgauaaugccggcucuguguccuuuuucccgcaggcggagaccuguaagguccagagcaacagaguguuuugcgacacgaugaacucucuuacacugcccagcgaaguuaaucucugcaauauugauaucuucaacccuaaauaugacuguaagauuaugaccuccaaaaccgaugugucuagcuccgucaucacaagccugggggccaucgugucuugcuacggaaagaccaaauguacagcuuccaauaagaaccggggcauuaucaagacguuuagcaaugggugcgacuaugucucuaacaaaggaguggacaccguuuccgugggcaauacacuuuacugugucaacaagcaagagggccagagccuguaugugaaaggggagcccauuaucaacuucuacgauccucucguuuuucccuccgacgaguucgaugccucuauuagccaggugaaugaaaagaucaaccagucccuggcuuuuauucgcaaaucugacgaacugcuccacaaugucaacgugggaaagagcaccacaaauaucaugaucaccacgauuaucauugugaucauuguuauccugcuucugcucaucgccgucggccuguuccuguauugcaaggccagauccaccccggugacacuuagcaaagaucaacucucugggauuaacaauaucgcuuucuccaacugaggacuaguacuggcugcaucucccuuuccucuguccuccauccuucucccaggauggugaagggggaccugguacccagugauccccaccccaggauccuaaaucaugacuuaccugcuaauaaaaacucauuggaaaagugagaagaucuaaaaaaaaaaaaaaaaaaaaaaaaaaaaaaaaaaaaaaaaaaaaaaaaaaaaaaaaaaaaaaaaugcaucccccccccccccccccccccccccccccccaaaggcucuuuucagagccaccagaauu

SEQ ID NO: 15671 - RNA, 1956 nt, Artificial Sequence
  mRNA product Design f-5 comprising derived and/or modified sequence from HRSV(Memphis-37)__AIY60640.1__F_DSCav1_mut3 (opt6)
gggagacuuucccauucuguagcagaauuugguguugccuguggucuuggucccgcggagaagcuuaccauggaauuaccaauacuaaaaacaaaugccaucaccaccauccuggccgccguaacauuaugcuucgcaaguucacaaaauauaacagaagaauuuuaucaaucaacuugcagcgccguaucaaaaggcuacuuaggcgcacuacguacaggaugguacacaucaguaauaaccauagaacuauccaauauuaaagaaauaaaaugcaauggaacagacgcaaaaguuaaacuaauaaaacaagaauuagacaaauacaaaaacgcaguaaccgaccuucaauuacuaaugcaaucuacccccgcugcagguuccggaucagcaauauguucaggaauugcaguaugcaaaguccuacacuuagaaggagaaguaaacaaaauaaaaaacgcacuauuaagcaccaauaaagcagucguaucauuauccaacggcguuucaguacuaacauuuaaaguacuugaccuaaaaaacuauauagacaaacaacuacuucccauccuuaacaaacaaagcugcucaauaccuaauaucgaaacaguaauagaauuucaacaaaaaaacaaucgauuauuagaaaucacacgagaauuuucugucaacgcaggagucaccacacccguaucuacuuauauguuaaccaacucugaauuauuaucacuaaucaaugacaugccaauaacaaacgaucaaaaaaaauuaaugucaaauaacguacaaauaguaagacaacaaucauacucaauaaugugcauuauaaaagaagaaguacuagccuauguuguacaacucccacucuacggcguaauagacacaccaugcuggaaauuacacacuucaccacuaugcacaacaaacacaaaagaaggaucaaacaucugccuaaccagaaccgauagaggaugguauugcgacaaugccggaucaguuucauucuucccacaagcagaaacaugcaaaguacaauccaacagaguuuucugugacacaaugaacucgcuaacauuacccagcgaaguaaaccucugcaacauagacauauucaacccaaaauacgauugcaaaauaaugacuucuaaaacagauguuuccucaagcgucauaacgaguuuaggagcaauaguaagcuguuacggaaaaaccaaauguaccgcaucaaacaaaaaccgaggaauaauaaaaaccuuuucaaacggaugcgauuacgucuccaacaaaggagucgacacaguaucaguuggcaauacucuuuacugcguaaauaaacaagaaggacaaucacuauacguaaaaggcgaaccaauaauaaacuucuacgacccccucgucuucccuucagaugaauuugacgcaagcaucucacaaguuaaugaaaaaauaaaucaauccuuagcauucauacgaaaaucagacgaacuauuacacaacguaaacguaggaaaaucaacgacaaacauaaugauaacaacuaucauuauagucauaauagucauacuacuacuauuaauagccguaggcuuauuccuauacugcaaagcaagaucuacuccaguaacacucucaaaagaccaauuaucuggaauaaauaacauagcauucucuaauuaaggacuaguacuggcugcaucucccuuuccucuguccuccauccuucucccaggauggugaagggggaccugguacccagugauccccaccccaggauccuaaaucaugacuuaccugcuaauaaaaacucauuggaaaagugagaagaucuaaaaaaaaaaaaaaaaaaaaaaaaaaaaaaaaaaaaaaaaaaaaaaaaaaaaaaaaaaaaaaaaugcaucccccccccccccccccccccccccccccccaaaggcucuuuucagagccaccagaauu

SEQ ID NO: 15672 - RNA, 1956 nt, Artificial Sequence
  mRNA product Design f-5 comprising derived and/or modified sequence from HRSV(Memphis-37)__AIY60640.1__F_DSCav1_mut3 (opt11)
gggagacuuucccauucuguagcagaauuugguguugccuguggucuuggucccgcggagaagcuuaccauggaacuccccauccucaaaaccaacgccauuaccacgauccucgccgcagucacccucugcuucgccuccucacaaaacaucacagaagaauuuuaccaaaguaccugcuccgccgucagcaaaggauaccucggcgcccuccgcaccggcugguacacauccgucauaaccaucgaacucagcaacaucaaagaaaucaaauguaacggaaccgacgccaaaguaaaacuaauaaaacaagaacucgacaaauacaagaacgccgucaccgaccuccaacuccucaugcaaucuacccccgccgccggcucagguagcgccaucugcagcgguauugccgucugcaaaguacuccaccuagaaggagaagucaauaaaaucaaaaacgcccuacucuccaccaacaaggcagucgucagccucuccaacggcgucucagucuuaaccuucaaagugcucgaccucaaaaauuacauagacaaacaacuacuccccauucucaacaaacaauccugcuccauacccaacauagaaaccgucauugaauuucaacagaaaaacaaccgccuccucgaaaucacgcgcgaguucagugucaacgccggcgucaccaccccagucucgacauacaugcucacaaacucagaacuccucucguuaaucaacgacaugccaauaaccaacgaccaaaagaaacuaauguccaacaacguucaaauaguucgccaacaaucauacuccauaaugugcaucaucaaagaagaaguccucgccuacguuguacaauuaccccucuacggcgucaucgacacaccaugcuggaaacuccacacaucgccccucugcaccaccaacaccaaagaaggcagcaacauuugccucacccggacagaccgcggcugguacugcgacaaugcaggcagcgucucauucuucccacaagccgaaaccugcaaaguccaaagcaaccgugucuucugcgacacaaugaacucccuuacccucccaagcgaaguaaaccucugcaauauugacaucuucaaccccaaauacgacugcaaaaucaugaccuccaaaaccgacgucuccucaucagucaucaccucccuuggcgccauugucuccuguuacgguaaaaccaaaugcaccgccuccaacaaaaaccgcggcaucaucaaaaccuucucuaacggcugcgacuacgucucaaacaaaggcgucgacacugucuccgucggcaacacccuauacugcgucaacaagcaagaaggacagucccuauacguaaaaggugaaccaauuaucaacuucuacgacccccuagucuucccauccgacgaguucgaugccuccaucucccaaguaaaugaaaagaucaaucaaagccuggccuucauccgcaaauccgacgaacuacuccacaaugucaacgucggaaaaucaacaacaaacaucaugaucaccaccaucaucaucgucaucauaguaauccuccuacugcucaucgccgucggucucuuccuauacugcaaagcccguucuacuccagucacccucuccaaagaccaacuaucaggaaucaacaacaucgccuucagcaacuaaggacuaguacuggcugcaucucccuuuccucuguccuccauccuucucccaggauggugaagggggaccugguacccagugauccccaccccaggauccuaaaucaugacuuaccugcuaauaaaaacucauuggaaaagugagaagaucuaaaaaaaaaaaaaaaaaaaaaaaaaaaaaaaaaaaaaaaaaaaaaaaaaaaaaaaaaaaaaaaaugcaucccccccccccccccccccccccccccccccaaaggcucuuuucagagccaccagaauu

SEQ ID NO: 15673 - RNA, 1952 nt, Artificial Sequence
  mRNA product Design g-1 comprising derived and/or modified sequence from HRSV(Memphis-37)__AIY60640.1__F_DSCav1_mut3 (opt1)
gggagacuuucccauucuguagcagaauuugguguugccuguggucuuggucccgcggagaagcuuaccauggagcugcccauccucaagaccaacgccaucaccacgauccuggccgcggugacccugugcuucgccagcucccagaacaucaccgaggaguucuaccagagcacgugcuccgccgucagcaagggcuaccucggcgcccugcgcaccgggugguacaccagcgugaucaccaucgagcuguccaacaucaaggagaucaagugcaacggcaccgacgccaaggugaagcucaucaagcaggagcuggacaaguacaagaacgcggucacggaccugcagcuccugaugcagagcaccccggccgccggcuccgggagcgcgaucugcuccggcaucgccgucugcaaggugcugcaccucgagggcgaggugaacaagaucaagaacgcccugcuguccaccaacaaggccgucgugagccucuccaacggggugagcguccugaccuucaaggugcuggaccucaagaacuacaucgacaagcagcugcugcccauccugaacaagcagagcugcuccauccccaacaucgagaccgucaucgaguuccagcagaagaacaaccgccuccuggagaucacgcgggaguucagcgugaacgcgggcgugaccacccccgucuccaccuacaugcugacgaacagcgagcuccugucccugaucaacgacaugccgaucaccaacgaccagaagaagcucaugagcaacaacgugcagaucgugcgccagcaguccuacagcaucaugugcaucaucaaggaggagguccuggccuacguggugcagcugccccucuacggggucaucgacacccccugcuggaagcugcacaccagcccccugugcacgaccaacaccaaggagggcuccaacaucugccucacccggacggaccgcgggugguacugcgacaacgccggcagcguguccuucuucccgcaggccgagaccugcaagguccagagcaaccggguguucugcgacaccaugaacucccugacccugcccagcgaggugaaccucugcaacaucgacaucuucaaccccaaguacgacugcaagaucaugacguccaagaccgacgucagcuccagcgugaucaccucccugggcgccaucgugagcugcuacgggaagaccaagugcacggcgagcaacaagaaccgcggcaucaucaagaccuucuccaacgggugcgacuacgucagcaacaagggcguggacaccguguccgucggcaacacccuguacugcgugaacaagcaggagggccagagccucuacgugaagggggagcccaucaucaacuucuacgacccgcuggucuuccccuccgacgaguucgacgccagcaucucccaggugaacgagaagaucaaccagagccuggccuucauccggaaguccgacgagcuccugcacaacgugaacgucggcaagagcaccacgaacaucaugaucaccaccaucaucaucgugaucaucgugauccugcugcuccugaucgccgucgggcuguuccucuacugcaaggcccgcuccacccccgugacgcugagcaaggaccagcuguccgggaucaacaacaucgcguucagcaacugaggacuaguggaagcauuuuccuggcugauuaaaagaaauuacucagcuauggucaucuguuccuguuagaaggcuaugcagcauauuauauacuaugcgcauguuaugaaaugcauaauaaaaaauuuuaaaaaaucuaaaagaucuaaaaaaaaaaaaaaaaaaaaaaaaaaaaaaaaaaaaaaaaaaaaaaaaaaaaaaaaaaaaaaaaugcaucccccccccccccccccccccccccccccccaaaggcucuuuucagagccaccagaauu

SEQ ID NO: 15674 - RNA, 1952 nt, Artificial Sequence
  mRNA product Design g-1 comprising derived and/or modified sequence from HRSV(Memphis-37)__AIY60640.1__F_DSCav1_mut3 (opt1)
gggagacuuucccauucuguagcagaauuugguguugccuguggucuuggucccgcggagaagcuuaccauggagcugcccauccucaagaccaacgccaucaccacgauccuggccgcggugacccugugcuucgccagcucccagaacaucaccgaggaguucuaccagagcacgugcuccgccgucagcaagggcuaccucggggcccugcgcaccggcugguacaccuccgugaucaccaucgagcugagcaacaucaaggagaucaagugcaacgggaccgacgccaaggugaagcucaucaagcaggagcuggacaaguacaagaacgcggucacggaccugcagcuccugaugcaguccaccccggccgccggcagcggguccgccaucugcagcggcaucgcggugugcaaggugcugcaccucgagggcgaggucaacaagaucaagaacgcccugcuguccaccaacaaggccguggugagccucuccaacggggucagcgugcugaccuucaaggugcuggaccucaagaacuacaucgacaagcagcugcugcccauccucaacaagcaguccugcagcauccccaacaucgagacggucaucgaguuccagcagaagaacaaccggcugcuggagaucacccgcgaguucuccgugaacgccggcgugaccacccccgucagcacguacaugcucaccaacuccgagcugcugagccucaucaacgacaugccgaucaccaacgaccagaagaagcugaugagcaacaacgugcagaucgugcggcagcaguccuacagcaucaugugcaucaucaaggaggagguccuggccuacguggugcagcucccccuguacggggucaucgacacccccugcuggaagcugcacacgagcccccucugcaccaccaacaccaaggagggcuccaacaucugccugacgcgcaccgaccgggggugguacugcgacaacgcgggcuccgugagcuucuucccgcaggccgagaccugcaaggugcaguccaaccgcgucuucugcgacaccaugaacagccugacgcuccccuccgaggugaaccugugcaacaucgacaucuucaaccccaaguacgacugcaagaucaugaccagcaagaccgacgucuccagcuccgugaucaccagccugggcgccaucguguccugcuacgggaagacgaagugcaccgccagcaacaagaaccggggcaucaucaagaccuucuccaacgggugcgacuacgucagcaacaagggcguggacaccguguccgucggcaacacgcucuacugcgugaacaagcaggaggggcagagccuguacgugaagggcgagcccaucaucaacuucuacgacccgcuggucuuccccagcgacgaguucgacgccuccaucagccaggugaacgagaagaucaaccagucccucgcguucauccgcaagagcgacgagcugcugcacaacgugaacgucgggaaguccaccaccaacaucaugaucaccaccaucaucaucgugaucaucgugauccuccugcugcucaucgccgucggccuguuccuguacugcaaggcccggagcacgcccgugacccuguccaaggaccagcucagcgggaucaacaacaucgccuucuccaacugaggacuaguggaagcauuuuccuggcugauuaaaagaaauuacucagcuauggucaucuguuccuguuagaaggcuaugcagcauauuauauacuaugcgcauguuaugaaaugcauaauaaaaaauuuuaaaaaaucuaaaagaucuaaaaaaaaaaaaaaaaaaaaaaaaaaaaaaaaaaaaaaaaaaaaaaaaaaaaaaaaaaaaaaaaugcaucccccccccccccccccccccccccccccccaaaggcucuuuucagagccaccagaauu

SEQ ID NO: 15675 - RNA, 1952 nt, Artificial Sequence
  mRNA product Design g-1 comprising derived and/or modified sequence from HRSV(Memphis-37)__AIY60640.1__F_DSCav1_mut3 (opt2)
gggagacuuucccauucuguagcagaauuugguguugccuguggucuuggucccgcggagaagcuuaccauggagcuccccauccucaagaccaacgccaucaccaccauccucgccgccgucacccucugcuucgccuccucccagaacaucaccgaggaguucuaccaguccaccugcuccgccgucuccaagggcuaccucggcgcccuccgcaccggcugguacaccuccgucaucaccaucgagcucuccaacaucaaggagaucaagugcaacggcaccgacgccaaggucaagcucaucaagcaggagcucgacaaguacaagaacgccgucaccgaccuccagcuccucaugcaguccacccccgccgccggcuccggcuccgccaucugcuccggcaucgccgucugcaagguccuccaccucgagggcgaggucaacaagaucaagaacgcccuccucuccaccaacaaggccgucgucucccucuccaacggcgucuccguccucaccuucaagguccucgaccucaagaacuacaucgacaagcagcuccuccccauccucaacaagcaguccugcuccauccccaacaucgagaccgucaucgaguuccagcagaagaacaaccgccuccucgagaucacccgcgaguucuccgucaacgccggcgucaccacccccgucuccaccuacaugcucaccaacuccgagcuccucucccucaucaacgacaugcccaucaccaacgaccagaagaagcucauguccaacaacguccagaucguccgccagcaguccuacuccaucaugugcaucaucaaggaggagguccucgccuacgucguccagcucccccucuacggcgucaucgacacccccugcuggaagcuccacaccuccccccucugcaccaccaacaccaaggagggcuccaacaucugccucacccgcaccgaccgcggcugguacugcgacaacgccggcuccgucuccuucuucccccaggccgagaccugcaagguccaguccaaccgcgucuucugcgacaccaugaacucccucacccuccccuccgaggucaaccucugcaacaucgacaucuucaaccccaaguacgacugcaagaucaugaccuccaagaccgacgucuccuccuccgucaucaccucccucggcgccaucgucuccugcuacggcaagaccaagugcaccgccuccaacaagaaccgcggcaucaucaagaccuucuccaacggcugcgacuacgucuccaacaagggcgucgacaccgucuccgucggcaacacccucuacugcgucaacaagcaggagggccagucccucuacgucaagggcgagcccaucaucaacuucuacgacccccucgucuuccccuccgacgaguucgacgccuccaucucccaggucaacgagaagaucaaccagucccucgccuucauccgcaaguccgacgagcuccuccacaacgucaacgucggcaaguccaccaccaacaucaugaucaccaccaucaucaucgucaucaucgucauccuccuccuccucaucgccgucggccucuuccucuacugcaaggcccgcuccacccccgucacccucuccaaggaccagcucuccggcaucaacaacaucgccuucuccaacugaggacuaguggaagcauuuuccuggcugauuaaaagaaauuacucagcuauggucaucuguuccuguuagaaggcuaugcagcauauuauauacuaugcgcauguuaugaaaugcauaauaaaaaauuuuaaaaaaucuaaaagaucuaaaaaaaaaaaaaaaaaaaaaaaaaaaaaaaaaaaaaaaaaaaaaaaaaaaaaaaaaaaaaaaaugcaucccccccccccccccccccccccccccccccaaaggcucuuuucagagccaccagaauu

SEQ ID NO: 15676 - RNA, 1952 nt, Artificial Sequence
  mRNA product Design g-1 comprising derived and/or modified sequence from HRSV(Memphis-37)__AIY60640.1__F_DSCav1_mut3 (opt3)
gggagacuuucccauucuguagcagaauuugguguugccuguggucuuggucccgcggagaagcuuaccauggagcugcccauccucaagaccaacgccauuacaacuauacuugcugcagugacgcugugcuucgccagcucccagaauaucaccgaagaguuuuaccaaucuacauguucagcggucaguaaaggcuauuugggggcuuuaagaacuggaugguacaccagcguuauuacaaucgaacuguccaacauuaaggagaucaaaugcaaugguaccgacgccaaggugaaacuaauaaagcaggaacucgauaaguauaaaaacgcaguaacugaccugcagcuucugaugcagucuacuccugccgcuggcucggggucagcaaucuguagcggaauugccgugugcaaggucuugcaccucgagggcgaggugaauaaaaucaagaacgcucugcugaguaccaauaaagccguugugucccucucuaacggugucagcguguuaacguucaagguacuggaucuuaagaauuacauugacaaacaauugcugccaauccuaaacaagcaguccuguucaauaccgaauauugaaacuguuaucgaguuucagcagaaaaacaauaggcuccuggaaauuacccgggaguucagugugaacgcgggggucacaacucccgugagcaccuauaugcuuacaaauucugagcuguugucccucaucaacgauaugccuaucaccaacgaccaaaagaaacugaugucaaauaacgugcagauuguccgccagcagagcuacaguauaaugugcaucauuaaggaagagguuuuagcauaugugguacaacugccacucuacggagugaucgauacgcccuguuggaaacuucauacuucuccucugugcacaaccaauacuaaggaaggcuccaacauauguuugacacgaaccgaccguggcugguacugcgauaaugccgggagcgucucguuuuucccacaggcugagacguguaaggugcagucuaacagaguuuucugcgacaccaugaacucccuaacacugcccucagaagugaaucucugcaauauugauaucuucaacccuaaauaugacuguaagaucaugacaaguaaaaccgaugucagcuccucugugauuacaagccugggagccaucguaucaugcuacgguaagacuaaauguaccgcaaguaauaagaacaggggcauuauaaagacauuuuccaaugggugcgacuauguuagcaacaaaggaguggacaccgucucugugggcaauacucuuuacugugucaacaagcaagagggucagucacuguaugugaaaggggagccaaucauuaacuucuacgauccguugguuuuucccagugacgaauuugaugcuagcaucucccaggugaaugagaagaucaaccagucucucgccuuuauucggaaaucggacgaacuguuacacaauguaaacgucggaaagagcacgacaaauauaaugaucaccacuauuaucauugugaucauaguuauccugcuacuccugauugcggugggccuuuucuuguauugcaaggcccgcuccaccccugucacacugucaaaagaucaacucaguggcaucaacaauauugcauucucuaacugaggacuaguggaagcauuuuccuggcugauuaaaagaaauuacucagcuauggucaucuguuccuguuagaaggcuaugcagcauauuauauacuaugcgcauguuaugaaaugcauaauaaaaaauuuuaaaaaaucuaaaagaucuaaaaaaaaaaaaaaaaaaaaaaaaaaaaaaaaaaaaaaaaaaaaaaaaaaaaaaaaaaaaaaaaugcaucccccccccccccccccccccccccccccccaaaggcucuuuucagagccaccagaauu

SEQ ID NO: 15677 - RNA, 1952 nt, Artificial Sequence
  mRNA product Design g-1 comprising derived and/or modified sequence from HRSV(Memphis-37)__AIY60640.1__F_DSCav1_mut3 (opt4)
gggagacuuucccauucuguagcagaauuugguguugccuguggucuuggucccgcggagaagcuuaccauggagcugcccauccugaagaccaacgccaucaccaccauccuggccgccgugacccugugcuucgccagcagccagaacaucaccgaggaguucuaccagagcaccugcagcgccgugagcaagggcuaccugggcgcccugagaaccggcugguacaccagcgugaucaccaucgagcugagcaacaucaaggagaucaagugcaacggcaccgacgccaaggugaagcugaucaagcaggagcuggacaaguacaagaacgccgugaccgaccugcagcugcugaugcagagcacccccgccgccggcagcggcagcgccaucugcagcggcaucgccgugugcaaggugcugcaccuggagggcgaggugaacaagaucaagaacgcccugcugagcaccaacaaggccguggugagccugagcaacggcgugagcgugcugaccuucaaggugcuggaccugaagaacuacaucgacaagcagcugcugcccauccugaacaagcagagcugcagcauccccaacaucgagaccgugaucgaguuccagcagaagaacaacagacugcuggagaucaccagagaguucagcgugaacgccggcgugaccacccccgugagcaccuacaugcugaccaacagcgagcugcugagccugaucaacgacaugcccaucaccaacgaccagaagaagcugaugagcaacaacgugcagaucgugagacagcagagcuacagcaucaugugcaucaucaaggaggaggugcuggccuacguggugcagcugccccuguacggcgugaucgacacccccugcuggaagcugcacaccagcccccugugcaccaccaacaccaaggagggcagcaacaucugccugaccagaaccgacagaggcugguacugcgacaacgccggcagcgugagcuucuucccccaggccgagaccugcaaggugcagagcaacagaguguucugcgacaccaugaacagccugacccugcccagcgaggugaaccugugcaacaucgacaucuucaaccccaaguacgacugcaagaucaugaccagcaagaccgacgugagcagcagcgugaucaccagccugggcgccaucgugagcugcuacggcaagaccaagugcaccgccagcaacaagaacagaggcaucaucaagaccuucagcaacggcugcgacuacgugagcaacaagggcguggacaccgugagcgugggcaacacccuguacugcgugaacaagcaggagggccagagccuguacgugaagggcgagcccaucaucaacuucuacgacccccugguguuccccagcgacgaguucgacgccagcaucagccaggugaacgagaagaucaaccagagccuggccuucaucagaaagagcgacgagcugcugcacaacgugaacgugggcaagagcaccaccaacaucaugaucaccaccaucaucaucgugaucaucgugauccugcugcugcugaucgccgugggccuguuccuguacugcaaggccagaagcacccccgugacccugagcaaggaccagcugagcggcaucaacaacaucgccuucagcaacugaggacuaguggaagcauuuuccuggcugauuaaaagaaauuacucagcuauggucaucuguuccuguuagaaggcuaugcagcauauuauauacuaugcgcauguuaugaaaugcauaauaaaaaauuuuaaaaaaucuaaaagaucuaaaaaaaaaaaaaaaaaaaaaaaaaaaaaaaaaaaaaaaaaaaaaaaaaaaaaaaaaaaaaaaaugcaucccccccccccccccccccccccccccccccaaaggcucuuuucagagccaccagaauu

SEQ ID NO: 15678 - RNA, 1952 nt, Artificial Sequence
  mRNA product Design g-1 comprising derived and/or modified sequence from HRSV(Memphis-37)__AIY60640.1__F_DSCav1_mut3 (opt5)
gggagacuuucccauucuguagcagaauuugguguugccuguggucuuggucccgcggagaagcuuaccauggagcugcccauccucaagaccaacgccauuacaacgauccuggcugccgugacccuuugcuucgcgagcucccagaauauuacagaagaguuuuaccaaucuaccuguagcgcugucuccaaaggcuaucugggggcccucagaacaggaugguacaccucuguuaucacaauugaacugagcaacaucaaggagaucaaaugcaauggcaccgacgccaaggugaaacuuauuaagcaggaacuggauaaguauaaaaacgcugugacggaccuccagcugcugaugcaguccaccccugccgcugggucuggaagcgccaucuguuccggcauugcggucugcaaggugcuccaccuggagggggagguuaauaaaaucaagaacgcccuucugagcacaaauaaagcuguggucucucucuccaacggagugagcguucugaccuucaaggugcuugaucugaagaauuacauugacaaacaacuccugccgauccugaacaagcagucuuguuccauucccaauaucgaaacagucaucgaguuucagcagaaaaacaaucggcuccuggaaauuacccgcgaguucagcgugaacgccggcgugacgacaccugucucuaccuauaugcuuacaaauuccgagcugcucagccugaucaacgauaugcccauuaccaacgaccaaaagaaacuuauguccaauaacguucagaucgugagacagcagucuuacagcauuaugugcaucaucaaggaagaggugcuggcuuaugucgugcaacucccucuguacggcguuauugauacccccuguuggaaacugcauacauccccucucugcacgaccaauacaaaggaagggagcaacaucugucugacccggacagaccgcggaugguacugcgauaaugccggcucuguguccuuuuucccgcaggcggagaccuguaagguccagagcaacagaguguuuugcgacacgaugaacucucuuacacugcccagcgaaguuaaucucugcaauauugauaucuucaacccuaaauaugacuguaagauuaugaccuccaaaaccgaugugucuagcuccgucaucacaagccugggggccaucgugucuugcuacggaaagaccaaauguacagcuuccaauaagaaccggggcauuaucaagacguuuagcaaugggugcgacuaugucucuaacaaaggaguggacaccguuuccgugggcaauacacuuuacugugucaacaagcaagagggccagagccuguaugugaaaggggagcccauuaucaacuucuacgauccucucguuuuucccuccgacgaguucgaugccucuauuagccaggugaaugaaaagaucaaccagucccuggcuuuuauucgcaaaucugacgaacugcuccacaaugucaacgugggaaagagcaccacaaauaucaugaucaccacgauuaucauugugaucauuguuauccugcuucugcucaucgccgucggccuguuccuguauugcaaggccagauccaccccggugacacuuagcaaagaucaacucucugggauuaacaauaucgcuuucuccaacugaggacuaguggaagcauuuuccuggcugauuaaaagaaauuacucagcuauggucaucuguuccuguuagaaggcuaugcagcauauuauauacuaugcgcauguuaugaaaugcauaauaaaaaauuuuaaaaaaucuaaaagaucuaaaaaaaaaaaaaaaaaaaaaaaaaaaaaaaaaaaaaaaaaaaaaaaaaaaaaaaaaaaaaaaaugcaucccccccccccccccccccccccccccccccaaaggcucuuuucagagccaccagaauu

SEQ ID NO: 15679 - RNA, 1952 nt, Artificial Sequence
  mRNA product Design g-1 comprising derived and/or modified sequence from HRSV(Memphis-37)__AIY60640.1__F_DSCav1_mut3 (opt6)
gggagacuuucccauucuguagcagaauuugguguugccuguggucuuggucccgcggagaagcuuaccauggaauuaccaauacuaaaaacaaaugccaucaccaccauccuggccgccguaacauuaugcuucgcaaguucacaaaauauaacagaagaauuuuaucaaucaacuugcagcgccguaucaaaaggcuacuuaggcgcacuacguacaggaugguacacaucaguaauaaccauagaacuauccaauauuaaagaaauaaaaugcaauggaacagacgcaaaaguuaaacuaauaaaacaagaauuagacaaauacaaaaacgcaguaaccgaccuucaauuacuaaugcaaucuacccccgcugcagguuccggaucagcaauauguucaggaauugcaguaugcaaaguccuacacuuagaaggagaaguaaacaaaauaaaaaacgcacuauuaagcaccaauaaagcagucguaucauuauccaacggcguuucaguacuaacauuuaaaguacuugaccuaaaaaacuauauagacaaacaacuacuucccauccuuaacaaacaaagcugcucaauaccuaauaucgaaacaguaauagaauuucaacaaaaaaacaaucgauuauuagaaaucacacgagaauuuucugucaacgcaggagucaccacacccguaucuacuuauauguuaaccaacucugaauuauuaucacuaaucaaugacaugccaauaacaaacgaucaaaaaaaauuaaugucaaauaacguacaaauaguaagacaacaaucauacucaauaaugugcauuauaaaagaagaaguacuagccuauguuguacaacucccacucuacggcguaauagacacaccaugcuggaaauuacacacuucaccacuaugcacaacaaacacaaaagaaggaucaaacaucugccuaaccagaaccgauagaggaugguauugcgacaaugccggaucaguuucauucuucccacaagcagaaacaugcaaaguacaauccaacagaguuuucugugacacaaugaacucgcuaacauuacccagcgaaguaaaccucugcaacauagacauauucaacccaaaauacgauugcaaaauaaugacuucuaaaacagauguuuccucaagcgucauaacgaguuuaggagcaauaguaagcuguuacggaaaaaccaaauguaccgcaucaaacaaaaaccgaggaauaauaaaaaccuuuucaaacggaugcgauuacgucuccaacaaaggagucgacacaguaucaguuggcaauacucuuuacugcguaaauaaacaagaaggacaaucacuauacguaaaaggcgaaccaauaauaaacuucuacgacccccucgucuucccuucagaugaauuugacgcaagcaucucacaaguuaaugaaaaaauaaaucaauccuuagcauucauacgaaaaucagacgaacuauuacacaacguaaacguaggaaaaucaacgacaaacauaaugauaacaacuaucauuauagucauaauagucauacuacuacuauuaauagccguaggcuuauuccuauacugcaaagcaagaucuacuccaguaacacucucaaaagaccaauuaucuggaauaaauaacauagcauucucuaauuaaggacuaguggaagcauuuuccuggcugauuaaaagaaauuacucagcuauggucaucuguuccuguuagaaggcuaugcagcauauuauauacuaugcgcauguuaugaaaugcauaauaaaaaauuuuaaaaaaucuaaaagaucuaaaaaaaaaaaaaaaaaaaaaaaaaaaaaaaaaaaaaaaaaaaaaaaaaaaaaaaaaaaaaaaaugcaucccccccccccccccccccccccccccccccaaaggcucuuuucagagccaccagaauu

SEQ ID NO: 15680 - RNA, 1952 nt, Artificial Sequence
  mRNA product Design g-1 comprising derived and/or modified sequence from HRSV(Memphis-37)__AIY60640.1__F_DSCav1_mut3 (opt11)
gggagacuuucccauucuguagcagaauuugguguugccuguggucuuggucccgcggagaagcuuaccauggaacuccccauccucaaaaccaacgccauuaccacgauccucgccgcagucacccucugcuucgccuccucacaaaacaucacagaagaauuuuaccaaaguaccugcuccgccgucagcaaaggauaccucggcgcccuccgcaccggcugguacacauccgucauaaccaucgaacucagcaacaucaaagaaaucaaauguaacggaaccgacgccaaaguaaaacuaauaaaacaagaacucgacaaauacaagaacgccgucaccgaccuccaacuccucaugcaaucuacccccgccgccggcucagguagcgccaucugcagcgguauugccgucugcaaaguacuccaccuagaaggagaagucaauaaaaucaaaaacgcccuacucuccaccaacaaggcagucgucagccucuccaacggcgucucagucuuaaccuucaaagugcucgaccucaaaaauuacauagacaaacaacuacuccccauucucaacaaacaauccugcuccauacccaacauagaaaccgucauugaauuucaacagaaaaacaaccgccuccucgaaaucacgcgcgaguucagugucaacgccggcgucaccaccccagucucgacauacaugcucacaaacucagaacuccucucguuaaucaacgacaugccaauaaccaacgaccaaaagaaacuaauguccaacaacguucaaauaguucgccaacaaucauacuccauaaugugcaucaucaaagaagaaguccucgccuacguuguacaauuaccccucuacggcgucaucgacacaccaugcuggaaacuccacacaucgccccucugcaccaccaacaccaaagaaggcagcaacauuugccucacccggacagaccgcggcugguacugcgacaaugcaggcagcgucucauucuucccacaagccgaaaccugcaaaguccaaagcaaccgugucuucugcgacacaaugaacucccuuacccucccaagcgaaguaaaccucugcaauauugacaucuucaaccccaaauacgacugcaaaaucaugaccuccaaaaccgacgucuccucaucagucaucaccucccuuggcgccauugucuccuguuacgguaaaaccaaaugcaccgccuccaacaaaaaccgcggcaucaucaaaaccuucucuaacggcugcgacuacgucucaaacaaaggcgucgacacugucuccgucggcaacacccuauacugcgucaacaagcaagaaggacagucccuauacguaaaaggugaaccaauuaucaacuucuacgacccccuagucuucccauccgacgaguucgaugccuccaucucccaaguaaaugaaaagaucaaucaaagccuggccuucauccgcaaauccgacgaacuacuccacaaugucaacgucggaaaaucaacaacaaacaucaugaucaccaccaucaucaucgucaucauaguaauccuccuacugcucaucgccgucggucucuuccuauacugcaaagcccguucuacuccagucacccucuccaaagaccaacuaucaggaaucaacaacaucgccuucagcaacuaaggacuaguggaagcauuuuccuggcugauuaaaagaaauuacucagcuauggucaucuguuccuguuagaaggcuaugcagcauauuauauacuaugcgcauguuaugaaaugcauaauaaaaaauuuuaaaaaaucuaaaagaucuaaaaaaaaaaaaaaaaaaaaaaaaaaaaaaaaaaaaaaaaaaaaaaaaaaaaaaaaaaaaaaaaugcaucccccccccccccccccccccccccccccccaaaggcucuuuucagagccaccagaauu

SEQ ID NO: 15681 - RNA, 1967 nt, Artificial Sequence
  mRNA product Design g-2 comprising derived and/or modified sequence from HRSV(Memphis-37)__AIY60640.1__F_DSCav1_mut3 (opt1)
gggagaguccgcucagccagguugcagaagcggcuuagcguguguccuaaucuucucucugcguguagguaggccugugccgcaaacaagcuuaccauggagcugcccauccucaagaccaacgccaucaccacgauccuggccgcggugacccugugcuucgccagcucccagaacaucaccgaggaguucuaccagagcacgugcuccgccgucagcaagggcuaccucggcgcccugcgcaccgggugguacaccagcgugaucaccaucgagcuguccaacaucaaggagaucaagugcaacggcaccgacgccaaggugaagcucaucaagcaggagcuggacaaguacaagaacgcggucacggaccugcagcuccugaugcagagcaccccggccgccggcuccgggagcgcgaucugcuccggcaucgccgucugcaaggugcugcaccucgagggcgaggugaacaagaucaagaacgcccugcuguccaccaacaaggccgucgugagccucuccaacggggugagcguccugaccuucaaggugcuggaccucaagaacuacaucgacaagcagcugcugcccauccugaacaagcagagcugcuccauccccaacaucgagaccgucaucgaguuccagcagaagaacaaccgccuccuggagaucacgcgggaguucagcgugaacgcgggcgugaccacccccgucuccaccuacaugcugacgaacagcgagcuccugucccugaucaacgacaugccgaucaccaacgaccagaagaagcucaugagcaacaacgugcagaucgugcgccagcaguccuacagcaucaugugcaucaucaaggaggagguccuggccuacguggugcagcugccccucuacggggucaucgacacccccugcuggaagcugcacaccagcccccugugcacgaccaacaccaaggagggcuccaacaucugccucacccggacggaccgcgggugguacugcgacaacgccggcagcguguccuucuucccgcaggccgagaccugcaagguccagagcaaccggguguucugcgacaccaugaacucccugacccugcccagcgaggugaaccucugcaacaucgacaucuucaaccccaaguacgacugcaagaucaugacguccaagaccgacgucagcuccagcgugaucaccucccugggcgccaucgugagcugcuacgggaagaccaagugcacggcgagcaacaagaaccgcggcaucaucaagaccuucuccaacgggugcgacuacgucagcaacaagggcguggacaccguguccgucggcaacacccuguacugcgugaacaagcaggagggccagagccucuacgugaagggggagcccaucaucaacuucuacgacccgcuggucuuccccuccgacgaguucgacgccagcaucucccaggugaacgagaagaucaaccagagccuggccuucauccggaaguccgacgagcuccugcacaacgugaacgucggcaagagcaccacgaacaucaugaucaccaccaucaucaucgugaucaucgugauccugcugcuccugaucgccgucgggcuguuccucuacugcaaggcccgcuccacccccgugacgcugagcaaggaccagcuguccgggaucaacaacaucgcguucagcaacugaggacuaguaauaaggaaacuguaugaaugucugugggcaggaagugaagagauccuucuguaaagguuuuuggaauuaugucugcugaauaauaaacuuuuuugaaauaauaaaucugguagaaaaaugagaucuaaaaaaaaaaaaaaaaaaaaaaaaaaaaaaaaaaaaaaaaaaaaaaaaaaaaaaaaaaaaaaaaugcaucccccccccccccccccccccccccccccccaaaggcucuuuucagagccaccagaauu

SEQ ID NO: 15682 - RNA, 1967 nt, Artificial Sequence
  mRNA product Design g-2 comprising derived and/or modified sequence from HRSV(Memphis-37)__AIY60640.1__F_DSCav1_mut3 (opt1)
gggagaguccgcucagccagguugcagaagcggcuuagcguguguccuaaucuucucucugcguguagguaggccugugccgcaaacaagcuuaccauggagcugcccauccucaagaccaacgccaucaccacgauccuggccgcggugacccugugcuucgccagcucccagaacaucaccgaggaguucuaccagagcacgugcuccgccgucagcaagggcuaccucggggcccugcgcaccggcugguacaccuccgugaucaccaucgagcugagcaacaucaaggagaucaagugcaacgggaccgacgccaaggugaagcucaucaagcaggagcuggacaaguacaagaacgcggucacggaccugcagcuccugaugcaguccaccccggccgccggcagcggguccgccaucugcagcggcaucgcggugugcaaggugcugcaccucgagggcgaggucaacaagaucaagaacgcccugcuguccaccaacaaggccguggugagccucuccaacggggucagcgugcugaccuucaaggugcuggaccucaagaacuacaucgacaagcagcugcugcccauccucaacaagcaguccugcagcauccccaacaucgagacggucaucgaguuccagcagaagaacaaccggcugcuggagaucacccgcgaguucuccgugaacgccggcgugaccacccccgucagcacguacaugcucaccaacuccgagcugcugagccucaucaacgacaugccgaucaccaacgaccagaagaagcugaugagcaacaacgugcagaucgugcggcagcaguccuacagcaucaugugcaucaucaaggaggagguccuggccuacguggugcagcucccccuguacggggucaucgacacccccugcuggaagcugcacacgagcccccucugcaccaccaacaccaaggagggcuccaacaucugccugacgcgcaccgaccgggggugguacugcgacaacgcgggcuccgugagcuucuucccgcaggccgagaccugcaaggugcaguccaaccgcgucuucugcgacaccaugaacagccugacgcuccccuccgaggugaaccugugcaacaucgacaucuucaaccccaaguacgacugcaagaucaugaccagcaagaccgacgucuccagcuccgugaucaccagccugggcgccaucguguccugcuacgggaagacgaagugcaccgccagcaacaagaaccggggcaucaucaagaccuucuccaacgggugcgacuacgucagcaacaagggcguggacaccguguccgucggcaacacgcucuacugcgugaacaagcaggaggggcagagccuguacgugaagggcgagcccaucaucaacuucuacgacccgcuggucuuccccagcgacgaguucgacgccuccaucagccaggugaacgagaagaucaaccagucccucgcguucauccgcaagagcgacgagcugcugcacaacgugaacgucgggaaguccaccaccaacaucaugaucaccaccaucaucaucgugaucaucgugauccuccugcugcucaucgccgucggccuguuccuguacugcaaggcccggagcacgcccgugacccuguccaaggaccagcucagcgggaucaacaacaucgccuucuccaacugaggacuaguaauaaggaaacuguaugaaugucugugggcaggaagugaagagauccuucuguaaagguuuuuggaauuaugucugcugaauaauaaacuuuuuugaaauaauaaaucugguagaaaaaugagaucuaaaaaaaaaaaaaaaaaaaaaaaaaaaaaaaaaaaaaaaaaaaaaaaaaaaaaaaaaaaaaaaaugcaucccccccccccccccccccccccccccccccaaaggcucuuuucagagccaccagaauu

SEQ ID NO: 15683 - RNA, 1967 nt, Artificial Sequence
  mRNA product Design g-2 comprising derived and/or modified sequence from HRSV(Memphis-37)__AIY60640.1__F_DSCav1_mut3 (opt2)
gggagaguccgcucagccagguugcagaagcggcuuagcguguguccuaaucuucucucugcguguagguaggccugugccgcaaacaagcuuaccauggagcuccccauccucaagaccaacgccaucaccaccauccucgccgccgucacccucugcuucgccuccucccagaacaucaccgaggaguucuaccaguccaccugcuccgccgucuccaagggcuaccucggcgcccuccgcaccggcugguacaccuccgucaucaccaucgagcucuccaacaucaaggagaucaagugcaacggcaccgacgccaaggucaagcucaucaagcaggagcucgacaaguacaagaacgccgucaccgaccuccagcuccucaugcaguccacccccgccgccggcuccggcuccgccaucugcuccggcaucgccgucugcaagguccuccaccucgagggcgaggucaacaagaucaagaacgcccuccucuccaccaacaaggccgucgucucccucuccaacggcgucuccguccucaccuucaagguccucgaccucaagaacuacaucgacaagcagcuccuccccauccucaacaagcaguccugcuccauccccaacaucgagaccgucaucgaguuccagcagaagaacaaccgccuccucgagaucacccgcgaguucuccgucaacgccggcgucaccacccccgucuccaccuacaugcucaccaacuccgagcuccucucccucaucaacgacaugcccaucaccaacgaccagaagaagcucauguccaacaacguccagaucguccgccagcaguccuacuccaucaugugcaucaucaaggaggagguccucgccuacgucguccagcucccccucuacggcgucaucgacacccccugcuggaagcuccacaccuccccccucugcaccaccaacaccaaggagggcuccaacaucugccucacccgcaccgaccgcggcugguacugcgacaacgccggcuccgucuccuucuucccccaggccgagaccugcaagguccaguccaaccgcgucuucugcgacaccaugaacucccucacccuccccuccgaggucaaccucugcaacaucgacaucuucaaccccaaguacgacugcaagaucaugaccuccaagaccgacgucuccuccuccgucaucaccucccucggcgccaucgucuccugcuacggcaagaccaagugcaccgccuccaacaagaaccgcggcaucaucaagaccuucuccaacggcugcgacuacgucuccaacaagggcgucgacaccgucuccgucggcaacacccucuacugcgucaacaagcaggagggccagucccucuacgucaagggcgagcccaucaucaacuucuacgacccccucgucuuccccuccgacgaguucgacgccuccaucucccaggucaacgagaagaucaaccagucccucgccuucauccgcaaguccgacgagcuccuccacaacgucaacgucggcaaguccaccaccaacaucaugaucaccaccaucaucaucgucaucaucgucauccuccuccuccucaucgccgucggccucuuccucuacugcaaggcccgcuccacccccgucacccucuccaaggaccagcucuccggcaucaacaacaucgccuucuccaacugaggacuaguaauaaggaaacuguaugaaugucugugggcaggaagugaagagauccuucuguaaagguuuuuggaauuaugucugcugaauaauaaacuuuuuugaaauaauaaaucugguagaaaaaugagaucuaaaaaaaaaaaaaaaaaaaaaaaaaaaaaaaaaaaaaaaaaaaaaaaaaaaaaaaaaaaaaaaaugcaucccccccccccccccccccccccccccccccaaaggcucuuuucagagccaccagaauu

SEQ ID NO: 15684 - RNA, 1967 nt, Artificial Sequence
  mRNA product Design g-2 comprising derived and/or modified sequence from HRSV(Memphis-37)__AIY60640.1__F_DSCav1_mut3 (opt3)
gggagaguccgcucagccagguugcagaagcggcuuagcguguguccuaaucuucucucugcguguagguaggccugugccgcaaacaagcuuaccauggagcugcccauccucaagaccaacgccauuacaacuauacuugcugcagugacgcugugcuucgccagcucccagaauaucaccgaagaguuuuaccaaucuacauguucagcggucaguaaaggcuauuugggggcuuuaagaacuggaugguacaccagcguuauuacaaucgaacuguccaacauuaaggagaucaaaugcaaugguaccgacgccaaggugaaacuaauaaagcaggaacucgauaaguauaaaaacgcaguaacugaccugcagcuucugaugcagucuacuccugccgcuggcucggggucagcaaucuguagcggaauugccgugugcaaggucuugcaccucgagggcgaggugaauaaaaucaagaacgcucugcugaguaccaauaaagccguugugucccucucuaacggugucagcguguuaacguucaagguacuggaucuuaagaauuacauugacaaacaauugcugccaauccuaaacaagcaguccuguucaauaccgaauauugaaacuguuaucgaguuucagcagaaaaacaauaggcuccuggaaauuacccgggaguucagugugaacgcgggggucacaacucccgugagcaccuauaugcuuacaaauucugagcuguugucccucaucaacgauaugccuaucaccaacgaccaaaagaaacugaugucaaauaacgugcagauuguccgccagcagagcuacaguauaaugugcaucauuaaggaagagguuuuagcauaugugguacaacugccacucuacggagugaucgauacgcccuguuggaaacuucauacuucuccucugugcacaaccaauacuaaggaaggcuccaacauauguuugacacgaaccgaccguggcugguacugcgauaaugccgggagcgucucguuuuucccacaggcugagacguguaaggugcagucuaacagaguuuucugcgacaccaugaacucccuaacacugcccucagaagugaaucucugcaauauugauaucuucaacccuaaauaugacuguaagaucaugacaaguaaaaccgaugucagcuccucugugauuacaagccugggagccaucguaucaugcuacgguaagacuaaauguaccgcaaguaauaagaacaggggcauuauaaagacauuuuccaaugggugcgacuauguuagcaacaaaggaguggacaccgucucugugggcaauacucuuuacugugucaacaagcaagagggucagucacuguaugugaaaggggagccaaucauuaacuucuacgauccguugguuuuucccagugacgaauuugaugcuagcaucucccaggugaaugagaagaucaaccagucucucgccuuuauucggaaaucggacgaacuguuacacaauguaaacgucggaaagagcacgacaaauauaaugaucaccacuauuaucauugugaucauaguuauccugcuacuccugauugcggugggccuuuucuuguauugcaaggcccgcuccaccccugucacacugucaaaagaucaacucaguggcaucaacaauauugcauucucuaacugaggacuaguaauaaggaaacuguaugaaugucugugggcaggaagugaagagauccuucuguaaagguuuuuggaauuaugucugcugaauaauaaacuuuuuugaaauaauaaaucugguagaaaaaugagaucuaaaaaaaaaaaaaaaaaaaaaaaaaaaaaaaaaaaaaaaaaaaaaaaaaaaaaaaaaaaaaaaaugcaucccccccccccccccccccccccccccccccaaaggcucuuuucagagccaccagaauu

SEQ ID NO: 15685 - RNA, 1967 nt, Artificial Sequence
  mRNA product Design g-2 comprising derived and/or modified sequence from HRSV(Memphis-37)__AIY60640.1__F_DSCav1_mut3 (opt4)
gggagaguccgcucagccagguugcagaagcggcuuagcguguguccuaaucuucucucugcguguagguaggccugugccgcaaacaagcuuaccauggagcugcccauccugaagaccaacgccaucaccaccauccuggccgccgugacccugugcuucgccagcagccagaacaucaccgaggaguucuaccagagcaccugcagcgccgugagcaagggcuaccugggcgcccugagaaccggcugguacaccagcgugaucaccaucgagcugagcaacaucaaggagaucaagugcaacggcaccgacgccaaggugaagcugaucaagcaggagcuggacaaguacaagaacgccgugaccgaccugcagcugcugaugcagagcacccccgccgccggcagcggcagcgccaucugcagcggcaucgccgugugcaaggugcugcaccuggagggcgaggugaacaagaucaagaacgcccugcugagcaccaacaaggccguggugagccugagcaacggcgugagcgugcugaccuucaaggugcuggaccugaagaacuacaucgacaagcagcugcugcccauccugaacaagcagagcugcagcauccccaacaucgagaccgugaucgaguuccagcagaagaacaacagacugcuggagaucaccagagaguucagcgugaacgccggcgugaccacccccgugagcaccuacaugcugaccaacagcgagcugcugagccugaucaacgacaugcccaucaccaacgaccagaagaagcugaugagcaacaacgugcagaucgugagacagcagagcuacagcaucaugugcaucaucaaggaggaggugcuggccuacguggugcagcugccccuguacggcgugaucgacacccccugcuggaagcugcacaccagcccccugugcaccaccaacaccaaggagggcagcaacaucugccugaccagaaccgacagaggcugguacugcgacaacgccggcagcgugagcuucuucccccaggccgagaccugcaaggugcagagcaacagaguguucugcgacaccaugaacagccugacccugcccagcgaggugaaccugugcaacaucgacaucuucaaccccaaguacgacugcaagaucaugaccagcaagaccgacgugagcagcagcgugaucaccagccugggcgccaucgugagcugcuacggcaagaccaagugcaccgccagcaacaagaacagaggcaucaucaagaccuucagcaacggcugcgacuacgugagcaacaagggcguggacaccgugagcgugggcaacacccuguacugcgugaacaagcaggagggccagagccuguacgugaagggcgagcccaucaucaacuucuacgacccccugguguuccccagcgacgaguucgacgccagcaucagccaggugaacgagaagaucaaccagagccuggccuucaucagaaagagcgacgagcugcugcacaacgugaacgugggcaagagcaccaccaacaucaugaucaccaccaucaucaucgugaucaucgugauccugcugcugcugaucgccgugggccuguuccuguacugcaaggccagaagcacccccgugacccugagcaaggaccagcugagcggcaucaacaacaucgccuucagcaacugaggacuaguaauaaggaaacuguaugaaugucugugggcaggaagugaagagauccuucuguaaagguuuuuggaauuaugucugcugaauaauaaacuuuuuugaaauaauaaaucugguagaaaaaugagaucuaaaaaaaaaaaaaaaaaaaaaaaaaaaaaaaaaaaaaaaaaaaaaaaaaaaaaaaaaaaaaaaaugcaucccccccccccccccccccccccccccccccaaaggcucuuuucagagccaccagaauu

SEQ ID NO: 15686 - RNA, 1967 nt, Artificial Sequence
  mRNA product Design g-2 comprising derived and/or modified sequence from HRSV(Memphis-37)__AIY60640.1__F_DSCav1_mut3 (opt5)
gggagaguccgcucagccagguugcagaagcggcuuagcguguguccuaaucuucucucugcguguagguaggccugugccgcaaacaagcuuaccauggagcugcccauccucaagaccaacgccauuacaacgauccuggcugccgugacccuuugcuucgcgagcucccagaauauuacagaagaguuuuaccaaucuaccuguagcgcugucuccaaaggcuaucugggggcccucagaacaggaugguacaccucuguuaucacaauugaacugagcaacaucaaggagaucaaaugcaauggcaccgacgccaaggugaaacuuauuaagcaggaacuggauaaguauaaaaacgcugugacggaccuccagcugcugaugcaguccaccccugccgcugggucuggaagcgccaucuguuccggcauugcggucugcaaggugcuccaccuggagggggagguuaauaaaaucaagaacgcccuucugagcacaaauaaagcuguggucucucucuccaacggagugagcguucugaccuucaaggugcuugaucugaagaauuacauugacaaacaacuccugccgauccugaacaagcagucuuguuccauucccaauaucgaaacagucaucgaguuucagcagaaaaacaaucggcuccuggaaauuacccgcgaguucagcgugaacgccggcgugacgacaccugucucuaccuauaugcuuacaaauuccgagcugcucagccugaucaacgauaugcccauuaccaacgaccaaaagaaacuuauguccaauaacguucagaucgugagacagcagucuuacagcauuaugugcaucaucaaggaagaggugcuggcuuaugucgugcaacucccucuguacggcguuauugauacccccuguuggaaacugcauacauccccucucugcacgaccaauacaaaggaagggagcaacaucugucugacccggacagaccgcggaugguacugcgauaaugccggcucuguguccuuuuucccgcaggcggagaccuguaagguccagagcaacagaguguuuugcgacacgaugaacucucuuacacugcccagcgaaguuaaucucugcaauauugauaucuucaacccuaaauaugacuguaagauuaugaccuccaaaaccgaugugucuagcuccgucaucacaagccugggggccaucgugucuugcuacggaaagaccaaauguacagcuuccaauaagaaccggggcauuaucaagacguuuagcaaugggugcgacuaugucucuaacaaaggaguggacaccguuuccgugggcaauacacuuuacugugucaacaagcaagagggccagagccuguaugugaaaggggagcccauuaucaacuucuacgauccucucguuuuucccuccgacgaguucgaugccucuauuagccaggugaaugaaaagaucaaccagucccuggcuuuuauucgcaaaucugacgaacugcuccacaaugucaacgugggaaagagcaccacaaauaucaugaucaccacgauuaucauugugaucauuguuauccugcuucugcucaucgccgucggccuguuccuguauugcaaggccagauccaccccggugacacuuagcaaagaucaacucucugggauuaacaauaucgcuuucuccaacugaggacuaguaauaaggaaacuguaugaaugucugugggcaggaagugaagagauccuucuguaaagguuuuuggaauuaugucugcugaauaauaaacuuuuuugaaauaauaaaucugguagaaaaaugagaucuaaaaaaaaaaaaaaaaaaaaaaaaaaaaaaaaaaaaaaaaaaaaaaaaaaaaaaaaaaaaaaaaugcaucccccccccccccccccccccccccccccccaaaggcucuuuucagagccaccagaauu

SEQ ID NO: 15687 - RNA, 1967 nt, Artificial Sequence
  mRNA product Design g-2 comprising derived and/or modified sequence from HRSV(Memphis-37)__AIY60640.1__F_DSCav1_mut3 (opt6)
gggagaguccgcucagccagguugcagaagcggcuuagcguguguccuaaucuucucucugcguguagguaggccugugccgcaaacaagcuuaccauggaauuaccaauacuaaaaacaaaugccaucaccaccauccuggccgccguaacauuaugcuucgcaaguucacaaaauauaacagaagaauuuuaucaaucaacuugcagcgccguaucaaaaggcuacuuaggcgcacuacguacaggaugguacacaucaguaauaaccauagaacuauccaauauuaaagaaauaaaaugcaauggaacagacgcaaaaguuaaacuaauaaaacaagaauuagacaaauacaaaaacgcaguaaccgaccuucaauuacuaaugcaaucuacccccgcugcagguuccggaucagcaauauguucaggaauugcaguaugcaaaguccuacacuuagaaggagaaguaaacaaaauaaaaaacgcacuauuaagcaccaauaaagcagucguaucauuauccaacggcguuucaguacuaacauuuaaaguacuugaccuaaaaaacuauauagacaaacaacuacuucccauccuuaacaaacaaagcugcucaauaccuaauaucgaaacaguaauagaauuucaacaaaaaaacaaucgauuauuagaaaucacacgagaauuuucugucaacgcaggagucaccacacccguaucuacuuauauguuaaccaacucugaauuauuaucacuaaucaaugacaugccaauaacaaacgaucaaaaaaaauuaaugucaaauaacguacaaauaguaagacaacaaucauacucaauaaugugcauuauaaaagaagaaguacuagccuauguuguacaacucccacucuacggcguaauagacacaccaugcuggaaauuacacacuucaccacuaugcacaacaaacacaaaagaaggaucaaacaucugccuaaccagaaccgauagaggaugguauugcgacaaugccggaucaguuucauucuucccacaagcagaaacaugcaaaguacaauccaacagaguuuucugugacacaaugaacucgcuaacauuacccagcgaaguaaaccucugcaacauagacauauucaacccaaaauacgauugcaaaauaaugacuucuaaaacagauguuuccucaagcgucauaacgaguuuaggagcaauaguaagcuguuacggaaaaaccaaauguaccgcaucaaacaaaaaccgaggaauaauaaaaaccuuuucaaacggaugcgauuacgucuccaacaaaggagucgacacaguaucaguuggcaauacucuuuacugcguaaauaaacaagaaggacaaucacuauacguaaaaggcgaaccaauaauaaacuucuacgacccccucgucuucccuucagaugaauuugacgcaagcaucucacaaguuaaugaaaaaauaaaucaauccuuagcauucauacgaaaaucagacgaacuauuacacaacguaaacguaggaaaaucaacgacaaacauaaugauaacaacuaucauuauagucauaauagucauacuacuacuauuaauagccguaggcuuauuccuauacugcaaagcaagaucuacuccaguaacacucucaaaagaccaauuaucuggaauaaauaacauagcauucucuaauuaaggacuaguaauaaggaaacuguaugaaugucugugggcaggaagugaagagauccuucuguaaagguuuuuggaauuaugucugcugaauaauaaacuuuuuugaaauaauaaaucugguagaaaaaugagaucuaaaaaaaaaaaaaaaaaaaaaaaaaaaaaaaaaaaaaaaaaaaaaaaaaaaaaaaaaaaaaaaaugcaucccccccccccccccccccccccccccccccaaaggcucuuuucagagccaccagaauu

SEQ ID NO: 15688 - RNA, 1967 nt, Artificial Sequence
  mRNA product Design g-2 comprising derived and/or modified sequence from HRSV(Memphis-37)__AIY60640.1__F_DSCav1_mut3 (opt11)
gggagaguccgcucagccagguugcagaagcggcuuagcguguguccuaaucuucucucugcguguagguaggccugugccgcaaacaagcuuaccauggaacuccccauccucaaaaccaacgccauuaccacgauccucgccgcagucacccucugcuucgccuccucacaaaacaucacagaagaauuuuaccaaaguaccugcuccgccgucagcaaaggauaccucggcgcccuccgcaccggcugguacacauccgucauaaccaucgaacucagcaacaucaaagaaaucaaauguaacggaaccgacgccaaaguaaaacuaauaaaacaagaacucgacaaauacaagaacgccgucaccgaccuccaacuccucaugcaaucuacccccgccgccggcucagguagcgccaucugcagcgguauugccgucugcaaaguacuccaccuagaaggagaagucaauaaaaucaaaaacgcccuacucuccaccaacaaggcagucgucagccucuccaacggcgucucagucuuaaccuucaaagugcucgaccucaaaaauuacauagacaaacaacuacuccccauucucaacaaacaauccugcuccauacccaacauagaaaccgucauugaauuucaacagaaaaacaaccgccuccucgaaaucacgcgcgaguucagugucaacgccggcgucaccaccccagucucgacauacaugcucacaaacucagaacuccucucguuaaucaacgacaugccaauaaccaacgaccaaaagaaacuaauguccaacaacguucaaauaguucgccaacaaucauacuccauaaugugcaucaucaaagaagaaguccucgccuacguuguacaauuaccccucuacggcgucaucgacacaccaugcuggaaacuccacacaucgccccucugcaccaccaacaccaaagaaggcagcaacauuugccucacccggacagaccgcggcugguacugcgacaaugcaggcagcgucucauucuucccacaagccgaaaccugcaaaguccaaagcaaccgugucuucugcgacacaaugaacucccuuacccucccaagcgaaguaaaccucugcaauauugacaucuucaaccccaaauacgacugcaaaaucaugaccuccaaaaccgacgucuccucaucagucaucaccucccuuggcgccauugucuccuguuacgguaaaaccaaaugcaccgccuccaacaaaaaccgcggcaucaucaaaaccuucucuaacggcugcgacuacgucucaaacaaaggcgucgacacugucuccgucggcaacacccuauacugcgucaacaagcaagaaggacagucccuauacguaaaaggugaaccaauuaucaacuucuacgacccccuagucuucccauccgacgaguucgaugccuccaucucccaaguaaaugaaaagaucaaucaaagccuggccuucauccgcaaauccgacgaacuacuccacaaugucaacgucggaaaaucaacaacaaacaucaugaucaccaccaucaucaucgucaucauaguaauccuccuacugcucaucgccgucggucucuuccuauacugcaaagcccguucuacuccagucacccucuccaaagaccaacuaucaggaaucaacaacaucgccuucagcaacuaaggacuaguaauaaggaaacuguaugaaugucugugggcaggaagugaagagauccuucuguaaagguuuuuggaauuaugucugcugaauaauaaacuuuuuugaaauaauaaaucugguagaaaaaugagaucuaaaaaaaaaaaaaaaaaaaaaaaaaaaaaaaaaaaaaaaaaaaaaaaaaaaaaaaaaaaaaaaaugcaucccccccccccccccccccccccccccccccaaaggcucuuuucagagccaccagaauu

SEQ ID NO: 15689 - RNA, 2199 nt, Artificial Sequence
  mRNA product Design g-3 comprising derived and/or modified sequence from HRSV(Memphis-37)__AIY60640.1__F_DSCav1_mut3 (opt1)
gggagaguccgcucagccagguugcagaagcggcuuagcguguguccuaaucuucucucugcguguagguaggccugugccgcaaacaagcuuaccauggagcugcccauccucaagaccaacgccaucaccacgauccuggccgcggugacccugugcuucgccagcucccagaacaucaccgaggaguucuaccagagcacgugcuccgccgucagcaagggcuaccucggcgcccugcgcaccgggugguacaccagcgugaucaccaucgagcuguccaacaucaaggagaucaagugcaacggcaccgacgccaaggugaagcucaucaagcaggagcuggacaaguacaagaacgcggucacggaccugcagcuccugaugcagagcaccccggccgccggcuccgggagcgcgaucugcuccggcaucgccgucugcaaggugcugcaccucgagggcgaggugaacaagaucaagaacgcccugcuguccaccaacaaggccgucgugagccucuccaacggggugagcguccugaccuucaaggugcuggaccucaagaacuacaucgacaagcagcugcugcccauccugaacaagcagagcugcuccauccccaacaucgagaccgucaucgaguuccagcagaagaacaaccgccuccuggagaucacgcgggaguucagcgugaacgcgggcgugaccacccccgucuccaccuacaugcugacgaacagcgagcuccugucccugaucaacgacaugccgaucaccaacgaccagaagaagcucaugagcaacaacgugcagaucgugcgccagcaguccuacagcaucaugugcaucaucaaggaggagguccuggccuacguggugcagcugccccucuacggggucaucgacacccccugcuggaagcugcacaccagcccccugugcacgaccaacaccaaggagggcuccaacaucugccucacccggacggaccgcgggugguacugcgacaacgccggcagcguguccuucuucccgcaggccgagaccugcaagguccagagcaaccggguguucugcgacaccaugaacucccugacccugcccagcgaggugaaccucugcaacaucgacaucuucaaccccaaguacgacugcaagaucaugacguccaagaccgacgucagcuccagcgugaucaccucccugggcgccaucgugagcugcuacgggaagaccaagugcacggcgagcaacaagaaccgcggcaucaucaagaccuucuccaacgggugcgacuacgucagcaacaagggcguggacaccguguccgucggcaacacccuguacugcgugaacaagcaggagggccagagccucuacgugaagggggagcccaucaucaacuucuacgacccgcuggucuuccccuccgacgaguucgacgccagcaucucccaggugaacgagaagaucaaccagagccuggccuucauccggaaguccgacgagcuccugcacaacgugaacgucggcaagagcaccacgaacaucaugaucaccaccaucaucaucgugaucaucgugauccugcugcuccugaucgccgucgggcuguuccucuacugcaaggcccgcuccacccccgugacgcugagcaaggaccagcuguccgggaucaacaacaucgcguucagcaacugaggacuagugaagggaacacccaaauuuaauucagccuuaagcacaauuaauuaagagugaaacguaauuguacaagcaguuggucacccaccauagggcaugaucaacaccgcaaccuuuccuuuuucccccagugauucugaaaaaccccucuucccuucagcuugcuuagauguuccaaauuuaguaagcuuaaggcggccuacagaagaaaaagaaaaaaaaggccacaaaaguucccucucacuuucaguaaauaaaauaaaagcagcaacagaaauaaagaaauaaaugaaauucaaaaugaaauaaauauuguguugugcagcauuaaaaaaucaauaaaaauuaaaaaugagcaagaucuaaaaaaaaaaaaaaaaaaaaaaaaaaaaaaaaaaaaaaaaaaaaaaaaaaaaaaaaaaaaaaaaugcaucccccccccccccccccccccccccccccccaaaggcucuuuucagagccaccagaauu

SEQ ID NO: 15690 - RNA, 2199 nt, Artificial Sequence
  mRNA product Design g-3 comprising derived and/or modified sequence from HRSV(Memphis-37)__AIY60640.1__F_DSCav1_mut3 (opt1)
gggagaguccgcucagccagguugcagaagcggcuuagcguguguccuaaucuucucucugcguguagguaggccugugccgcaaacaagcuuaccauggagcugcccauccucaagaccaacgccaucaccacgauccuggccgcggugacccugugcuucgccagcucccagaacaucaccgaggaguucuaccagagcacgugcuccgccgucagcaagggcuaccucggggcccugcgcaccggcugguacaccuccgugaucaccaucgagcugagcaacaucaaggagaucaagugcaacgggaccgacgccaaggugaagcucaucaagcaggagcuggacaaguacaagaacgcggucacggaccugcagcuccugaugcaguccaccccggccgccggcagcggguccgccaucugcagcggcaucgcggugugcaaggugcugcaccucgagggcgaggucaacaagaucaagaacgcccugcuguccaccaacaaggccguggugagccucuccaacggggucagcgugcugaccuucaaggugcuggaccucaagaacuacaucgacaagcagcugcugcccauccucaacaagcaguccugcagcauccccaacaucgagacggucaucgaguuccagcagaagaacaaccggcugcuggagaucacccgcgaguucuccgugaacgccggcgugaccacccccgucagcacguacaugcucaccaacuccgagcugcugagccucaucaacgacaugccgaucaccaacgaccagaagaagcugaugagcaacaacgugcagaucgugcggcagcaguccuacagcaucaugugcaucaucaaggaggagguccuggccuacguggugcagcucccccuguacggggucaucgacacccccugcuggaagcugcacacgagcccccucugcaccaccaacaccaaggagggcuccaacaucugccugacgcgcaccgaccgggggugguacugcgacaacgcgggcuccgugagcuucuucccgcaggccgagaccugcaaggugcaguccaaccgcgucuucugcgacaccaugaacagccugacgcuccccuccgaggugaaccugugcaacaucgacaucuucaaccccaaguacgacugcaagaucaugaccagcaagaccgacgucuccagcuccgugaucaccagccugggcgccaucguguccugcuacgggaagacgaagugcaccgccagcaacaagaaccggggcaucaucaagaccuucuccaacgggugcgacuacgucagcaacaagggcguggacaccguguccgucggcaacacgcucuacugcgugaacaagcaggaggggcagagccuguacgugaagggcgagcccaucaucaacuucuacgacccgcuggucuuccccagcgacgaguucgacgccuccaucagccaggugaacgagaagaucaaccagucccucgcguucauccgcaagagcgacgagcugcugcacaacgugaacgucgggaaguccaccaccaacaucaugaucaccaccaucaucaucgugaucaucgugauccuccugcugcucaucgccgucggccuguuccuguacugcaaggcccggagcacgcccgugacccuguccaaggaccagcucagcgggaucaacaacaucgccuucuccaacugaggacuagugaagggaacacccaaauuuaauucagccuuaagcacaauuaauuaagagugaaacguaauuguacaagcaguuggucacccaccauagggcaugaucaacaccgcaaccuuuccuuuuucccccagugauucugaaaaaccccucuucccuucagcuugcuuagauguuccaaauuuaguaagcuuaaggcggccuacagaagaaaaagaaaaaaaaggccacaaaaguucccucucacuuucaguaaauaaaauaaaagcagcaacagaaauaaagaaauaaaugaaauucaaaaugaaauaaauauuguguugugcagcauuaaaaaaucaauaaaaauuaaaaaugagcaagaucuaaaaaaaaaaaaaaaaaaaaaaaaaaaaaaaaaaaaaaaaaaaaaaaaaaaaaaaaaaaaaaaaugcaucccccccccccccccccccccccccccccccaaaggcucuuuucagagccaccagaauu

SEQ ID NO: 15691 - RNA, 2199 nt, Artificial Sequence
  mRNA product Design g-3 comprising derived and/or modified sequence from HRSV(Memphis-37)__AIY60640.1__F_DSCav1_mut3 (opt2)
gggagaguccgcucagccagguugcagaagcggcuuagcguguguccuaaucuucucucugcguguagguaggccugugccgcaaacaagcuuaccauggagcuccccauccucaagaccaacgccaucaccaccauccucgccgccgucacccucugcuucgccuccucccagaacaucaccgaggaguucuaccaguccaccugcuccgccgucuccaagggcuaccucggcgcccuccgcaccggcugguacaccuccgucaucaccaucgagcucuccaacaucaaggagaucaagugcaacggcaccgacgccaaggucaagcucaucaagcaggagcucgacaaguacaagaacgccgucaccgaccuccagcuccucaugcaguccacccccgccgccggcuccggcuccgccaucugcuccggcaucgccgucugcaagguccuccaccucgagggcgaggucaacaagaucaagaacgcccuccucuccaccaacaaggccgucgucucccucuccaacggcgucuccguccucaccuucaagguccucgaccucaagaacuacaucgacaagcagcuccuccccauccucaacaagcaguccugcuccauccccaacaucgagaccgucaucgaguuccagcagaagaacaaccgccuccucgagaucacccgcgaguucuccgucaacgccggcgucaccacccccgucuccaccuacaugcucaccaacuccgagcuccucucccucaucaacgacaugcccaucaccaacgaccagaagaagcucauguccaacaacguccagaucguccgccagcaguccuacuccaucaugugcaucaucaaggaggagguccucgccuacgucguccagcucccccucuacggcgucaucgacacccccugcuggaagcuccacaccuccccccucugcaccaccaacaccaaggagggcuccaacaucugccucacccgcaccgaccgcggcugguacugcgacaacgccggcuccgucuccuucuucccccaggccgagaccugcaagguccaguccaaccgcgucuucugcgacaccaugaacucccucacccuccccuccgaggucaaccucugcaacaucgacaucuucaaccccaaguacgacugcaagaucaugaccuccaagaccgacgucuccuccuccgucaucaccucccucggcgccaucgucuccugcuacggcaagaccaagugcaccgccuccaacaagaaccgcggcaucaucaagaccuucuccaacggcugcgacuacgucuccaacaagggcgucgacaccgucuccgucggcaacacccucuacugcgucaacaagcaggagggccagucccucuacgucaagggcgagcccaucaucaacuucuacgacccccucgucuuccccuccgacgaguucgacgccuccaucucccaggucaacgagaagaucaaccagucccucgccuucauccgcaaguccgacgagcuccuccacaacgucaacgucggcaaguccaccaccaacaucaugaucaccaccaucaucaucgucaucaucgucauccuccuccuccucaucgccgucggccucuuccucuacugcaaggcccgcuccacccccgucacccucuccaaggaccagcucuccggcaucaacaacaucgccuucuccaacugaggacuagugaagggaacacccaaauuuaauucagccuuaagcacaauuaauuaagagugaaacguaauuguacaagcaguuggucacccaccauagggcaugaucaacaccgcaaccuuuccuuuuucccccagugauucugaaaaaccccucuucccuucagcuugcuuagauguuccaaauuuaguaagcuuaaggcggccuacagaagaaaaagaaaaaaaaggccacaaaaguucccucucacuuucaguaaauaaaauaaaagcagcaacagaaauaaagaaauaaaugaaauucaaaaugaaauaaauauuguguugugcagcauuaaaaaaucaauaaaaauuaaaaaugagcaagaucuaaaaaaaaaaaaaaaaaaaaaaaaaaaaaaaaaaaaaaaaaaaaaaaaaaaaaaaaaaaaaaaaugcaucccccccccccccccccccccccccccccccaaaggcucuuuucagagccaccagaauu

SEQ ID NO: 15692 - RNA, 2199 nt, Artificial Sequence
  mRNA product Design g-3 comprising derived and/or modified sequence from HRSV(Memphis-37)__AIY60640.1__F_DSCav1_mut3 (opt3)
gggagaguccgcucagccagguugcagaagcggcuuagcguguguccuaaucuucucucugcguguagguaggccugugccgcaaacaagcuuaccauggagcugcccauccucaagaccaacgccauuacaacuauacuugcugcagugacgcugugcuucgccagcucccagaauaucaccgaagaguuuuaccaaucuacauguucagcggucaguaaaggcuauuugggggcuuuaagaacuggaugguacaccagcguuauuacaaucgaacuguccaacauuaaggagaucaaaugcaaugguaccgacgccaaggugaaacuaauaaagcaggaacucgauaaguauaaaaacgcaguaacugaccugcagcuucugaugcagucuacuccugccgcuggcucggggucagcaaucuguagcggaauugccgugugcaaggucuugcaccucgagggcgaggugaauaaaaucaagaacgcucugcugaguaccaauaaagccguugugucccucucuaacggugucagcguguuaacguucaagguacuggaucuuaagaauuacauugacaaacaauugcugccaauccuaaacaagcaguccuguucaauaccgaauauugaaacuguuaucgaguuucagcagaaaaacaauaggcuccuggaaauuacccgggaguucagugugaacgcgggggucacaacucccgugagcaccuauaugcuuacaaauucugagcuguugucccucaucaacgauaugccuaucaccaacgaccaaaagaaacugaugucaaauaacgugcagauuguccgccagcagagcuacaguauaaugugcaucauuaaggaagagguuuuagcauaugugguacaacugccacucuacggagugaucgauacgcccuguuggaaacuucauacuucuccucugugcacaaccaauacuaaggaaggcuccaacauauguuugacacgaaccgaccguggcugguacugcgauaaugccgggagcgucucguuuuucccacaggcugagacguguaaggugcagucuaacagaguuuucugcgacaccaugaacucccuaacacugcccucagaagugaaucucugcaauauugauaucuucaacccuaaauaugacuguaagaucaugacaaguaaaaccgaugucagcuccucugugauuacaagccugggagccaucguaucaugcuacgguaagacuaaauguaccgcaaguaauaagaacaggggcauuauaaagacauuuuccaaugggugcgacuauguuagcaacaaaggaguggacaccgucucugugggcaauacucuuuacugugucaacaagcaagagggucagucacuguaugugaaaggggagccaaucauuaacuucuacgauccguugguuuuucccagugacgaauuugaugcuagcaucucccaggugaaugagaagaucaaccagucucucgccuuuauucggaaaucggacgaacuguuacacaauguaaacgucggaaagagcacgacaaauauaaugaucaccacuauuaucauugugaucauaguuauccugcuacuccugauugcggugggccuuuucuuguauugcaaggcccgcuccaccccugucacacugucaaaagaucaacucaguggcaucaacaauauugcauucucuaacugaggacuagugaagggaacacccaaauuuaauucagccuuaagcacaauuaauuaagagugaaacguaauuguacaagcaguuggucacccaccauagggcaugaucaacaccgcaaccuuuccuuuuucccccagugauucugaaaaaccccucuucccuucagcuugcuuagauguuccaaauuuaguaagcuuaaggcggccuacagaagaaaaagaaaaaaaaggccacaaaaguucccucucacuuucaguaaauaaaauaaaagcagcaacagaaauaaagaaauaaaugaaauucaaaaugaaauaaauauuguguugugcagcauuaaaaaaucaauaaaaauuaaaaaugagcaagaucuaaaaaaaaaaaaaaaaaaaaaaaaaaaaaaaaaaaaaaaaaaaaaaaaaaaaaaaaaaaaaaaaugcaucccccccccccccccccccccccccccccccaaaggcucuuuucagagccaccagaauu

SEQ ID NO: 15693 - RNA, 2199 nt, Artificial Sequence
  mRNA product Design g-3 comprising derived and/or modified sequence from HRSV(Memphis-37)__AIY60640.1__F_DSCav1_mut3 (opt4)
gggagaguccgcucagccagguugcagaagcggcuuagcguguguccuaaucuucucucugcguguagguaggccugugccgcaaacaagcuuaccauggagcugcccauccugaagaccaacgccaucaccaccauccuggccgccgugacccugugcuucgccagcagccagaacaucaccgaggaguucuaccagagcaccugcagcgccgugagcaagggcuaccugggcgcccugagaaccggcugguacaccagcgugaucaccaucgagcugagcaacaucaaggagaucaagugcaacggcaccgacgccaaggugaagcugaucaagcaggagcuggacaaguacaagaacgccgugaccgaccugcagcugcugaugcagagcacccccgccgccggcagcggcagcgccaucugcagcggcaucgccgugugcaaggugcugcaccuggagggcgaggugaacaagaucaagaacgcccugcugagcaccaacaaggccguggugagccugagcaacggcgugagcgugcugaccuucaaggugcuggaccugaagaacuacaucgacaagcagcugcugcccauccugaacaagcagagcugcagcauccccaacaucgagaccgugaucgaguuccagcagaagaacaacagacugcuggagaucaccagagaguucagcgugaacgccggcgugaccacccccgugagcaccuacaugcugaccaacagcgagcugcugagccugaucaacgacaugcccaucaccaacgaccagaagaagcugaugagcaacaacgugcagaucgugagacagcagagcuacagcaucaugugcaucaucaaggaggaggugcuggccuacguggugcagcugccccuguacggcgugaucgacacccccugcuggaagcugcacaccagcccccugugcaccaccaacaccaaggagggcagcaacaucugccugaccagaaccgacagaggcugguacugcgacaacgccggcagcgugagcuucuucccccaggccgagaccugcaaggugcagagcaacagaguguucugcgacaccaugaacagccugacccugcccagcgaggugaaccugugcaacaucgacaucuucaaccccaaguacgacugcaagaucaugaccagcaagaccgacgugagcagcagcgugaucaccagccugggcgccaucgugagcugcuacggcaagaccaagugcaccgccagcaacaagaacagaggcaucaucaagaccuucagcaacggcugcgacuacgugagcaacaagggcguggacaccgugagcgugggcaacacccuguacugcgugaacaagcaggagggccagagccuguacgugaagggcgagcccaucaucaacuucuacgacccccugguguuccccagcgacgaguucgacgccagcaucagccaggugaacgagaagaucaaccagagccuggccuucaucagaaagagcgacgagcugcugcacaacgugaacgugggcaagagcaccaccaacaucaugaucaccaccaucaucaucgugaucaucgugauccugcugcugcugaucgccgugggccuguuccuguacugcaaggccagaagcacccccgugacccugagcaaggaccagcugagcggcaucaacaacaucgccuucagcaacugaggacuagugaagggaacacccaaauuuaauucagccuuaagcacaauuaauuaagagugaaacguaauuguacaagcaguuggucacccaccauagggcaugaucaacaccgcaaccuuuccuuuuucccccagugauucugaaaaaccccucuucccuucagcuugcuuagauguuccaaauuuaguaagcuuaaggcggccuacagaagaaaaagaaaaaaaaggccacaaaaguucccucucacuuucaguaaauaaaauaaaagcagcaacagaaauaaagaaauaaaugaaauucaaaaugaaauaaauauuguguugugcagcauuaaaaaaucaauaaaaauuaaaaaugagcaagaucuaaaaaaaaaaaaaaaaaaaaaaaaaaaaaaaaaaaaaaaaaaaaaaaaaaaaaaaaaaaaaaaaugcaucccccccccccccccccccccccccccccccaaaggcucuuuucagagccaccagaauu

SEQ ID NO: 15694 - RNA, 2199 nt, Artificial Sequence
  mRNA product Design g-3 comprising derived and/or modified sequence from HRSV(Memphis-37)__AIY60640.1__F_DSCav1_mut3 (opt5)
gggagaguccgcucagccagguugcagaagcggcuuagcguguguccuaaucuucucucugcguguagguaggccugugccgcaaacaagcuuaccauggagcugcccauccucaagaccaacgccauuacaacgauccuggcugccgugacccuuugcuucgcgagcucccagaauauuacagaagaguuuuaccaaucuaccuguagcgcugucuccaaaggcuaucugggggcccucagaacaggaugguacaccucuguuaucacaauugaacugagcaacaucaaggagaucaaaugcaauggcaccgacgccaaggugaaacuuauuaagcaggaacuggauaaguauaaaaacgcugugacggaccuccagcugcugaugcaguccaccccugccgcugggucuggaagcgccaucuguuccggcauugcggucugcaaggugcuccaccuggagggggagguuaauaaaaucaagaacgcccuucugagcacaaauaaagcuguggucucucucuccaacggagugagcguucugaccuucaaggugcuugaucugaagaauuacauugacaaacaacuccugccgauccugaacaagcagucuuguuccauucccaauaucgaaacagucaucgaguuucagcagaaaaacaaucggcuccuggaaauuacccgcgaguucagcgugaacgccggcgugacgacaccugucucuaccuauaugcuuacaaauuccgagcugcucagccugaucaacgauaugcccauuaccaacgaccaaaagaaacuuauguccaauaacguucagaucgugagacagcagucuuacagcauuaugugcaucaucaaggaagaggugcuggcuuaugucgugcaacucccucuguacggcguuauugauacccccuguuggaaacugcauacauccccucucugcacgaccaauacaaaggaagggagcaacaucugucugacccggacagaccgcggaugguacugcgauaaugccggcucuguguccuuuuucccgcaggcggagaccuguaagguccagagcaacagaguguuuugcgacacgaugaacucucuuacacugcccagcgaaguuaaucucugcaauauugauaucuucaacccuaaauaugacuguaagauuaugaccuccaaaaccgaugugucuagcuccgucaucacaagccugggggccaucgugucuugcuacggaaagaccaaauguacagcuuccaauaagaaccggggcauuaucaagacguuuagcaaugggugcgacuaugucucuaacaaaggaguggacaccguuuccgugggcaauacacuuuacugugucaacaagcaagagggccagagccuguaugugaaaggggagcccauuaucaacuucuacgauccucucguuuuucccuccgacgaguucgaugccucuauuagccaggugaaugaaaagaucaaccagucccuggcuuuuauucgcaaaucugacgaacugcuccacaaugucaacgugggaaagagcaccacaaauaucaugaucaccacgauuaucauugugaucauuguuauccugcuucugcucaucgccgucggccuguuccuguauugcaaggccagauccaccccggugacacuuagcaaagaucaacucucugggauuaacaauaucgcuuucuccaacugaggacuagugaagggaacacccaaauuuaauucagccuuaagcacaauuaauuaagagugaaacguaauuguacaagcaguuggucacccaccauagggcaugaucaacaccgcaaccuuuccuuuuucccccagugauucugaaaaaccccucuucccuucagcuugcuuagauguuccaaauuuaguaagcuuaaggcggccuacagaagaaaaagaaaaaaaaggccacaaaaguucccucucacuuucaguaaauaaaauaaaagcagcaacagaaauaaagaaauaaaugaaauucaaaaugaaauaaauauuguguugugcagcauuaaaaaaucaauaaaaauuaaaaaugagcaagaucuaaaaaaaaaaaaaaaaaaaaaaaaaaaaaaaaaaaaaaaaaaaaaaaaaaaaaaaaaaaaaaaaugcaucccccccccccccccccccccccccccccccaaaggcucuuuucagagccaccagaauu

SEQ ID NO: 15695 - RNA, 2199 nt, Artificial Sequence
  mRNA product Design g-3 comprising derived and/or modified sequence from HRSV(Memphis-37)__AIY60640.1__F_DSCav1_mut3 (opt6)
gggagaguccgcucagccagguugcagaagcggcuuagcguguguccuaaucuucucucugcguguagguaggccugugccgcaaacaagcuuaccauggaauuaccaauacuaaaaacaaaugccaucaccaccauccuggccgccguaacauuaugcuucgcaaguucacaaaauauaacagaagaauuuuaucaaucaacuugcagcgccguaucaaaaggcuacuuaggcgcacuacguacaggaugguacacaucaguaauaaccauagaacuauccaauauuaaagaaauaaaaugcaauggaacagacgcaaaaguuaaacuaauaaaacaagaauuagacaaauacaaaaacgcaguaaccgaccuucaauuacuaaugcaaucuacccccgcugcagguuccggaucagcaauauguucaggaauugcaguaugcaaaguccuacacuuagaaggagaaguaaacaaaauaaaaaacgcacuauuaagcaccaauaaagcagucguaucauuauccaacggcguuucaguacuaacauuuaaaguacuugaccuaaaaaacuauauagacaaacaacuacuucccauccuuaacaaacaaagcugcucaauaccuaauaucgaaacaguaauagaauuucaacaaaaaaacaaucgauuauuagaaaucacacgagaauuuucugucaacgcaggagucaccacacccguaucuacuuauauguuaaccaacucugaauuauuaucacuaaucaaugacaugccaauaacaaacgaucaaaaaaaauuaaugucaaauaacguacaaauaguaagacaacaaucauacucaauaaugugcauuauaaaagaagaaguacuagccuauguuguacaacucccacucuacggcguaauagacacaccaugcuggaaauuacacacuucaccacuaugcacaacaaacacaaaagaaggaucaaacaucugccuaaccagaaccgauagaggaugguauugcgacaaugccggaucaguuucauucuucccacaagcagaaacaugcaaaguacaauccaacagaguuuucugugacacaaugaacucgcuaacauuacccagcgaaguaaaccucugcaacauagacauauucaacccaaaauacgauugcaaaauaaugacuucuaaaacagauguuuccucaagcgucauaacgaguuuaggagcaauaguaagcuguuacggaaaaaccaaauguaccgcaucaaacaaaaaccgaggaauaauaaaaaccuuuucaaacggaugcgauuacgucuccaacaaaggagucgacacaguaucaguuggcaauacucuuuacugcguaaauaaacaagaaggacaaucacuauacguaaaaggcgaaccaauaauaaacuucuacgacccccucgucuucccuucagaugaauuugacgcaagcaucucacaaguuaaugaaaaaauaaaucaauccuuagcauucauacgaaaaucagacgaacuauuacacaacguaaacguaggaaaaucaacgacaaacauaaugauaacaacuaucauuauagucauaauagucauacuacuacuauuaauagccguaggcuuauuccuauacugcaaagcaagaucuacuccaguaacacucucaaaagaccaauuaucuggaauaaauaacauagcauucucuaauuaaggacuagugaagggaacacccaaauuuaauucagccuuaagcacaauuaauuaagagugaaacguaauuguacaagcaguuggucacccaccauagggcaugaucaacaccgcaaccuuuccuuuuucccccagugauucugaaaaaccccucuucccuucagcuugcuuagauguuccaaauuuaguaagcuuaaggcggccuacagaagaaaaagaaaaaaaaggccacaaaaguucccucucacuuucaguaaauaaaauaaaagcagcaacagaaauaaagaaauaaaugaaauucaaaaugaaauaaauauuguguugugcagcauuaaaaaaucaauaaaaauuaaaaaugagcaagaucuaaaaaaaaaaaaaaaaaaaaaaaaaaaaaaaaaaaaaaaaaaaaaaaaaaaaaaaaaaaaaaaaugcaucccccccccccccccccccccccccccccccaaaggcucuuuucagagccaccagaauu

SEQ ID NO: 15696 - RNA, 2199 nt, Artificial Sequence
  mRNA product Design g-3 comprising derived and/or modified sequence from HRSV(Memphis-37)__AIY60640.1__F_DSCav1_mut3 (opt11)
gggagaguccgcucagccagguugcagaagcggcuuagcguguguccuaaucuucucucugcguguagguaggccugugccgcaaacaagcuuaccauggaacuccccauccucaaaaccaacgccauuaccacgauccucgccgcagucacccucugcuucgccuccucacaaaacaucacagaagaauuuuaccaaaguaccugcuccgccgucagcaaaggauaccucggcgcccuccgcaccggcugguacacauccgucauaaccaucgaacucagcaacaucaaagaaaucaaauguaacggaaccgacgccaaaguaaaacuaauaaaacaagaacucgacaaauacaagaacgccgucaccgaccuccaacuccucaugcaaucuacccccgccgccggcucagguagcgccaucugcagcgguauugccgucugcaaaguacuccaccuagaaggagaagucaauaaaaucaaaaacgcccuacucuccaccaacaaggcagucgucagccucuccaacggcgucucagucuuaaccuucaaagugcucgaccucaaaaauuacauagacaaacaacuacuccccauucucaacaaacaauccugcuccauacccaacauagaaaccgucauugaauuucaacagaaaaacaaccgccuccucgaaaucacgcgcgaguucagugucaacgccggcgucaccaccccagucucgacauacaugcucacaaacucagaacuccucucguuaaucaacgacaugccaauaaccaacgaccaaaagaaacuaauguccaacaacguucaaauaguucgccaacaaucauacuccauaaugugcaucaucaaagaagaaguccucgccuacguuguacaauuaccccucuacggcgucaucgacacaccaugcuggaaacuccacacaucgccccucugcaccaccaacaccaaagaaggcagcaacauuugccucacccggacagaccgcggcugguacugcgacaaugcaggcagcgucucauucuucccacaagccgaaaccugcaaaguccaaagcaaccgugucuucugcgacacaaugaacucccuuacccucccaagcgaaguaaaccucugcaauauugacaucuucaaccccaaauacgacugcaaaaucaugaccuccaaaaccgacgucuccucaucagucaucaccucccuuggcgccauugucuccuguuacgguaaaaccaaaugcaccgccuccaacaaaaaccgcggcaucaucaaaaccuucucuaacggcugcgacuacgucucaaacaaaggcgucgacacugucuccgucggcaacacccuauacugcgucaacaagcaagaaggacagucccuauacguaaaaggugaaccaauuaucaacuucuacgacccccuagucuucccauccgacgaguucgaugccuccaucucccaaguaaaugaaaagaucaaucaaagccuggccuucauccgcaaauccgacgaacuacuccacaaugucaacgucggaaaaucaacaacaaacaucaugaucaccaccaucaucaucgucaucauaguaauccuccuacugcucaucgccgucggucucuuccuauacugcaaagcccguucuacuccagucacccucuccaaagaccaacuaucaggaaucaacaacaucgccuucagcaacuaaggacuagugaagggaacacccaaauuuaauucagccuuaagcacaauuaauuaagagugaaacguaauuguacaagcaguuggucacccaccauagggcaugaucaacaccgcaaccuuuccuuuuucccccagugauucugaaaaaccccucuucccuucagcuugcuuagauguuccaaauuuaguaagcuuaaggcggccuacagaagaaaaagaaaaaaaaggccacaaaaguucccucucacuuucaguaaauaaaauaaaagcagcaacagaaauaaagaaauaaaugaaauucaaaaugaaauaaauauuguguugugcagcauuaaaaaaucaauaaaaauuaaaaaugagcaagaucuaaaaaaaaaaaaaaaaaaaaaaaaaaaaaaaaaaaaaaaaaaaaaaaaaaaaaaaaaaaaaaaaugcaucccccccccccccccccccccccccccccccaaaggcucuuuucagagccaccagaauu

SEQ ID NO: 15697 - RNA, 1994 nt, Artificial Sequence
  mRNA product Design g-4 comprising derived and/or modified sequence from HRSV(Memphis-37)__AIY60640.1__F_DSCav1_mut3 (opt1)
gggagacuccugucgggcggaaguaggaggaguagaguuuaaaaacaguacucuuuuuccgguucgggacguaguugaagcaacgacaagccggauaaccgcucuugagacaggaagcuuaccauggagcugcccauccucaagaccaacgccaucaccacgauccuggccgcggugacccugugcuucgccagcucccagaacaucaccgaggaguucuaccagagcacgugcuccgccgucagcaagggcuaccucggcgcccugcgcaccgggugguacaccagcgugaucaccaucgagcuguccaacaucaaggagaucaagugcaacggcaccgacgccaaggugaagcucaucaagcaggagcuggacaaguacaagaacgcggucacggaccugcagcuccugaugcagagcaccccggccgccggcuccgggagcgcgaucugcuccggcaucgccgucugcaaggugcugcaccucgagggcgaggugaacaagaucaagaacgcccugcuguccaccaacaaggccgucgugagccucuccaacggggugagcguccugaccuucaaggugcuggaccucaagaacuacaucgacaagcagcugcugcccauccugaacaagcagagcugcuccauccccaacaucgagaccgucaucgaguuccagcagaagaacaaccgccuccuggagaucacgcgggaguucagcgugaacgcgggcgugaccacccccgucuccaccuacaugcugacgaacagcgagcuccugucccugaucaacgacaugccgaucaccaacgaccagaagaagcucaugagcaacaacgugcagaucgugcgccagcaguccuacagcaucaugugcaucaucaaggaggagguccuggccuacguggugcagcugccccucuacggggucaucgacacccccugcuggaagcugcacaccagcccccugugcacgaccaacaccaaggagggcuccaacaucugccucacccggacggaccgcgggugguacugcgacaacgccggcagcguguccuucuucccgcaggccgagaccugcaagguccagagcaaccggguguucugcgacaccaugaacucccugacccugcccagcgaggugaaccucugcaacaucgacaucuucaaccccaaguacgacugcaagaucaugacguccaagaccgacgucagcuccagcgugaucaccucccugggcgccaucgugagcugcuacgggaagaccaagugcacggcgagcaacaagaaccgcggcaucaucaagaccuucuccaacgggugcgacuacgucagcaacaagggcguggacaccguguccgucggcaacacccuguacugcgugaacaagcaggagggccagagccucuacgugaagggggagcccaucaucaacuucuacgacccgcuggucuuccccuccgacgaguucgacgccagcaucucccaggugaacgagaagaucaaccagagccuggccuucauccggaaguccgacgagcuccugcacaacgugaacgucggcaagagcaccacgaacaucaugaucaccaccaucaucaucgugaucaucgugauccugcugcuccugaucgccgucgggcuguuccucuacugcaaggcccgcuccacccccgugacgcugagcaaggaccagcuguccgggaucaacaacaucgcguucagcaacugaggacuaguaauaaggaaacuguaugaaugucugugggcaggaagugaagagauccuucuguaaagguuuuuggaauuaugucugcugaauaauaaacuuuuuugaaauaauaaaucugguagaaaaaugagaucuaaaaaaaaaaaaaaaaaaaaaaaaaaaaaaaaaaaaaaaaaaaaaaaaaaaaaaaaaaaaaaaaugcaucccccccccccccccccccccccccccccccaaaggcucuuuucagagccaccagaauu

SEQ ID NO: 15698 - RNA, 1994 nt, Artificial Sequence
  mRNA product Design g-4 comprising derived and/or modified sequence from HRSV(Memphis-37)__AIY60640.1__F_DSCav1_mut3 (opt1)
gggagacuccugucgggcggaaguaggaggaguagaguuuaaaaacaguacucuuuuuccgguucgggacguaguugaagcaacgacaagccggauaaccgcucuugagacaggaagcuuaccauggagcugcccauccucaagaccaacgccaucaccacgauccuggccgcggugacccugugcuucgccagcucccagaacaucaccgaggaguucuaccagagcacgugcuccgccgucagcaagggcuaccucggggcccugcgcaccggcugguacaccuccgugaucaccaucgagcugagcaacaucaaggagaucaagugcaacgggaccgacgccaaggugaagcucaucaagcaggagcuggacaaguacaagaacgcggucacggaccugcagcuccugaugcaguccaccccggccgccggcagcggguccgccaucugcagcggcaucgcggugugcaaggugcugcaccucgagggcgaggucaacaagaucaagaacgcccugcuguccaccaacaaggccguggugagccucuccaacggggucagcgugcugaccuucaaggugcuggaccucaagaacuacaucgacaagcagcugcugcccauccucaacaagcaguccugcagcauccccaacaucgagacggucaucgaguuccagcagaagaacaaccggcugcuggagaucacccgcgaguucuccgugaacgccggcgugaccacccccgucagcacguacaugcucaccaacuccgagcugcugagccucaucaacgacaugccgaucaccaacgaccagaagaagcugaugagcaacaacgugcagaucgugcggcagcaguccuacagcaucaugugcaucaucaaggaggagguccuggccuacguggugcagcucccccuguacggggucaucgacacccccugcuggaagcugcacacgagcccccucugcaccaccaacaccaaggagggcuccaacaucugccugacgcgcaccgaccgggggugguacugcgacaacgcgggcuccgugagcuucuucccgcaggccgagaccugcaaggugcaguccaaccgcgucuucugcgacaccaugaacagccugacgcuccccuccgaggugaaccugugcaacaucgacaucuucaaccccaaguacgacugcaagaucaugaccagcaagaccgacgucuccagcuccgugaucaccagccugggcgccaucguguccugcuacgggaagacgaagugcaccgccagcaacaagaaccggggcaucaucaagaccuucuccaacgggugcgacuacgucagcaacaagggcguggacaccguguccgucggcaacacgcucuacugcgugaacaagcaggaggggcagagccuguacgugaagggcgagcccaucaucaacuucuacgacccgcuggucuuccccagcgacgaguucgacgccuccaucagccaggugaacgagaagaucaaccagucccucgcguucauccgcaagagcgacgagcugcugcacaacgugaacgucgggaaguccaccaccaacaucaugaucaccaccaucaucaucgugaucaucgugauccuccugcugcucaucgccgucggccuguuccuguacugcaaggcccggagcacgcccgugacccuguccaaggaccagcucagcgggaucaacaacaucgccuucuccaacugaggacuaguaauaaggaaacuguaugaaugucugugggcaggaagugaagagauccuucuguaaagguuuuuggaauuaugucugcugaauaauaaacuuuuuugaaauaauaaaucugguagaaaaaugagaucuaaaaaaaaaaaaaaaaaaaaaaaaaaaaaaaaaaaaaaaaaaaaaaaaaaaaaaaaaaaaaaaaugcaucccccccccccccccccccccccccccccccaaaggcucuuuucagagccaccagaauu

SEQ ID NO: 15699 - RNA, 1994 nt, Artificial Sequence
  mRNA product Design g-4 comprising derived and/or modified sequence from HRSV(Memphis-37)__AIY60640.1__F_DSCav1_mut3 (opt2)
gggagacuccugucgggcggaaguaggaggaguagaguuuaaaaacaguacucuuuuuccgguucgggacguaguugaagcaacgacaagccggauaaccgcucuugagacaggaagcuuaccauggagcuccccauccucaagaccaacgccaucaccaccauccucgccgccgucacccucugcuucgccuccucccagaacaucaccgaggaguucuaccaguccaccugcuccgccgucuccaagggcuaccucggcgcccuccgcaccggcugguacaccuccgucaucaccaucgagcucuccaacaucaaggagaucaagugcaacggcaccgacgccaaggucaagcucaucaagcaggagcucgacaaguacaagaacgccgucaccgaccuccagcuccucaugcaguccacccccgccgccggcuccggcuccgccaucugcuccggcaucgccgucugcaagguccuccaccucgagggcgaggucaacaagaucaagaacgcccuccucuccaccaacaaggccgucgucucccucuccaacggcgucuccguccucaccuucaagguccucgaccucaagaacuacaucgacaagcagcuccuccccauccucaacaagcaguccugcuccauccccaacaucgagaccgucaucgaguuccagcagaagaacaaccgccuccucgagaucacccgcgaguucuccgucaacgccggcgucaccacccccgucuccaccuacaugcucaccaacuccgagcuccucucccucaucaacgacaugcccaucaccaacgaccagaagaagcucauguccaacaacguccagaucguccgccagcaguccuacuccaucaugugcaucaucaaggaggagguccucgccuacgucguccagcucccccucuacggcgucaucgacacccccugcuggaagcuccacaccuccccccucugcaccaccaacaccaaggagggcuccaacaucugccucacccgcaccgaccgcggcugguacugcgacaacgccggcuccgucuccuucuucccccaggccgagaccugcaagguccaguccaaccgcgucuucugcgacaccaugaacucccucacccuccccuccgaggucaaccucugcaacaucgacaucuucaaccccaaguacgacugcaagaucaugaccuccaagaccgacgucuccuccuccgucaucaccucccucggcgccaucgucuccugcuacggcaagaccaagugcaccgccuccaacaagaaccgcggcaucaucaagaccuucuccaacggcugcgacuacgucuccaacaagggcgucgacaccgucuccgucggcaacacccucuacugcgucaacaagcaggagggccagucccucuacgucaagggcgagcccaucaucaacuucuacgacccccucgucuuccccuccgacgaguucgacgccuccaucucccaggucaacgagaagaucaaccagucccucgccuucauccgcaaguccgacgagcuccuccacaacgucaacgucggcaaguccaccaccaacaucaugaucaccaccaucaucaucgucaucaucgucauccuccuccuccucaucgccgucggccucuuccucuacugcaaggcccgcuccacccccgucacccucuccaaggaccagcucuccggcaucaacaacaucgccuucuccaacugaggacuaguaauaaggaaacuguaugaaugucugugggcaggaagugaagagauccuucuguaaagguuuuuggaauuaugucugcugaauaauaaacuuuuuugaaauaauaaaucugguagaaaaaugagaucuaaaaaaaaaaaaaaaaaaaaaaaaaaaaaaaaaaaaaaaaaaaaaaaaaaaaaaaaaaaaaaaaugcaucccccccccccccccccccccccccccccccaaaggcucuuuucagagccaccagaauu

SEQ ID NO: 15700 - RNA, 1994 nt, Artificial Sequence
  mRNA product Design g-4 comprising derived and/or modified sequence from HRSV(Memphis-37)__AIY60640.1__F_DSCav1_mut3 (opt3)
gggagacuccugucgggcggaaguaggaggaguagaguuuaaaaacaguacucuuuuuccgguucgggacguaguugaagcaacgacaagccggauaaccgcucuugagacaggaagcuuaccauggagcugcccauccucaagaccaacgccauuacaacuauacuugcugcagugacgcugugcuucgccagcucccagaauaucaccgaagaguuuuaccaaucuacauguucagcggucaguaaaggcuauuugggggcuuuaagaacuggaugguacaccagcguuauuacaaucgaacuguccaacauuaaggagaucaaaugcaaugguaccgacgccaaggugaaacuaauaaagcaggaacucgauaaguauaaaaacgcaguaacugaccugcagcuucugaugcagucuacuccugccgcuggcucggggucagcaaucuguagcggaauugccgugugcaaggucuugcaccucgagggcgaggugaauaaaaucaagaacgcucugcugaguaccaauaaagccguugugucccucucuaacggugucagcguguuaacguucaagguacuggaucuuaagaauuacauugacaaacaauugcugccaauccuaaacaagcaguccuguucaauaccgaauauugaaacuguuaucgaguuucagcagaaaaacaauaggcuccuggaaauuacccgggaguucagugugaacgcgggggucacaacucccgugagcaccuauaugcuuacaaauucugagcuguugucccucaucaacgauaugccuaucaccaacgaccaaaagaaacugaugucaaauaacgugcagauuguccgccagcagagcuacaguauaaugugcaucauuaaggaagagguuuuagcauaugugguacaacugccacucuacggagugaucgauacgcccuguuggaaacuucauacuucuccucugugcacaaccaauacuaaggaaggcuccaacauauguuugacacgaaccgaccguggcugguacugcgauaaugccgggagcgucucguuuuucccacaggcugagacguguaaggugcagucuaacagaguuuucugcgacaccaugaacucccuaacacugcccucagaagugaaucucugcaauauugauaucuucaacccuaaauaugacuguaagaucaugacaaguaaaaccgaugucagcuccucugugauuacaagccugggagccaucguaucaugcuacgguaagacuaaauguaccgcaaguaauaagaacaggggcauuauaaagacauuuuccaaugggugcgacuauguuagcaacaaaggaguggacaccgucucugugggcaauacucuuuacugugucaacaagcaagagggucagucacuguaugugaaaggggagccaaucauuaacuucuacgauccguugguuuuucccagugacgaauuugaugcuagcaucucccaggugaaugagaagaucaaccagucucucgccuuuauucggaaaucggacgaacuguuacacaauguaaacgucggaaagagcacgacaaauauaaugaucaccacuauuaucauugugaucauaguuauccugcuacuccugauugcggugggccuuuucuuguauugcaaggcccgcuccaccccugucacacugucaaaagaucaacucaguggcaucaacaauauugcauucucuaacugaggacuaguaauaaggaaacuguaugaaugucugugggcaggaagugaagagauccuucuguaaagguuuuuggaauuaugucugcugaauaauaaacuuuuuugaaauaauaaaucugguagaaaaaugagaucuaaaaaaaaaaaaaaaaaaaaaaaaaaaaaaaaaaaaaaaaaaaaaaaaaaaaaaaaaaaaaaaaugcaucccccccccccccccccccccccccccccccaaaggcucuuuucagagccaccagaauu

SEQ ID NO: 15701 - RNA, 1994 nt, Artificial Sequence
  mRNA product Design g-4 comprising derived and/or modified sequence from HRSV(Memphis-37)__AIY60640.1__F_DSCav1_mut3 (opt4)
gggagacuccugucgggcggaaguaggaggaguagaguuuaaaaacaguacucuuuuuccgguucgggacguaguugaagcaacgacaagccggauaaccgcucuugagacaggaagcuuaccauggagcugcccauccugaagaccaacgccaucaccaccauccuggccgccgugacccugugcuucgccagcagccagaacaucaccgaggaguucuaccagagcaccugcagcgccgugagcaagggcuaccugggcgcccugagaaccggcugguacaccagcgugaucaccaucgagcugagcaacaucaaggagaucaagugcaacggcaccgacgccaaggugaagcugaucaagcaggagcuggacaaguacaagaacgccgugaccgaccugcagcugcugaugcagagcacccccgccgccggcagcggcagcgccaucugcagcggcaucgccgugugcaaggugcugcaccuggagggcgaggugaacaagaucaagaacgcccugcugagcaccaacaaggccguggugagccugagcaacggcgugagcgugcugaccuucaaggugcuggaccugaagaacuacaucgacaagcagcugcugcccauccugaacaagcagagcugcagcauccccaacaucgagaccgugaucgaguuccagcagaagaacaacagacugcuggagaucaccagagaguucagcgugaacgccggcgugaccacccccgugagcaccuacaugcugaccaacagcgagcugcugagccugaucaacgacaugcccaucaccaacgaccagaagaagcugaugagcaacaacgugcagaucgugagacagcagagcuacagcaucaugugcaucaucaaggaggaggugcuggccuacguggugcagcugccccuguacggcgugaucgacacccccugcuggaagcugcacaccagcccccugugcaccaccaacaccaaggagggcagcaacaucugccugaccagaaccgacagaggcugguacugcgacaacgccggcagcgugagcuucuucccccaggccgagaccugcaaggugcagagcaacagaguguucugcgacaccaugaacagccugacccugcccagcgaggugaaccugugcaacaucgacaucuucaaccccaaguacgacugcaagaucaugaccagcaagaccgacgugagcagcagcgugaucaccagccugggcgccaucgugagcugcuacggcaagaccaagugcaccgccagcaacaagaacagaggcaucaucaagaccuucagcaacggcugcgacuacgugagcaacaagggcguggacaccgugagcgugggcaacacccuguacugcgugaacaagcaggagggccagagccuguacgugaagggcgagcccaucaucaacuucuacgacccccugguguuccccagcgacgaguucgacgccagcaucagccaggugaacgagaagaucaaccagagccuggccuucaucagaaagagcgacgagcugcugcacaacgugaacgugggcaagagcaccaccaacaucaugaucaccaccaucaucaucgugaucaucgugauccugcugcugcugaucgccgugggccuguuccuguacugcaaggccagaagcacccccgugacccugagcaaggaccagcugagcggcaucaacaacaucgccuucagcaacugaggacuaguaauaaggaaacuguaugaaugucugugggcaggaagugaagagauccuucuguaaagguuuuuggaauuaugucugcugaauaauaaacuuuuuugaaauaauaaaucugguagaaaaaugagaucuaaaaaaaaaaaaaaaaaaaaaaaaaaaaaaaaaaaaaaaaaaaaaaaaaaaaaaaaaaaaaaaaugcaucccccccccccccccccccccccccccccccaaaggcucuuuucagagccaccagaauu

SEQ ID NO: 15702 - RNA, 1994 nt, Artificial Sequence
  mRNA product Design g-4 comprising derived and/or modified sequence from HRSV(Memphis-37)__AIY60640.1__F_DSCav1_mut3 (opt5)
gggagacuccugucgggcggaaguaggaggaguagaguuuaaaaacaguacucuuuuuccgguucgggacguaguugaagcaacgacaagccggauaaccgcucuugagacaggaagcuuaccauggagcugcccauccucaagaccaacgccauuacaacgauccuggcugccgugacccuuugcuucgcgagcucccagaauauuacagaagaguuuuaccaaucuaccuguagcgcugucuccaaaggcuaucugggggcccucagaacaggaugguacaccucuguuaucacaauugaacugagcaacaucaaggagaucaaaugcaauggcaccgacgccaaggugaaacuuauuaagcaggaacuggauaaguauaaaaacgcugugacggaccuccagcugcugaugcaguccaccccugccgcugggucuggaagcgccaucuguuccggcauugcggucugcaaggugcuccaccuggagggggagguuaauaaaaucaagaacgcccuucugagcacaaauaaagcuguggucucucucuccaacggagugagcguucugaccuucaaggugcuugaucugaagaauuacauugacaaacaacuccugccgauccugaacaagcagucuuguuccauucccaauaucgaaacagucaucgaguuucagcagaaaaacaaucggcuccuggaaauuacccgcgaguucagcgugaacgccggcgugacgacaccugucucuaccuauaugcuuacaaauuccgagcugcucagccugaucaacgauaugcccauuaccaacgaccaaaagaaacuuauguccaauaacguucagaucgugagacagcagucuuacagcauuaugugcaucaucaaggaagaggugcuggcuuaugucgugcaacucccucuguacggcguuauugauacccccuguuggaaacugcauacauccccucucugcacgaccaauacaaaggaagggagcaacaucugucugacccggacagaccgcggaugguacugcgauaaugccggcucuguguccuuuuucccgcaggcggagaccuguaagguccagagcaacagaguguuuugcgacacgaugaacucucuuacacugcccagcgaaguuaaucucugcaauauugauaucuucaacccuaaauaugacuguaagauuaugaccuccaaaaccgaugugucuagcuccgucaucacaagccugggggccaucgugucuugcuacggaaagaccaaauguacagcuuccaauaagaaccggggcauuaucaagacguuuagcaaugggugcgacuaugucucuaacaaaggaguggacaccguuuccgugggcaauacacuuuacugugucaacaagcaagagggccagagccuguaugugaaaggggagcccauuaucaacuucuacgauccucucguuuuucccuccgacgaguucgaugccucuauuagccaggugaaugaaaagaucaaccagucccuggcuuuuauucgcaaaucugacgaacugcuccacaaugucaacgugggaaagagcaccacaaauaucaugaucaccacgauuaucauugugaucauuguuauccugcuucugcucaucgccgucggccuguuccuguauugcaaggccagauccaccccggugacacuuagcaaagaucaacucucugggauuaacaauaucgcuuucuccaacugaggacuaguaauaaggaaacuguaugaaugucugugggcaggaagugaagagauccuucuguaaagguuuuuggaauuaugucugcugaauaauaaacuuuuuugaaauaauaaaucugguagaaaaaugagaucuaaaaaaaaaaaaaaaaaaaaaaaaaaaaaaaaaaaaaaaaaaaaaaaaaaaaaaaaaaaaaaaaugcaucccccccccccccccccccccccccccccccaaaggcucuuuucagagccaccagaauu

SEQ ID NO: 15703 - RNA, 1994 nt, Artificial Sequence
  mRNA product Design g-4 comprising derived and/or modified sequence from HRSV(Memphis-37)__AIY60640.1__F_DSCav1_mut3 (opt6)
gggagacuccugucgggcggaaguaggaggaguagaguuuaaaaacaguacucuuuuuccgguucgggacguaguugaagcaacgacaagccggauaaccgcucuugagacaggaagcuuaccauggaauuaccaauacuaaaaacaaaugccaucaccaccauccuggccgccguaacauuaugcuucgcaaguucacaaaauauaacagaagaauuuuaucaaucaacuugcagcgccguaucaaaaggcuacuuaggcgcacuacguacaggaugguacacaucaguaauaaccauagaacuauccaauauuaaagaaauaaaaugcaauggaacagacgcaaaaguuaaacuaauaaaacaagaauuagacaaauacaaaaacgcaguaaccgaccuucaauuacuaaugcaaucuacccccgcugcagguuccggaucagcaauauguucaggaauugcaguaugcaaaguccuacacuuagaaggagaaguaaacaaaauaaaaaacgcacuauuaagcaccaauaaagcagucguaucauuauccaacggcguuucaguacuaacauuuaaaguacuugaccuaaaaaacuauauagacaaacaacuacuucccauccuuaacaaacaaagcugcucaauaccuaauaucgaaacaguaauagaauuucaacaaaaaaacaaucgauuauuagaaaucacacgagaauuuucugucaacgcaggagucaccacacccguaucuacuuauauguuaaccaacucugaauuauuaucacuaaucaaugacaugccaauaacaaacgaucaaaaaaaauuaaugucaaauaacguacaaauaguaagacaacaaucauacucaauaaugugcauuauaaaagaagaaguacuagccuauguuguacaacucccacucuacggcguaauagacacaccaugcuggaaauuacacacuucaccacuaugcacaacaaacacaaaagaaggaucaaacaucugccuaaccagaaccgauagaggaugguauugcgacaaugccggaucaguuucauucuucccacaagcagaaacaugcaaaguacaauccaacagaguuuucugugacacaaugaacucgcuaacauuacccagcgaaguaaaccucugcaacauagacauauucaacccaaaauacgauugcaaaauaaugacuucuaaaacagauguuuccucaagcgucauaacgaguuuaggagcaauaguaagcuguuacggaaaaaccaaauguaccgcaucaaacaaaaaccgaggaauaauaaaaaccuuuucaaacggaugcgauuacgucuccaacaaaggagucgacacaguaucaguuggcaauacucuuuacugcguaaauaaacaagaaggacaaucacuauacguaaaaggcgaaccaauaauaaacuucuacgacccccucgucuucccuucagaugaauuugacgcaagcaucucacaaguuaaugaaaaaauaaaucaauccuuagcauucauacgaaaaucagacgaacuauuacacaacguaaacguaggaaaaucaacgacaaacauaaugauaacaacuaucauuauagucauaauagucauacuacuacuauuaauagccguaggcuuauuccuauacugcaaagcaagaucuacuccaguaacacucucaaaagaccaauuaucuggaauaaauaacauagcauucucuaauuaaggacuaguaauaaggaaacuguaugaaugucugugggcaggaagugaagagauccuucuguaaagguuuuuggaauuaugucugcugaauaauaaacuuuuuugaaauaauaaaucugguagaaaaaugagaucuaaaaaaaaaaaaaaaaaaaaaaaaaaaaaaaaaaaaaaaaaaaaaaaaaaaaaaaaaaaaaaaaugcaucccccccccccccccccccccccccccccccaaaggcucuuuucagagccaccagaauu

SEQ ID NO: 15704 - RNA, 1994 nt, Artificial Sequence
  mRNA product Design g-4 comprising derived and/or modified sequence from HRSV(Memphis-37)__AIY60640.1__F_DSCav1_mut3 (opt11)
gggagacuccugucgggcggaaguaggaggaguagaguuuaaaaacaguacucuuuuuccgguucgggacguaguugaagcaacgacaagccggauaaccgcucuugagacaggaagcuuaccauggaacuccccauccucaaaaccaacgccauuaccacgauccucgccgcagucacccucugcuucgccuccucacaaaacaucacagaagaauuuuaccaaaguaccugcuccgccgucagcaaaggauaccucggcgcccuccgcaccggcugguacacauccgucauaaccaucgaacucagcaacaucaaagaaaucaaauguaacggaaccgacgccaaaguaaaacuaauaaaacaagaacucgacaaauacaagaacgccgucaccgaccuccaacuccucaugcaaucuacccccgccgccggcucagguagcgccaucugcagcgguauugccgucugcaaaguacuccaccuagaaggagaagucaauaaaaucaaaaacgcccuacucuccaccaacaaggcagucgucagccucuccaacggcgucucagucuuaaccuucaaagugcucgaccucaaaaauuacauagacaaacaacuacuccccauucucaacaaacaauccugcuccauacccaacauagaaaccgucauugaauuucaacagaaaaacaaccgccuccucgaaaucacgcgcgaguucagugucaacgccggcgucaccaccccagucucgacauacaugcucacaaacucagaacuccucucguuaaucaacgacaugccaauaaccaacgaccaaaagaaacuaauguccaacaacguucaaauaguucgccaacaaucauacuccauaaugugcaucaucaaagaagaaguccucgccuacguuguacaauuaccccucuacggcgucaucgacacaccaugcuggaaacuccacacaucgccccucugcaccaccaacaccaaagaaggcagcaacauuugccucacccggacagaccgcggcugguacugcgacaaugcaggcagcgucucauucuucccacaagccgaaaccugcaaaguccaaagcaaccgugucuucugcgacacaaugaacucccuuacccucccaagcgaaguaaaccucugcaauauugacaucuucaaccccaaauacgacugcaaaaucaugaccuccaaaaccgacgucuccucaucagucaucaccucccuuggcgccauugucuccuguuacgguaaaaccaaaugcaccgccuccaacaaaaaccgcggcaucaucaaaaccuucucuaacggcugcgacuacgucucaaacaaaggcgucgacacugucuccgucggcaacacccuauacugcgucaacaagcaagaaggacagucccuauacguaaaaggugaaccaauuaucaacuucuacgacccccuagucuucccauccgacgaguucgaugccuccaucucccaaguaaaugaaaagaucaaucaaagccuggccuucauccgcaaauccgacgaacuacuccacaaugucaacgucggaaaaucaacaacaaacaucaugaucaccaccaucaucaucgucaucauaguaauccuccuacugcucaucgccgucggucucuuccuauacugcaaagcccguucuacuccagucacccucuccaaagaccaacuaucaggaaucaacaacaucgccuucagcaacuaaggacuaguaauaaggaaacuguaugaaugucugugggcaggaagugaagagauccuucuguaaagguuuuuggaauuaugucugcugaauaauaaacuuuuuugaaauaauaaaucugguagaaaaaugagaucuaaaaaaaaaaaaaaaaaaaaaaaaaaaaaaaaaaaaaaaaaaaaaaaaaaaaaaaaaaaaaaaaugcaucccccccccccccccccccccccccccccccaaaggcucuuuucagagccaccagaauu

SEQ ID NO: 15705 - RNA, 1970 nt, Artificial Sequence
  mRNA product Design g-5 comprising derived and/or modified sequence from HRSV(Memphis-37)__AIY60640.1__F_DSCav1_mut3 (opt1)
gggagacccgugacccggaaguuguacggcuacgcgacuuucccucccacaaacccucgcgcccuuccuuuccuacuugggcccggcagaaagcuuaccauggagcugcccauccucaagaccaacgccaucaccacgauccuggccgcggugacccugugcuucgccagcucccagaacaucaccgaggaguucuaccagagcacgugcuccgccgucagcaagggcuaccucggcgcccugcgcaccgggugguacaccagcgugaucaccaucgagcuguccaacaucaaggagaucaagugcaacggcaccgacgccaaggugaagcucaucaagcaggagcuggacaaguacaagaacgcggucacggaccugcagcuccugaugcagagcaccccggccgccggcuccgggagcgcgaucugcuccggcaucgccgucugcaaggugcugcaccucgagggcgaggugaacaagaucaagaacgcccugcuguccaccaacaaggccgucgugagccucuccaacggggugagcguccugaccuucaaggugcuggaccucaagaacuacaucgacaagcagcugcugcccauccugaacaagcagagcugcuccauccccaacaucgagaccgucaucgaguuccagcagaagaacaaccgccuccuggagaucacgcgggaguucagcgugaacgcgggcgugaccacccccgucuccaccuacaugcugacgaacagcgagcuccugucccugaucaacgacaugccgaucaccaacgaccagaagaagcucaugagcaacaacgugcagaucgugcgccagcaguccuacagcaucaugugcaucaucaaggaggagguccuggccuacguggugcagcugccccucuacggggucaucgacacccccugcuggaagcugcacaccagcccccugugcacgaccaacaccaaggagggcuccaacaucugccucacccggacggaccgcgggugguacugcgacaacgccggcagcguguccuucuucccgcaggccgagaccugcaagguccagagcaaccggguguucugcgacaccaugaacucccugacccugcccagcgaggugaaccucugcaacaucgacaucuucaaccccaaguacgacugcaagaucaugacguccaagaccgacgucagcuccagcgugaucaccucccugggcgccaucgugagcugcuacgggaagaccaagugcacggcgagcaacaagaaccgcggcaucaucaagaccuucuccaacgggugcgacuacgucagcaacaagggcguggacaccguguccgucggcaacacccuguacugcgugaacaagcaggagggccagagccucuacgugaagggggagcccaucaucaacuucuacgacccgcuggucuuccccuccgacgaguucgacgccagcaucucccaggugaacgagaagaucaaccagagccuggccuucauccggaaguccgacgagcuccugcacaacgugaacgucggcaagagcaccacgaacaucaugaucaccaccaucaucaucgugaucaucgugauccugcugcuccugaucgccgucgggcuguuccucuacugcaaggcccgcuccacccccgugacgcugagcaaggaccagcuguccgggaucaacaacaucgcguucagcaacugaggacuaguaauaaggaaacuguaugaaugucugugggcaggaagugaagagauccuucuguaaagguuuuuggaauuaugucugcugaauaauaaacuuuuuugaaauaauaaaucugguagaaaaaugagaucuaaaaaaaaaaaaaaaaaaaaaaaaaaaaaaaaaaaaaaaaaaaaaaaaaaaaaaaaaaaaaaaaugcaucccccccccccccccccccccccccccccccaaaggcucuuuucagagccaccagaauu

SEQ ID NO: 15706 - RNA, 1970 nt, Artificial Sequence
  mRNA product Design g-5 comprising derived and/or modified sequence from HRSV(Memphis-37)__AIY60640.1__F_DSCav1_mut3 (opt1)
gggagacccgugacccggaaguuguacggcuacgcgacuuucccucccacaaacccucgcgcccuuccuuuccuacuugggcccggcagaaagcuuaccauggagcugcccauccucaagaccaacgccaucaccacgauccuggccgcggugacccugugcuucgccagcucccagaacaucaccgaggaguucuaccagagcacgugcuccgccgucagcaagggcuaccucggggcccugcgcaccggcugguacaccuccgugaucaccaucgagcugagcaacaucaaggagaucaagugcaacgggaccgacgccaaggugaagcucaucaagcaggagcuggacaaguacaagaacgcggucacggaccugcagcuccugaugcaguccaccccggccgccggcagcggguccgccaucugcagcggcaucgcggugugcaaggugcugcaccucgagggcgaggucaacaagaucaagaacgcccugcuguccaccaacaaggccguggugagccucuccaacggggucagcgugcugaccuucaaggugcuggaccucaagaacuacaucgacaagcagcugcugcccauccucaacaagcaguccugcagcauccccaacaucgagacggucaucgaguuccagcagaagaacaaccggcugcuggagaucacccgcgaguucuccgugaacgccggcgugaccacccccgucagcacguacaugcucaccaacuccgagcugcugagccucaucaacgacaugccgaucaccaacgaccagaagaagcugaugagcaacaacgugcagaucgugcggcagcaguccuacagcaucaugugcaucaucaaggaggagguccuggccuacguggugcagcucccccuguacggggucaucgacacccccugcuggaagcugcacacgagcccccucugcaccaccaacaccaaggagggcuccaacaucugccugacgcgcaccgaccgggggugguacugcgacaacgcgggcuccgugagcuucuucccgcaggccgagaccugcaaggugcaguccaaccgcgucuucugcgacaccaugaacagccugacgcuccccuccgaggugaaccugugcaacaucgacaucuucaaccccaaguacgacugcaagaucaugaccagcaagaccgacgucuccagcuccgugaucaccagccugggcgccaucguguccugcuacgggaagacgaagugcaccgccagcaacaagaaccggggcaucaucaagaccuucuccaacgggugcgacuacgucagcaacaagggcguggacaccguguccgucggcaacacgcucuacugcgugaacaagcaggaggggcagagccuguacgugaagggcgagcccaucaucaacuucuacgacccgcuggucuuccccagcgacgaguucgacgccuccaucagccaggugaacgagaagaucaaccagucccucgcguucauccgcaagagcgacgagcugcugcacaacgugaacgucgggaaguccaccaccaacaucaugaucaccaccaucaucaucgugaucaucgugauccuccugcugcucaucgccgucggccuguuccuguacugcaaggcccggagcacgcccgugacccuguccaaggaccagcucagcgggaucaacaacaucgccuucuccaacugaggacuaguaauaaggaaacuguaugaaugucugugggcaggaagugaagagauccuucuguaaagguuuuuggaauuaugucugcugaauaauaaacuuuuuugaaauaauaaaucugguagaaaaaugagaucuaaaaaaaaaaaaaaaaaaaaaaaaaaaaaaaaaaaaaaaaaaaaaaaaaaaaaaaaaaaaaaaaugcaucccccccccccccccccccccccccccccccaaaggcucuuuucagagccaccagaauu

SEQ ID NO: 15707 - RNA, 1970 nt, Artificial Sequence
  mRNA product Design g-5 comprising derived and/or modified sequence from HRSV(Memphis-37)__AIY60640.1__F_DSCav1_mut3 (opt2)
gggagacccgugacccggaaguuguacggcuacgcgacuuucccucccacaaacccucgcgcccuuccuuuccuacuugggcccggcagaaagcuuaccauggagcuccccauccucaagaccaacgccaucaccaccauccucgccgccgucacccucugcuucgccuccucccagaacaucaccgaggaguucuaccaguccaccugcuccgccgucuccaagggcuaccucggcgcccuccgcaccggcugguacaccuccgucaucaccaucgagcucuccaacaucaaggagaucaagugcaacggcaccgacgccaaggucaagcucaucaagcaggagcucgacaaguacaagaacgccgucaccgaccuccagcuccucaugcaguccacccccgccgccggcuccggcuccgccaucugcuccggcaucgccgucugcaagguccuccaccucgagggcgaggucaacaagaucaagaacgcccuccucuccaccaacaaggccgucgucucccucuccaacggcgucuccguccucaccuucaagguccucgaccucaagaacuacaucgacaagcagcuccuccccauccucaacaagcaguccugcuccauccccaacaucgagaccgucaucgaguuccagcagaagaacaaccgccuccucgagaucacccgcgaguucuccgucaacgccggcgucaccacccccgucuccaccuacaugcucaccaacuccgagcuccucucccucaucaacgacaugcccaucaccaacgaccagaagaagcucauguccaacaacguccagaucguccgccagcaguccuacuccaucaugugcaucaucaaggaggagguccucgccuacgucguccagcucccccucuacggcgucaucgacacccccugcuggaagcuccacaccuccccccucugcaccaccaacaccaaggagggcuccaacaucugccucacccgcaccgaccgcggcugguacugcgacaacgccggcuccgucuccuucuucccccaggccgagaccugcaagguccaguccaaccgcgucuucugcgacaccaugaacucccucacccuccccuccgaggucaaccucugcaacaucgacaucuucaaccccaaguacgacugcaagaucaugaccuccaagaccgacgucuccuccuccgucaucaccucccucggcgccaucgucuccugcuacggcaagaccaagugcaccgccuccaacaagaaccgcggcaucaucaagaccuucuccaacggcugcgacuacgucuccaacaagggcgucgacaccgucuccgucggcaacacccucuacugcgucaacaagcaggagggccagucccucuacgucaagggcgagcccaucaucaacuucuacgacccccucgucuuccccuccgacgaguucgacgccuccaucucccaggucaacgagaagaucaaccagucccucgccuucauccgcaaguccgacgagcuccuccacaacgucaacgucggcaaguccaccaccaacaucaugaucaccaccaucaucaucgucaucaucgucauccuccuccuccucaucgccgucggccucuuccucuacugcaaggcccgcuccacccccgucacccucuccaaggaccagcucuccggcaucaacaacaucgccuucuccaacugaggacuaguaauaaggaaacuguaugaaugucugugggcaggaagugaagagauccuucuguaaagguuuuuggaauuaugucugcugaauaauaaacuuuuuugaaauaauaaaucugguagaaaaaugagaucuaaaaaaaaaaaaaaaaaaaaaaaaaaaaaaaaaaaaaaaaaaaaaaaaaaaaaaaaaaaaaaaaugcaucccccccccccccccccccccccccccccccaaaggcucuuuucagagccaccagaauu

SEQ ID NO: 15708 - RNA, 1970 nt, Artificial Sequence
  mRNA product Design g-5 comprising derived and/or modified sequence from HRSV(Memphis-37)__AIY60640.1__F_DSCav1_mut3 (opt3)
gggagacccgugacccggaaguuguacggcuacgcgacuuucccucccacaaacccucgcgcccuuccuuuccuacuugggcccggcagaaagcuuaccauggagcugcccauccucaagaccaacgccauuacaacuauacuugcugcagugacgcugugcuucgccagcucccagaauaucaccgaagaguuuuaccaaucuacauguucagcggucaguaaaggcuauuugggggcuuuaagaacuggaugguacaccagcguuauuacaaucgaacuguccaacauuaaggagaucaaaugcaaugguaccgacgccaaggugaaacuaauaaagcaggaacucgauaaguauaaaaacgcaguaacugaccugcagcuucugaugcagucuacuccugccgcuggcucggggucagcaaucuguagcggaauugccgugugcaaggucuugcaccucgagggcgaggugaauaaaaucaagaacgcucugcugaguaccaauaaagccguugugucccucucuaacggugucagcguguuaacguucaagguacuggaucuuaagaauuacauugacaaacaauugcugccaauccuaaacaagcaguccuguucaauaccgaauauugaaacuguuaucgaguuucagcagaaaaacaauaggcuccuggaaauuacccgggaguucagugugaacgcgggggucacaacucccgugagcaccuauaugcuuacaaauucugagcuguugucccucaucaacgauaugccuaucaccaacgaccaaaagaaacugaugucaaauaacgugcagauuguccgccagcagagcuacaguauaaugugcaucauuaaggaagagguuuuagcauaugugguacaacugccacucuacggagugaucgauacgcccuguuggaaacuucauacuucuccucugugcacaaccaauacuaaggaaggcuccaacauauguuugacacgaaccgaccguggcugguacugcgauaaugccgggagcgucucguuuuucccacaggcugagacguguaaggugcagucuaacagaguuuucugcgacaccaugaacucccuaacacugcccucagaagugaaucucugcaauauugauaucuucaacccuaaauaugacuguaagaucaugacaaguaaaaccgaugucagcuccucugugauuacaagccugggagccaucguaucaugcuacgguaagacuaaauguaccgcaaguaauaagaacaggggcauuauaaagacauuuuccaaugggugcgacuauguuagcaacaaaggaguggacaccgucucugugggcaauacucuuuacugugucaacaagcaagagggucagucacuguaugugaaaggggagccaaucauuaacuucuacgauccguugguuuuucccagugacgaauuugaugcuagcaucucccaggugaaugagaagaucaaccagucucucgccuuuauucggaaaucggacgaacuguuacacaauguaaacgucggaaagagcacgacaaauauaaugaucaccacuauuaucauugugaucauaguuauccugcuacuccugauugcggugggccuuuucuuguauugcaaggcccgcuccaccccugucacacugucaaaagaucaacucaguggcaucaacaauauugcauucucuaacugaggacuaguaauaaggaaacuguaugaaugucugugggcaggaagugaagagauccuucuguaaagguuuuuggaauuaugucugcugaauaauaaacuuuuuugaaauaauaaaucugguagaaaaaugagaucuaaaaaaaaaaaaaaaaaaaaaaaaaaaaaaaaaaaaaaaaaaaaaaaaaaaaaaaaaaaaaaaaugcaucccccccccccccccccccccccccccccccaaaggcucuuuucagagccaccagaauu

SEQ ID NO: 15709 - RNA, 1970 nt, Artificial Sequence
  mRNA product Design g-5 comprising derived and/or modified sequence from HRSV(Memphis-37)__AIY60640.1__F_DSCav1_mut3 (opt4)
gggagacccgugacccggaaguuguacggcuacgcgacuuucccucccacaaacccucgcgcccuuccuuuccuacuugggcccggcagaaagcuuaccauggagcugcccauccugaagaccaacgccaucaccaccauccuggccgccgugacccugugcuucgccagcagccagaacaucaccgaggaguucuaccagagcaccugcagcgccgugagcaagggcuaccugggcgcccugagaaccggcugguacaccagcgugaucaccaucgagcugagcaacaucaaggagaucaagugcaacggcaccgacgccaaggugaagcugaucaagcaggagcuggacaaguacaagaacgccgugaccgaccugcagcugcugaugcagagcacccccgccgccggcagcggcagcgccaucugcagcggcaucgccgugugcaaggugcugcaccuggagggcgaggugaacaagaucaagaacgcccugcugagcaccaacaaggccguggugagccugagcaacggcgugagcgugcugaccuucaaggugcuggaccugaagaacuacaucgacaagcagcugcugcccauccugaacaagcagagcugcagcauccccaacaucgagaccgugaucgaguuccagcagaagaacaacagacugcuggagaucaccagagaguucagcgugaacgccggcgugaccacccccgugagcaccuacaugcugaccaacagcgagcugcugagccugaucaacgacaugcccaucaccaacgaccagaagaagcugaugagcaacaacgugcagaucgugagacagcagagcuacagcaucaugugcaucaucaaggaggaggugcuggccuacguggugcagcugccccuguacggcgugaucgacacccccugcuggaagcugcacaccagcccccugugcaccaccaacaccaaggagggcagcaacaucugccugaccagaaccgacagaggcugguacugcgacaacgccggcagcgugagcuucuucccccaggccgagaccugcaaggugcagagcaacagaguguucugcgacaccaugaacagccugacccugcccagcgaggugaaccugugcaacaucgacaucuucaaccccaaguacgacugcaagaucaugaccagcaagaccgacgugagcagcagcgugaucaccagccugggcgccaucgugagcugcuacggcaagaccaagugcaccgccagcaacaagaacagaggcaucaucaagaccuucagcaacggcugcgacuacgugagcaacaagggcguggacaccgugagcgugggcaacacccuguacugcgugaacaagcaggagggccagagccuguacgugaagggcgagcccaucaucaacuucuacgacccccugguguuccccagcgacgaguucgacgccagcaucagccaggugaacgagaagaucaaccagagccuggccuucaucagaaagagcgacgagcugcugcacaacgugaacgugggcaagagcaccaccaacaucaugaucaccaccaucaucaucgugaucaucgugauccugcugcugcugaucgccgugggccuguuccuguacugcaaggccagaagcacccccgugacccugagcaaggaccagcugagcggcaucaacaacaucgccuucagcaacugaggacuaguaauaaggaaacuguaugaaugucugugggcaggaagugaagagauccuucuguaaagguuuuuggaauuaugucugcugaauaauaaacuuuuuugaaauaauaaaucugguagaaaaaugagaucuaaaaaaaaaaaaaaaaaaaaaaaaaaaaaaaaaaaaaaaaaaaaaaaaaaaaaaaaaaaaaaaaugcaucccccccccccccccccccccccccccccccaaaggcucuuuucagagccaccagaauu

SEQ ID NO: 15710 - RNA, 1970 nt, Artificial Sequence
  mRNA product Design g-5 comprising derived and/or modified sequence from HRSV(Memphis-37)__AIY60640.1__F_DSCav1_mut3 (opt5)
gggagacccgugacccggaaguuguacggcuacgcgacuuucccucccacaaacccucgcgcccuuccuuuccuacuugggcccggcagaaagcuuaccauggagcugcccauccucaagaccaacgccauuacaacgauccuggcugccgugacccuuugcuucgcgagcucccagaauauuacagaagaguuuuaccaaucuaccuguagcgcugucuccaaaggcuaucugggggcccucagaacaggaugguacaccucuguuaucacaauugaacugagcaacaucaaggagaucaaaugcaauggcaccgacgccaaggugaaacuuauuaagcaggaacuggauaaguauaaaaacgcugugacggaccuccagcugcugaugcaguccaccccugccgcugggucuggaagcgccaucuguuccggcauugcggucugcaaggugcuccaccuggagggggagguuaauaaaaucaagaacgcccuucugagcacaaauaaagcuguggucucucucuccaacggagugagcguucugaccuucaaggugcuugaucugaagaauuacauugacaaacaacuccugccgauccugaacaagcagucuuguuccauucccaauaucgaaacagucaucgaguuucagcagaaaaacaaucggcuccuggaaauuacccgcgaguucagcgugaacgccggcgugacgacaccugucucuaccuauaugcuuacaaauuccgagcugcucagccugaucaacgauaugcccauuaccaacgaccaaaagaaacuuauguccaauaacguucagaucgugagacagcagucuuacagcauuaugugcaucaucaaggaagaggugcuggcuuaugucgugcaacucccucuguacggcguuauugauacccccuguuggaaacugcauacauccccucucugcacgaccaauacaaaggaagggagcaacaucugucugacccggacagaccgcggaugguacugcgauaaugccggcucuguguccuuuuucccgcaggcggagaccuguaagguccagagcaacagaguguuuugcgacacgaugaacucucuuacacugcccagcgaaguuaaucucugcaauauugauaucuucaacccuaaauaugacuguaagauuaugaccuccaaaaccgaugugucuagcuccgucaucacaagccugggggccaucgugucuugcuacggaaagaccaaauguacagcuuccaauaagaaccggggcauuaucaagacguuuagcaaugggugcgacuaugucucuaacaaaggaguggacaccguuuccgugggcaauacacuuuacugugucaacaagcaagagggccagagccuguaugugaaaggggagcccauuaucaacuucuacgauccucucguuuuucccuccgacgaguucgaugccucuauuagccaggugaaugaaaagaucaaccagucccuggcuuuuauucgcaaaucugacgaacugcuccacaaugucaacgugggaaagagcaccacaaauaucaugaucaccacgauuaucauugugaucauuguuauccugcuucugcucaucgccgucggccuguuccuguauugcaaggccagauccaccccggugacacuuagcaaagaucaacucucugggauuaacaauaucgcuuucuccaacugaggacuaguaauaaggaaacuguaugaaugucugugggcaggaagugaagagauccuucuguaaagguuuuuggaauuaugucugcugaauaauaaacuuuuuugaaauaauaaaucugguagaaaaaugagaucuaaaaaaaaaaaaaaaaaaaaaaaaaaaaaaaaaaaaaaaaaaaaaaaaaaaaaaaaaaaaaaaaugcaucccccccccccccccccccccccccccccccaaaggcucuuuucagagccaccagaauu

SEQ ID NO: 15711 - RNA, 1970 nt, Artificial Sequence
  mRNA product Design g-5 comprising derived and/or modified sequence from HRSV(Memphis-37)__AIY60640.1__F_DSCav1_mut3 (opt6)
gggagacccgugacccggaaguuguacggcuacgcgacuuucccucccacaaacccucgcgcccuuccuuuccuacuugggcccggcagaaagcuuaccauggaauuaccaauacuaaaaacaaaugccaucaccaccauccuggccgccguaacauuaugcuucgcaaguucacaaaauauaacagaagaauuuuaucaaucaacuugcagcgccguaucaaaaggcuacuuaggcgcacuacguacaggaugguacacaucaguaauaaccauagaacuauccaauauuaaagaaauaaaaugcaauggaacagacgcaaaaguuaaacuaauaaaacaagaauuagacaaauacaaaaacgcaguaaccgaccuucaauuacuaaugcaaucuacccccgcugcagguuccggaucagcaauauguucaggaauugcaguaugcaaaguccuacacuuagaaggagaaguaaacaaaauaaaaaacgcacuauuaagcaccaauaaagcagucguaucauuauccaacggcguuucaguacuaacauuuaaaguacuugaccuaaaaaacuauauagacaaacaacuacuucccauccuuaacaaacaaagcugcucaauaccuaauaucgaaacaguaauagaauuucaacaaaaaaacaaucgauuauuagaaaucacacgagaauuuucugucaacgcaggagucaccacacccguaucuacuuauauguuaaccaacucugaauuauuaucacuaaucaaugacaugccaauaacaaacgaucaaaaaaaauuaaugucaaauaacguacaaauaguaagacaacaaucauacucaauaaugugcauuauaaaagaagaaguacuagccuauguuguacaacucccacucuacggcguaauagacacaccaugcuggaaauuacacacuucaccacuaugcacaacaaacacaaaagaaggaucaaacaucugccuaaccagaaccgauagaggaugguauugcgacaaugccggaucaguuucauucuucccacaagcagaaacaugcaaaguacaauccaacagaguuuucugugacacaaugaacucgcuaacauuacccagcgaaguaaaccucugcaacauagacauauucaacccaaaauacgauugcaaaauaaugacuucuaaaacagauguuuccucaagcgucauaacgaguuuaggagcaauaguaagcuguuacggaaaaaccaaauguaccgcaucaaacaaaaaccgaggaauaauaaaaaccuuuucaaacggaugcgauuacgucuccaacaaaggagucgacacaguaucaguuggcaauacucuuuacugcguaaauaaacaagaaggacaaucacuauacguaaaaggcgaaccaauaauaaacuucuacgacccccucgucuucccuucagaugaauuugacgcaagcaucucacaaguuaaugaaaaaauaaaucaauccuuagcauucauacgaaaaucagacgaacuauuacacaacguaaacguaggaaaaucaacgacaaacauaaugauaacaacuaucauuauagucauaauagucauacuacuacuauuaauagccguaggcuuauuccuauacugcaaagcaagaucuacuccaguaacacucucaaaagaccaauuaucuggaauaaauaacauagcauucucuaauuaaggacuaguaauaaggaaacuguaugaaugucugugggcaggaagugaagagauccuucuguaaagguuuuuggaauuaugucugcugaauaauaaacuuuuuugaaauaauaaaucugguagaaaaaugagaucuaaaaaaaaaaaaaaaaaaaaaaaaaaaaaaaaaaaaaaaaaaaaaaaaaaaaaaaaaaaaaaaaugcaucccccccccccccccccccccccccccccccaaaggcucuuuucagagccaccagaauu

SEQ ID NO: 15712 - RNA, 1970 nt, Artificial Sequence
  mRNA product Design g-5 comprising derived and/or modified sequence from HRSV(Memphis-37)__AIY60640.1__F_DSCav1_mut3 (opt11)
gggagacccgugacccggaaguuguacggcuacgcgacuuucccucccacaaacccucgcgcccuuccuuuccuacuugggcccggcagaaagcuuaccauggaacuccccauccucaaaaccaacgccauuaccacgauccucgccgcagucacccucugcuucgccuccucacaaaacaucacagaagaauuuuaccaaaguaccugcuccgccgucagcaaaggauaccucggcgcccuccgcaccggcugguacacauccgucauaaccaucgaacucagcaacaucaaagaaaucaaauguaacggaaccgacgccaaaguaaaacuaauaaaacaagaacucgacaaauacaagaacgccgucaccgaccuccaacuccucaugcaaucuacccccgccgccggcucagguagcgccaucugcagcgguauugccgucugcaaaguacuccaccuagaaggagaagucaauaaaaucaaaaacgcccuacucuccaccaacaaggcagucgucagccucuccaacggcgucucagucuuaaccuucaaagugcucgaccucaaaaauuacauagacaaacaacuacuccccauucucaacaaacaauccugcuccauacccaacauagaaaccgucauugaauuucaacagaaaaacaaccgccuccucgaaaucacgcgcgaguucagugucaacgccggcgucaccaccccagucucgacauacaugcucacaaacucagaacuccucucguuaaucaacgacaugccaauaaccaacgaccaaaagaaacuaauguccaacaacguucaaauaguucgccaacaaucauacuccauaaugugcaucaucaaagaagaaguccucgccuacguuguacaauuaccccucuacggcgucaucgacacaccaugcuggaaacuccacacaucgccccucugcaccaccaacaccaaagaaggcagcaacauuugccucacccggacagaccgcggcugguacugcgacaaugcaggcagcgucucauucuucccacaagccgaaaccugcaaaguccaaagcaaccgugucuucugcgacacaaugaacucccuuacccucccaagcgaaguaaaccucugcaauauugacaucuucaaccccaaauacgacugcaaaaucaugaccuccaaaaccgacgucuccucaucagucaucaccucccuuggcgccauugucuccuguuacgguaaaaccaaaugcaccgccuccaacaaaaaccgcggcaucaucaaaaccuucucuaacggcugcgacuacgucucaaacaaaggcgucgacacugucuccgucggcaacacccuauacugcgucaacaagcaagaaggacagucccuauacguaaaaggugaaccaauuaucaacuucuacgacccccuagucuucccauccgacgaguucgaugccuccaucucccaaguaaaugaaaagaucaaucaaagccuggccuucauccgcaaauccgacgaacuacuccacaaugucaacgucggaaaaucaacaacaaacaucaugaucaccaccaucaucaucgucaucauaguaauccuccuacugcucaucgccgucggucucuuccuauacugcaaagcccguucuacuccagucacccucuccaaagaccaacuaucaggaaucaacaacaucgccuucagcaacuaaggacuaguaauaaggaaacuguaugaaugucugugggcaggaagugaagagauccuucuguaaagguuuuuggaauuaugucugcugaauaauaaacuuuuuugaaauaauaaaucugguagaaaaaugagaucuaaaaaaaaaaaaaaaaaaaaaaaaaaaaaaaaaaaaaaaaaaaaaaaaaaaaaaaaaaaaaaaaugcaucccccccccccccccccccccccccccccccaaaggcucuuuucagagccaccagaauu

SEQ ID NO: 15713 - RNA, 1986 nt, Artificial Sequence
  mRNA product Design h-1 comprising derived and/or modified sequence from HRSV(Memphis-37)__AIY60640.1__F_DSCav1_mut3 (opt1)
gggagacccgugacccggaaguuguacggcuacgcgacuuucccucccacaaacccucgcgcccuuccuuuccuacuugggcccggcagaaagcuuaccauggagcugcccauccucaagaccaacgccaucaccacgauccuggccgcggugacccugugcuucgccagcucccagaacaucaccgaggaguucuaccagagcacgugcuccgccgucagcaagggcuaccucggcgcccugcgcaccgggugguacaccagcgugaucaccaucgagcuguccaacaucaaggagaucaagugcaacggcaccgacgccaaggugaagcucaucaagcaggagcuggacaaguacaagaacgcggucacggaccugcagcuccugaugcagagcaccccggccgccggcuccgggagcgcgaucugcuccggcaucgccgucugcaaggugcugcaccucgagggcgaggugaacaagaucaagaacgcccugcuguccaccaacaaggccgucgugagccucuccaacggggugagcguccugaccuucaaggugcuggaccucaagaacuacaucgacaagcagcugcugcccauccugaacaagcagagcugcuccauccccaacaucgagaccgucaucgaguuccagcagaagaacaaccgccuccuggagaucacgcgggaguucagcgugaacgcgggcgugaccacccccgucuccaccuacaugcugacgaacagcgagcuccugucccugaucaacgacaugccgaucaccaacgaccagaagaagcucaugagcaacaacgugcagaucgugcgccagcaguccuacagcaucaugugcaucaucaaggaggagguccuggccuacguggugcagcugccccucuacggggucaucgacacccccugcuggaagcugcacaccagcccccugugcacgaccaacaccaaggagggcuccaacaucugccucacccggacggaccgcgggugguacugcgacaacgccggcagcguguccuucuucccgcaggccgagaccugcaagguccagagcaaccggguguucugcgacaccaugaacucccugacccugcccagcgaggugaaccucugcaacaucgacaucuucaaccccaaguacgacugcaagaucaugacguccaagaccgacgucagcuccagcgugaucaccucccugggcgccaucgugagcugcuacgggaagaccaagugcacggcgagcaacaagaaccgcggcaucaucaagaccuucuccaacgggugcgacuacgucagcaacaagggcguggacaccguguccgucggcaacacccuguacugcgugaacaagcaggagggccagagccucuacgugaagggggagcccaucaucaacuucuacgacccgcuggucuuccccuccgacgaguucgacgccagcaucucccaggugaacgagaagaucaaccagagccuggccuucauccggaaguccgacgagcuccugcacaacgugaacgucggcaagagcaccacgaacaucaugaucaccaccaucaucaucgugaucaucgugauccugcugcuccugaucgccgucgggcuguuccucuacugcaaggcccgcuccacccccgugacgcugagcaaggaccagcuguccgggaucaacaacaucgcguucagcaacugaggacuaguacuggcugcaucucccuuuccucuguccuccauccuucucccaggauggugaagggggaccugguacccagugauccccaccccaggauccuaaaucaugacuuaccugcuaauaaaaacucauuggaaaagugagaagaucuaaaaaaaaaaaaaaaaaaaaaaaaaaaaaaaaaaaaaaaaaaaaaaaaaaaaaaaaaaaaaaaaugcaucccccccccccccccccccccccccccccccaaaggcucuuuucagagccaccagaauu

SEQ ID NO: 15714 - RNA, 1986 nt, Artificial Sequence
  mRNA product Design h-1 comprising derived and/or modified sequence from HRSV(Memphis-37)__AIY60640.1__F_DSCav1_mut3 (opt1)
gggagacccgugacccggaaguuguacggcuacgcgacuuucccucccacaaacccucgcgcccuuccuuuccuacuugggcccggcagaaagcuuaccauggagcugcccauccucaagaccaacgccaucaccacgauccuggccgcggugacccugugcuucgccagcucccagaacaucaccgaggaguucuaccagagcacgugcuccgccgucagcaagggcuaccucggggcccugcgcaccggcugguacaccuccgugaucaccaucgagcugagcaacaucaaggagaucaagugcaacgggaccgacgccaaggugaagcucaucaagcaggagcuggacaaguacaagaacgcggucacggaccugcagcuccugaugcaguccaccccggccgccggcagcggguccgccaucugcagcggcaucgcggugugcaaggugcugcaccucgagggcgaggucaacaagaucaagaacgcccugcuguccaccaacaaggccguggugagccucuccaacggggucagcgugcugaccuucaaggugcuggaccucaagaacuacaucgacaagcagcugcugcccauccucaacaagcaguccugcagcauccccaacaucgagacggucaucgaguuccagcagaagaacaaccggcugcuggagaucacccgcgaguucuccgugaacgccggcgugaccacccccgucagcacguacaugcucaccaacuccgagcugcugagccucaucaacgacaugccgaucaccaacgaccagaagaagcugaugagcaacaacgugcagaucgugcggcagcaguccuacagcaucaugugcaucaucaaggaggagguccuggccuacguggugcagcucccccuguacggggucaucgacacccccugcuggaagcugcacacgagcccccucugcaccaccaacaccaaggagggcuccaacaucugccugacgcgcaccgaccgggggugguacugcgacaacgcgggcuccgugagcuucuucccgcaggccgagaccugcaaggugcaguccaaccgcgucuucugcgacaccaugaacagccugacgcuccccuccgaggugaaccugugcaacaucgacaucuucaaccccaaguacgacugcaagaucaugaccagcaagaccgacgucuccagcuccgugaucaccagccugggcgccaucguguccugcuacgggaagacgaagugcaccgccagcaacaagaaccggggcaucaucaagaccuucuccaacgggugcgacuacgucagcaacaagggcguggacaccguguccgucggcaacacgcucuacugcgugaacaagcaggaggggcagagccuguacgugaagggcgagcccaucaucaacuucuacgacccgcuggucuuccccagcgacgaguucgacgccuccaucagccaggugaacgagaagaucaaccagucccucgcguucauccgcaagagcgacgagcugcugcacaacgugaacgucgggaaguccaccaccaacaucaugaucaccaccaucaucaucgugaucaucgugauccuccugcugcucaucgccgucggccuguuccuguacugcaaggcccggagcacgcccgugacccuguccaaggaccagcucagcgggaucaacaacaucgccuucuccaacugaggacuaguacuggcugcaucucccuuuccucuguccuccauccuucucccaggauggugaagggggaccugguacccagugauccccaccccaggauccuaaaucaugacuuaccugcuaauaaaaacucauuggaaaagugagaagaucuaaaaaaaaaaaaaaaaaaaaaaaaaaaaaaaaaaaaaaaaaaaaaaaaaaaaaaaaaaaaaaaaugcaucccccccccccccccccccccccccccccccaaaggcucuuuucagagccaccagaauu

SEQ ID NO: 15715 - RNA, 1986 nt, Artificial Sequence
  mRNA product Design h-1 comprising derived and/or modified sequence from HRSV(Memphis-37)__AIY60640.1__F_DSCav1_mut3 (opt2)
gggagacccgugacccggaaguuguacggcuacgcgacuuucccucccacaaacccucgcgcccuuccuuuccuacuugggcccggcagaaagcuuaccauggagcuccccauccucaagaccaacgccaucaccaccauccucgccgccgucacccucugcuucgccuccucccagaacaucaccgaggaguucuaccaguccaccugcuccgccgucuccaagggcuaccucggcgcccuccgcaccggcugguacaccuccgucaucaccaucgagcucuccaacaucaaggagaucaagugcaacggcaccgacgccaaggucaagcucaucaagcaggagcucgacaaguacaagaacgccgucaccgaccuccagcuccucaugcaguccacccccgccgccggcuccggcuccgccaucugcuccggcaucgccgucugcaagguccuccaccucgagggcgaggucaacaagaucaagaacgcccuccucuccaccaacaaggccgucgucucccucuccaacggcgucuccguccucaccuucaagguccucgaccucaagaacuacaucgacaagcagcuccuccccauccucaacaagcaguccugcuccauccccaacaucgagaccgucaucgaguuccagcagaagaacaaccgccuccucgagaucacccgcgaguucuccgucaacgccggcgucaccacccccgucuccaccuacaugcucaccaacuccgagcuccucucccucaucaacgacaugcccaucaccaacgaccagaagaagcucauguccaacaacguccagaucguccgccagcaguccuacuccaucaugugcaucaucaaggaggagguccucgccuacgucguccagcucccccucuacggcgucaucgacacccccugcuggaagcuccacaccuccccccucugcaccaccaacaccaaggagggcuccaacaucugccucacccgcaccgaccgcggcugguacugcgacaacgccggcuccgucuccuucuucccccaggccgagaccugcaagguccaguccaaccgcgucuucugcgacaccaugaacucccucacccuccccuccgaggucaaccucugcaacaucgacaucuucaaccccaaguacgacugcaagaucaugaccuccaagaccgacgucuccuccuccgucaucaccucccucggcgccaucgucuccugcuacggcaagaccaagugcaccgccuccaacaagaaccgcggcaucaucaagaccuucuccaacggcugcgacuacgucuccaacaagggcgucgacaccgucuccgucggcaacacccucuacugcgucaacaagcaggagggccagucccucuacgucaagggcgagcccaucaucaacuucuacgacccccucgucuuccccuccgacgaguucgacgccuccaucucccaggucaacgagaagaucaaccagucccucgccuucauccgcaaguccgacgagcuccuccacaacgucaacgucggcaaguccaccaccaacaucaugaucaccaccaucaucaucgucaucaucgucauccuccuccuccucaucgccgucggccucuuccucuacugcaaggcccgcuccacccccgucacccucuccaaggaccagcucuccggcaucaacaacaucgccuucuccaacugaggacuaguacuggcugcaucucccuuuccucuguccuccauccuucucccaggauggugaagggggaccugguacccagugauccccaccccaggauccuaaaucaugacuuaccugcuaauaaaaacucauuggaaaagugagaagaucuaaaaaaaaaaaaaaaaaaaaaaaaaaaaaaaaaaaaaaaaaaaaaaaaaaaaaaaaaaaaaaaaugcaucccccccccccccccccccccccccccccccaaaggcucuuuucagagccaccagaauu

SEQ ID NO: 15716 - RNA, 1986 nt, Artificial Sequence
  mRNA product Design h-1 comprising derived and/or modified sequence from HRSV(Memphis-37)__AIY60640.1__F_DSCav1_mut3 (opt3)
gggagacccgugacccggaaguuguacggcuacgcgacuuucccucccacaaacccucgcgcccuuccuuuccuacuugggcccggcagaaagcuuaccauggagcugcccauccucaagaccaacgccauuacaacuauacuugcugcagugacgcugugcuucgccagcucccagaauaucaccgaagaguuuuaccaaucuacauguucagcggucaguaaaggcuauuugggggcuuuaagaacuggaugguacaccagcguuauuacaaucgaacuguccaacauuaaggagaucaaaugcaaugguaccgacgccaaggugaaacuaauaaagcaggaacucgauaaguauaaaaacgcaguaacugaccugcagcuucugaugcagucuacuccugccgcuggcucggggucagcaaucuguagcggaauugccgugugcaaggucuugcaccucgagggcgaggugaauaaaaucaagaacgcucugcugaguaccaauaaagccguugugucccucucuaacggugucagcguguuaacguucaagguacuggaucuuaagaauuacauugacaaacaauugcugccaauccuaaacaagcaguccuguucaauaccgaauauugaaacuguuaucgaguuucagcagaaaaacaauaggcuccuggaaauuacccgggaguucagugugaacgcgggggucacaacucccgugagcaccuauaugcuuacaaauucugagcuguugucccucaucaacgauaugccuaucaccaacgaccaaaagaaacugaugucaaauaacgugcagauuguccgccagcagagcuacaguauaaugugcaucauuaaggaagagguuuuagcauaugugguacaacugccacucuacggagugaucgauacgcccuguuggaaacuucauacuucuccucugugcacaaccaauacuaaggaaggcuccaacauauguuugacacgaaccgaccguggcugguacugcgauaaugccgggagcgucucguuuuucccacaggcugagacguguaaggugcagucuaacagaguuuucugcgacaccaugaacucccuaacacugcccucagaagugaaucucugcaauauugauaucuucaacccuaaauaugacuguaagaucaugacaaguaaaaccgaugucagcuccucugugauuacaagccugggagccaucguaucaugcuacgguaagacuaaauguaccgcaaguaauaagaacaggggcauuauaaagacauuuuccaaugggugcgacuauguuagcaacaaaggaguggacaccgucucugugggcaauacucuuuacugugucaacaagcaagagggucagucacuguaugugaaaggggagccaaucauuaacuucuacgauccguugguuuuucccagugacgaauuugaugcuagcaucucccaggugaaugagaagaucaaccagucucucgccuuuauucggaaaucggacgaacuguuacacaauguaaacgucggaaagagcacgacaaauauaaugaucaccacuauuaucauugugaucauaguuauccugcuacuccugauugcggugggccuuuucuuguauugcaaggcccgcuccaccccugucacacugucaaaagaucaacucaguggcaucaacaauauugcauucucuaacugaggacuaguacuggcugcaucucccuuuccucuguccuccauccuucucccaggauggugaagggggaccugguacccagugauccccaccccaggauccuaaaucaugacuuaccugcuaauaaaaacucauuggaaaagugagaagaucuaaaaaaaaaaaaaaaaaaaaaaaaaaaaaaaaaaaaaaaaaaaaaaaaaaaaaaaaaaaaaaaaugcaucccccccccccccccccccccccccccccccaaaggcucuuuucagagccaccagaauu

SEQ ID NO: 15717 - RNA, 1986 nt, Artificial Sequence
  mRNA product Design h-1 comprising derived and/or modified sequence from HRSV(Memphis-37)__AIY60640.1__F_DSCav1_mut3 (opt4)
gggagacccgugacccggaaguuguacggcuacgcgacuuucccucccacaaacccucgcgcccuuccuuuccuacuugggcccggcagaaagcuuaccauggagcugcccauccugaagaccaacgccaucaccaccauccuggccgccgugacccugugcuucgccagcagccagaacaucaccgaggaguucuaccagagcaccugcagcgccgugagcaagggcuaccugggcgcccugagaaccggcugguacaccagcgugaucaccaucgagcugagcaacaucaaggagaucaagugcaacggcaccgacgccaaggugaagcugaucaagcaggagcuggacaaguacaagaacgccgugaccgaccugcagcugcugaugcagagcacccccgccgccggcagcggcagcgccaucugcagcggcaucgccgugugcaaggugcugcaccuggagggcgaggugaacaagaucaagaacgcccugcugagcaccaacaaggccguggugagccugagcaacggcgugagcgugcugaccuucaaggugcuggaccugaagaacuacaucgacaagcagcugcugcccauccugaacaagcagagcugcagcauccccaacaucgagaccgugaucgaguuccagcagaagaacaacagacugcuggagaucaccagagaguucagcgugaacgccggcgugaccacccccgugagcaccuacaugcugaccaacagcgagcugcugagccugaucaacgacaugcccaucaccaacgaccagaagaagcugaugagcaacaacgugcagaucgugagacagcagagcuacagcaucaugugcaucaucaaggaggaggugcuggccuacguggugcagcugccccuguacggcgugaucgacacccccugcuggaagcugcacaccagcccccugugcaccaccaacaccaaggagggcagcaacaucugccugaccagaaccgacagaggcugguacugcgacaacgccggcagcgugagcuucuucccccaggccgagaccugcaaggugcagagcaacagaguguucugcgacaccaugaacagccugacccugcccagcgaggugaaccugugcaacaucgacaucuucaaccccaaguacgacugcaagaucaugaccagcaagaccgacgugagcagcagcgugaucaccagccugggcgccaucgugagcugcuacggcaagaccaagugcaccgccagcaacaagaacagaggcaucaucaagaccuucagcaacggcugcgacuacgugagcaacaagggcguggacaccgugagcgugggcaacacccuguacugcgugaacaagcaggagggccagagccuguacgugaagggcgagcccaucaucaacuucuacgacccccugguguuccccagcgacgaguucgacgccagcaucagccaggugaacgagaagaucaaccagagccuggccuucaucagaaagagcgacgagcugcugcacaacgugaacgugggcaagagcaccaccaacaucaugaucaccaccaucaucaucgugaucaucgugauccugcugcugcugaucgccgugggccuguuccuguacugcaaggccagaagcacccccgugacccugagcaaggaccagcugagcggcaucaacaacaucgccuucagcaacugaggacuaguacuggcugcaucucccuuuccucuguccuccauccuucucccaggauggugaagggggaccugguacccagugauccccaccccaggauccuaaaucaugacuuaccugcuaauaaaaacucauuggaaaagugagaagaucuaaaaaaaaaaaaaaaaaaaaaaaaaaaaaaaaaaaaaaaaaaaaaaaaaaaaaaaaaaaaaaaaugcaucccccccccccccccccccccccccccccccaaaggcucuuuucagagccaccagaauu

SEQ ID NO: 15718 - RNA, 1986 nt, Artificial Sequence
  mRNA product Design h-1 comprising derived and/or modified sequence from HRSV(Memphis-37)__AIY60640.1__F_DSCav1_mut3 (opt5)
gggagacccgugacccggaaguuguacggcuacgcgacuuucccucccacaaacccucgcgcccuuccuuuccuacuugggcccggcagaaagcuuaccauggagcugcccauccucaagaccaacgccauuacaacgauccuggcugccgugacccuuugcuucgcgagcucccagaauauuacagaagaguuuuaccaaucuaccuguagcgcugucuccaaaggcuaucugggggcccucagaacaggaugguacaccucuguuaucacaauugaacugagcaacaucaaggagaucaaaugcaauggcaccgacgccaaggugaaacuuauuaagcaggaacuggauaaguauaaaaacgcugugacggaccuccagcugcugaugcaguccaccccugccgcugggucuggaagcgccaucuguuccggcauugcggucugcaaggugcuccaccuggagggggagguuaauaaaaucaagaacgcccuucugagcacaaauaaagcuguggucucucucuccaacggagugagcguucugaccuucaaggugcuugaucugaagaauuacauugacaaacaacuccugccgauccugaacaagcagucuuguuccauucccaauaucgaaacagucaucgaguuucagcagaaaaacaaucggcuccuggaaauuacccgcgaguucagcgugaacgccggcgugacgacaccugucucuaccuauaugcuuacaaauuccgagcugcucagccugaucaacgauaugcccauuaccaacgaccaaaagaaacuuauguccaauaacguucagaucgugagacagcagucuuacagcauuaugugcaucaucaaggaagaggugcuggcuuaugucgugcaacucccucuguacggcguuauugauacccccuguuggaaacugcauacauccccucucugcacgaccaauacaaaggaagggagcaacaucugucugacccggacagaccgcggaugguacugcgauaaugccggcucuguguccuuuuucccgcaggcggagaccuguaagguccagagcaacagaguguuuugcgacacgaugaacucucuuacacugcccagcgaaguuaaucucugcaauauugauaucuucaacccuaaauaugacuguaagauuaugaccuccaaaaccgaugugucuagcuccgucaucacaagccugggggccaucgugucuugcuacggaaagaccaaauguacagcuuccaauaagaaccggggcauuaucaagacguuuagcaaugggugcgacuaugucucuaacaaaggaguggacaccguuuccgugggcaauacacuuuacugugucaacaagcaagagggccagagccuguaugugaaaggggagcccauuaucaacuucuacgauccucucguuuuucccuccgacgaguucgaugccucuauuagccaggugaaugaaaagaucaaccagucccuggcuuuuauucgcaaaucugacgaacugcuccacaaugucaacgugggaaagagcaccacaaauaucaugaucaccacgauuaucauugugaucauuguuauccugcuucugcucaucgccgucggccuguuccuguauugcaaggccagauccaccccggugacacuuagcaaagaucaacucucugggauuaacaauaucgcuuucuccaacugaggacuaguacuggcugcaucucccuuuccucuguccuccauccuucucccaggauggugaagggggaccugguacccagugauccccaccccaggauccuaaaucaugacuuaccugcuaauaaaaacucauuggaaaagugagaagaucuaaaaaaaaaaaaaaaaaaaaaaaaaaaaaaaaaaaaaaaaaaaaaaaaaaaaaaaaaaaaaaaaugcaucccccccccccccccccccccccccccccccaaaggcucuuuucagagccaccagaauu

SEQ ID NO: 15719 - RNA, 1986 nt, Artificial Sequence
  mRNA product Design h-1 comprising derived and/or modified sequence from HRSV(Memphis-37)__AIY60640.1__F_DSCav1_mut3 (opt6)
gggagacccgugacccggaaguuguacggcuacgcgacuuucccucccacaaacccucgcgcccuuccuuuccuacuugggcccggcagaaagcuuaccauggaauuaccaauacuaaaaacaaaugccaucaccaccauccuggccgccguaacauuaugcuucgcaaguucacaaaauauaacagaagaauuuuaucaaucaacuugcagcgccguaucaaaaggcuacuuaggcgcacuacguacaggaugguacacaucaguaauaaccauagaacuauccaauauuaaagaaauaaaaugcaauggaacagacgcaaaaguuaaacuaauaaaacaagaauuagacaaauacaaaaacgcaguaaccgaccuucaauuacuaaugcaaucuacccccgcugcagguuccggaucagcaauauguucaggaauugcaguaugcaaaguccuacacuuagaaggagaaguaaacaaaauaaaaaacgcacuauuaagcaccaauaaagcagucguaucauuauccaacggcguuucaguacuaacauuuaaaguacuugaccuaaaaaacuauauagacaaacaacuacuucccauccuuaacaaacaaagcugcucaauaccuaauaucgaaacaguaauagaauuucaacaaaaaaacaaucgauuauuagaaaucacacgagaauuuucugucaacgcaggagucaccacacccguaucuacuuauauguuaaccaacucugaauuauuaucacuaaucaaugacaugccaauaacaaacgaucaaaaaaaauuaaugucaaauaacguacaaauaguaagacaacaaucauacucaauaaugugcauuauaaaagaagaaguacuagccuauguuguacaacucccacucuacggcguaauagacacaccaugcuggaaauuacacacuucaccacuaugcacaacaaacacaaaagaaggaucaaacaucugccuaaccagaaccgauagaggaugguauugcgacaaugccggaucaguuucauucuucccacaagcagaaacaugcaaaguacaauccaacagaguuuucugugacacaaugaacucgcuaacauuacccagcgaaguaaaccucugcaacauagacauauucaacccaaaauacgauugcaaaauaaugacuucuaaaacagauguuuccucaagcgucauaacgaguuuaggagcaauaguaagcuguuacggaaaaaccaaauguaccgcaucaaacaaaaaccgaggaauaauaaaaaccuuuucaaacggaugcgauuacgucuccaacaaaggagucgacacaguaucaguuggcaauacucuuuacugcguaaauaaacaagaaggacaaucacuauacguaaaaggcgaaccaauaauaaacuucuacgacccccucgucuucccuucagaugaauuugacgcaagcaucucacaaguuaaugaaaaaauaaaucaauccuuagcauucauacgaaaaucagacgaacuauuacacaacguaaacguaggaaaaucaacgacaaacauaaugauaacaacuaucauuauagucauaauagucauacuacuacuauuaauagccguaggcuuauuccuauacugcaaagcaagaucuacuccaguaacacucucaaaagaccaauuaucuggaauaaauaacauagcauucucuaauuaaggacuaguacuggcugcaucucccuuuccucuguccuccauccuucucccaggauggugaagggggaccugguacccagugauccccaccccaggauccuaaaucaugacuuaccugcuaauaaaaacucauuggaaaagugagaagaucuaaaaaaaaaaaaaaaaaaaaaaaaaaaaaaaaaaaaaaaaaaaaaaaaaaaaaaaaaaaaaaaaugcaucccccccccccccccccccccccccccccccaaaggcucuuuucagagccaccagaauu

SEQ ID NO: 15720 - RNA, 1986 nt, Artificial Sequence
  mRNA product Design h-1 comprising derived and/or modified sequence from HRSV(Memphis-37)__AIY60640.1__F_DSCav1_mut3 (opt11)
gggagacccgugacccggaaguuguacggcuacgcgacuuucccucccacaaacccucgcgcccuuccuuuccuacuugggcccggcagaaagcuuaccauggaacuccccauccucaaaaccaacgccauuaccacgauccucgccgcagucacccucugcuucgccuccucacaaaacaucacagaagaauuuuaccaaaguaccugcuccgccgucagcaaaggauaccucggcgcccuccgcaccggcugguacacauccgucauaaccaucgaacucagcaacaucaaagaaaucaaauguaacggaaccgacgccaaaguaaaacuaauaaaacaagaacucgacaaauacaagaacgccgucaccgaccuccaacuccucaugcaaucuacccccgccgccggcucagguagcgccaucugcagcgguauugccgucugcaaaguacuccaccuagaaggagaagucaauaaaaucaaaaacgcccuacucuccaccaacaaggcagucgucagccucuccaacggcgucucagucuuaaccuucaaagugcucgaccucaaaaauuacauagacaaacaacuacuccccauucucaacaaacaauccugcuccauacccaacauagaaaccgucauugaauuucaacagaaaaacaaccgccuccucgaaaucacgcgcgaguucagugucaacgccggcgucaccaccccagucucgacauacaugcucacaaacucagaacuccucucguuaaucaacgacaugccaauaaccaacgaccaaaagaaacuaauguccaacaacguucaaauaguucgccaacaaucauacuccauaaugugcaucaucaaagaagaaguccucgccuacguuguacaauuaccccucuacggcgucaucgacacaccaugcuggaaacuccacacaucgccccucugcaccaccaacaccaaagaaggcagcaacauuugccucacccggacagaccgcggcugguacugcgacaaugcaggcagcgucucauucuucccacaagccgaaaccugcaaaguccaaagcaaccgugucuucugcgacacaaugaacucccuuacccucccaagcgaaguaaaccucugcaauauugacaucuucaaccccaaauacgacugcaaaaucaugaccuccaaaaccgacgucuccucaucagucaucaccucccuuggcgccauugucuccuguuacgguaaaaccaaaugcaccgccuccaacaaaaaccgcggcaucaucaaaaccuucucuaacggcugcgacuacgucucaaacaaaggcgucgacacugucuccgucggcaacacccuauacugcgucaacaagcaagaaggacagucccuauacguaaaaggugaaccaauuaucaacuucuacgacccccuagucuucccauccgacgaguucgaugccuccaucucccaaguaaaugaaaagaucaaucaaagccuggccuucauccgcaaauccgacgaacuacuccacaaugucaacgucggaaaaucaacaacaaacaucaugaucaccaccaucaucaucgucaucauaguaauccuccuacugcucaucgccgucggucucuuccuauacugcaaagcccguucuacuccagucacccucuccaaagaccaacuaucaggaaucaacaacaucgccuucagcaacuaaggacuaguacuggcugcaucucccuuuccucuguccuccauccuucucccaggauggugaagggggaccugguacccagugauccccaccccaggauccuaaaucaugacuuaccugcuaauaaaaacucauuggaaaagugagaagaucuaaaaaaaaaaaaaaaaaaaaaaaaaaaaaaaaaaaaaaaaaaaaaaaaaaaaaaaaaaaaaaaaugcaucccccccccccccccccccccccccccccccaaaggcucuuuucagagccaccagaauu

SEQ ID NO: 15721 - RNA, 2202 nt, Artificial Sequence
  mRNA product Design h-2 comprising derived and/or modified sequence from HRSV(Memphis-37)__AIY60640.1__F_DSCav1_mut3 (opt1)
gggagacccgugacccggaaguuguacggcuacgcgacuuucccucccacaaacccucgcgcccuuccuuuccuacuugggcccggcagaaagcuuaccauggagcugcccauccucaagaccaacgccaucaccacgauccuggccgcggugacccugugcuucgccagcucccagaacaucaccgaggaguucuaccagagcacgugcuccgccgucagcaagggcuaccucggcgcccugcgcaccgggugguacaccagcgugaucaccaucgagcuguccaacaucaaggagaucaagugcaacggcaccgacgccaaggugaagcucaucaagcaggagcuggacaaguacaagaacgcggucacggaccugcagcuccugaugcagagcaccccggccgccggcuccgggagcgcgaucugcuccggcaucgccgucugcaaggugcugcaccucgagggcgaggugaacaagaucaagaacgcccugcuguccaccaacaaggccgucgugagccucuccaacggggugagcguccugaccuucaaggugcuggaccucaagaacuacaucgacaagcagcugcugcccauccugaacaagcagagcugcuccauccccaacaucgagaccgucaucgaguuccagcagaagaacaaccgccuccuggagaucacgcgggaguucagcgugaacgcgggcgugaccacccccgucuccaccuacaugcugacgaacagcgagcuccugucccugaucaacgacaugccgaucaccaacgaccagaagaagcucaugagcaacaacgugcagaucgugcgccagcaguccuacagcaucaugugcaucaucaaggaggagguccuggccuacguggugcagcugccccucuacggggucaucgacacccccugcuggaagcugcacaccagcccccugugcacgaccaacaccaaggagggcuccaacaucugccucacccggacggaccgcgggugguacugcgacaacgccggcagcguguccuucuucccgcaggccgagaccugcaagguccagagcaaccggguguucugcgacaccaugaacucccugacccugcccagcgaggugaaccucugcaacaucgacaucuucaaccccaaguacgacugcaagaucaugacguccaagaccgacgucagcuccagcgugaucaccucccugggcgccaucgugagcugcuacgggaagaccaagugcacggcgagcaacaagaaccgcggcaucaucaagaccuucuccaacgggugcgacuacgucagcaacaagggcguggacaccguguccgucggcaacacccuguacugcgugaacaagcaggagggccagagccucuacgugaagggggagcccaucaucaacuucuacgacccgcuggucuuccccuccgacgaguucgacgccagcaucucccaggugaacgagaagaucaaccagagccuggccuucauccggaaguccgacgagcuccugcacaacgugaacgucggcaagagcaccacgaacaucaugaucaccaccaucaucaucgugaucaucgugauccugcugcuccugaucgccgucgggcuguuccucuacugcaaggcccgcuccacccccgugacgcugagcaaggaccagcuguccgggaucaacaacaucgcguucagcaacugaggacuagugaagggaacacccaaauuuaauucagccuuaagcacaauuaauuaagagugaaacguaauuguacaagcaguuggucacccaccauagggcaugaucaacaccgcaaccuuuccuuuuucccccagugauucugaaaaaccccucuucccuucagcuugcuuagauguuccaaauuuaguaagcuuaaggcggccuacagaagaaaaagaaaaaaaaggccacaaaaguucccucucacuuucaguaaauaaaauaaaagcagcaacagaaauaaagaaauaaaugaaauucaaaaugaaauaaauauuguguugugcagcauuaaaaaaucaauaaaaauuaaaaaugagcaagaucuaaaaaaaaaaaaaaaaaaaaaaaaaaaaaaaaaaaaaaaaaaaaaaaaaaaaaaaaaaaaaaaaugcaucccccccccccccccccccccccccccccccaaaggcucuuuucagagccaccagaauu

SEQ ID NO: 15722 - RNA, 2202 nt, Artificial Sequence
  mRNA product Design h-2 comprising derived and/or modified sequence from HRSV(Memphis-37)__AIY60640.1__F_DSCav1_mut3 (opt1)
gggagacccgugacccggaaguuguacggcuacgcgacuuucccucccacaaacccucgcgcccuuccuuuccuacuugggcccggcagaaagcuuaccauggagcugcccauccucaagaccaacgccaucaccacgauccuggccgcggugacccugugcuucgccagcucccagaacaucaccgaggaguucuaccagagcacgugcuccgccgucagcaagggcuaccucggggcccugcgcaccggcugguacaccuccgugaucaccaucgagcugagcaacaucaaggagaucaagugcaacgggaccgacgccaaggugaagcucaucaagcaggagcuggacaaguacaagaacgcggucacggaccugcagcuccugaugcaguccaccccggccgccggcagcggguccgccaucugcagcggcaucgcggugugcaaggugcugcaccucgagggcgaggucaacaagaucaagaacgcccugcuguccaccaacaaggccguggugagccucuccaacggggucagcgugcugaccuucaaggugcuggaccucaagaacuacaucgacaagcagcugcugcccauccucaacaagcaguccugcagcauccccaacaucgagacggucaucgaguuccagcagaagaacaaccggcugcuggagaucacccgcgaguucuccgugaacgccggcgugaccacccccgucagcacguacaugcucaccaacuccgagcugcugagccucaucaacgacaugccgaucaccaacgaccagaagaagcugaugagcaacaacgugcagaucgugcggcagcaguccuacagcaucaugugcaucaucaaggaggagguccuggccuacguggugcagcucccccuguacggggucaucgacacccccugcuggaagcugcacacgagcccccucugcaccaccaacaccaaggagggcuccaacaucugccugacgcgcaccgaccgggggugguacugcgacaacgcgggcuccgugagcuucuucccgcaggccgagaccugcaaggugcaguccaaccgcgucuucugcgacaccaugaacagccugacgcuccccuccgaggugaaccugugcaacaucgacaucuucaaccccaaguacgacugcaagaucaugaccagcaagaccgacgucuccagcuccgugaucaccagccugggcgccaucguguccugcuacgggaagacgaagugcaccgccagcaacaagaaccggggcaucaucaagaccuucuccaacgggugcgacuacgucagcaacaagggcguggacaccguguccgucggcaacacgcucuacugcgugaacaagcaggaggggcagagccuguacgugaagggcgagcccaucaucaacuucuacgacccgcuggucuuccccagcgacgaguucgacgccuccaucagccaggugaacgagaagaucaaccagucccucgcguucauccgcaagagcgacgagcugcugcacaacgugaacgucgggaaguccaccaccaacaucaugaucaccaccaucaucaucgugaucaucgugauccuccugcugcucaucgccgucggccuguuccuguacugcaaggcccggagcacgcccgugacccuguccaaggaccagcucagcgggaucaacaacaucgccuucuccaacugaggacuagugaagggaacacccaaauuuaauucagccuuaagcacaauuaauuaagagugaaacguaauuguacaagcaguuggucacccaccauagggcaugaucaacaccgcaaccuuuccuuuuucccccagugauucugaaaaaccccucuucccuucagcuugcuuagauguuccaaauuuaguaagcuuaaggcggccuacagaagaaaaagaaaaaaaaggccacaaaaguucccucucacuuucaguaaauaaaauaaaagcagcaacagaaauaaagaaauaaaugaaauucaaaaugaaauaaauauuguguugugcagcauuaaaaaaucaauaaaaauuaaaaaugagcaagaucuaaaaaaaaaaaaaaaaaaaaaaaaaaaaaaaaaaaaaaaaaaaaaaaaaaaaaaaaaaaaaaaaugcaucccccccccccccccccccccccccccccccaaaggcucuuuucagagccaccagaauu

SEQ ID NO: 15723 - RNA, 2202 nt, Artificial Sequence
  mRNA product Design h-2 comprising derived and/or modified sequence from HRSV(Memphis-37)__AIY60640.1__F_DSCav1_mut3 (opt2)
gggagacccgugacccggaaguuguacggcuacgcgacuuucccucccacaaacccucgcgcccuuccuuuccuacuugggcccggcagaaagcuuaccauggagcuccccauccucaagaccaacgccaucaccaccauccucgccgccgucacccucugcuucgccuccucccagaacaucaccgaggaguucuaccaguccaccugcuccgccgucuccaagggcuaccucggcgcccuccgcaccggcugguacaccuccgucaucaccaucgagcucuccaacaucaaggagaucaagugcaacggcaccgacgccaaggucaagcucaucaagcaggagcucgacaaguacaagaacgccgucaccgaccuccagcuccucaugcaguccacccccgccgccggcuccggcuccgccaucugcuccggcaucgccgucugcaagguccuccaccucgagggcgaggucaacaagaucaagaacgcccuccucuccaccaacaaggccgucgucucccucuccaacggcgucuccguccucaccuucaagguccucgaccucaagaacuacaucgacaagcagcuccuccccauccucaacaagcaguccugcuccauccccaacaucgagaccgucaucgaguuccagcagaagaacaaccgccuccucgagaucacccgcgaguucuccgucaacgccggcgucaccacccccgucuccaccuacaugcucaccaacuccgagcuccucucccucaucaacgacaugcccaucaccaacgaccagaagaagcucauguccaacaacguccagaucguccgccagcaguccuacuccaucaugugcaucaucaaggaggagguccucgccuacgucguccagcucccccucuacggcgucaucgacacccccugcuggaagcuccacaccuccccccucugcaccaccaacaccaaggagggcuccaacaucugccucacccgcaccgaccgcggcugguacugcgacaacgccggcuccgucuccuucuucccccaggccgagaccugcaagguccaguccaaccgcgucuucugcgacaccaugaacucccucacccuccccuccgaggucaaccucugcaacaucgacaucuucaaccccaaguacgacugcaagaucaugaccuccaagaccgacgucuccuccuccgucaucaccucccucggcgccaucgucuccugcuacggcaagaccaagugcaccgccuccaacaagaaccgcggcaucaucaagaccuucuccaacggcugcgacuacgucuccaacaagggcgucgacaccgucuccgucggcaacacccucuacugcgucaacaagcaggagggccagucccucuacgucaagggcgagcccaucaucaacuucuacgacccccucgucuuccccuccgacgaguucgacgccuccaucucccaggucaacgagaagaucaaccagucccucgccuucauccgcaaguccgacgagcuccuccacaacgucaacgucggcaaguccaccaccaacaucaugaucaccaccaucaucaucgucaucaucgucauccuccuccuccucaucgccgucggccucuuccucuacugcaaggcccgcuccacccccgucacccucuccaaggaccagcucuccggcaucaacaacaucgccuucuccaacugaggacuagugaagggaacacccaaauuuaauucagccuuaagcacaauuaauuaagagugaaacguaauuguacaagcaguuggucacccaccauagggcaugaucaacaccgcaaccuuuccuuuuucccccagugauucugaaaaaccccucuucccuucagcuugcuuagauguuccaaauuuaguaagcuuaaggcggccuacagaagaaaaagaaaaaaaaggccacaaaaguucccucucacuuucaguaaauaaaauaaaagcagcaacagaaauaaagaaauaaaugaaauucaaaaugaaauaaauauuguguugugcagcauuaaaaaaucaauaaaaauuaaaaaugagcaagaucuaaaaaaaaaaaaaaaaaaaaaaaaaaaaaaaaaaaaaaaaaaaaaaaaaaaaaaaaaaaaaaaaugcaucccccccccccccccccccccccccccccccaaaggcucuuuucagagccaccagaauu

SEQ ID NO: 15724 - RNA, 2202 nt, Artificial Sequence
  mRNA product Design h-2 comprising derived and/or modified sequence from HRSV(Memphis-37)__AIY60640.1__F_DSCav1_mut3 (opt3)
gggagacccgugacccggaaguuguacggcuacgcgacuuucccucccacaaacccucgcgcccuuccuuuccuacuugggcccggcagaaagcuuaccauggagcugcccauccucaagaccaacgccauuacaacuauacuugcugcagugacgcugugcuucgccagcucccagaauaucaccgaagaguuuuaccaaucuacauguucagcggucaguaaaggcuauuugggggcuuuaagaacuggaugguacaccagcguuauuacaaucgaacuguccaacauuaaggagaucaaaugcaaugguaccgacgccaaggugaaacuaauaaagcaggaacucgauaaguauaaaaacgcaguaacugaccugcagcuucugaugcagucuacuccugccgcuggcucggggucagcaaucuguagcggaauugccgugugcaaggucuugcaccucgagggcgaggugaauaaaaucaagaacgcucugcugaguaccaauaaagccguugugucccucucuaacggugucagcguguuaacguucaagguacuggaucuuaagaauuacauugacaaacaauugcugccaauccuaaacaagcaguccuguucaauaccgaauauugaaacuguuaucgaguuucagcagaaaaacaauaggcuccuggaaauuacccgggaguucagugugaacgcgggggucacaacucccgugagcaccuauaugcuuacaaauucugagcuguugucccucaucaacgauaugccuaucaccaacgaccaaaagaaacugaugucaaauaacgugcagauuguccgccagcagagcuacaguauaaugugcaucauuaaggaagagguuuuagcauaugugguacaacugccacucuacggagugaucgauacgcccuguuggaaacuucauacuucuccucugugcacaaccaauacuaaggaaggcuccaacauauguuugacacgaaccgaccguggcugguacugcgauaaugccgggagcgucucguuuuucccacaggcugagacguguaaggugcagucuaacagaguuuucugcgacaccaugaacucccuaacacugcccucagaagugaaucucugcaauauugauaucuucaacccuaaauaugacuguaagaucaugacaaguaaaaccgaugucagcuccucugugauuacaagccugggagccaucguaucaugcuacgguaagacuaaauguaccgcaaguaauaagaacaggggcauuauaaagacauuuuccaaugggugcgacuauguuagcaacaaaggaguggacaccgucucugugggcaauacucuuuacugugucaacaagcaagagggucagucacuguaugugaaaggggagccaaucauuaacuucuacgauccguugguuuuucccagugacgaauuugaugcuagcaucucccaggugaaugagaagaucaaccagucucucgccuuuauucggaaaucggacgaacuguuacacaauguaaacgucggaaagagcacgacaaauauaaugaucaccacuauuaucauugugaucauaguuauccugcuacuccugauugcggugggccuuuucuuguauugcaaggcccgcuccaccccugucacacugucaaaagaucaacucaguggcaucaacaauauugcauucucuaacugaggacuagugaagggaacacccaaauuuaauucagccuuaagcacaauuaauuaagagugaaacguaauuguacaagcaguuggucacccaccauagggcaugaucaacaccgcaaccuuuccuuuuucccccagugauucugaaaaaccccucuucccuucagcuugcuuagauguuccaaauuuaguaagcuuaaggcggccuacagaagaaaaagaaaaaaaaggccacaaaaguucccucucacuuucaguaaauaaaauaaaagcagcaacagaaauaaagaaauaaaugaaauucaaaaugaaauaaauauuguguugugcagcauuaaaaaaucaauaaaaauuaaaaaugagcaagaucuaaaaaaaaaaaaaaaaaaaaaaaaaaaaaaaaaaaaaaaaaaaaaaaaaaaaaaaaaaaaaaaaugcaucccccccccccccccccccccccccccccccaaaggcucuuuucagagccaccagaauu

SEQ ID NO: 15725 - RNA, 2202 nt, Artificial Sequence
  mRNA product Design h-2 comprising derived and/or modified sequence from HRSV(Memphis-37)__AIY60640.1__F_DSCav1_mut3 (opt4)
gggagacccgugacccggaaguuguacggcuacgcgacuuucccucccacaaacccucgcgcccuuccuuuccuacuugggcccggcagaaagcuuaccauggagcugcccauccugaagaccaacgccaucaccaccauccuggccgccgugacccugugcuucgccagcagccagaacaucaccgaggaguucuaccagagcaccugcagcgccgugagcaagggcuaccugggcgcccugagaaccggcugguacaccagcgugaucaccaucgagcugagcaacaucaaggagaucaagugcaacggcaccgacgccaaggugaagcugaucaagcaggagcuggacaaguacaagaacgccgugaccgaccugcagcugcugaugcagagcacccccgccgccggcagcggcagcgccaucugcagcggcaucgccgugugcaaggugcugcaccuggagggcgaggugaacaagaucaagaacgcccugcugagcaccaacaaggccguggugagccugagcaacggcgugagcgugcugaccuucaaggugcuggaccugaagaacuacaucgacaagcagcugcugcccauccugaacaagcagagcugcagcauccccaacaucgagaccgugaucgaguuccagcagaagaacaacagacugcuggagaucaccagagaguucagcgugaacgccggcgugaccacccccgugagcaccuacaugcugaccaacagcgagcugcugagccugaucaacgacaugcccaucaccaacgaccagaagaagcugaugagcaacaacgugcagaucgugagacagcagagcuacagcaucaugugcaucaucaaggaggaggugcuggccuacguggugcagcugccccuguacggcgugaucgacacccccugcuggaagcugcacaccagcccccugugcaccaccaacaccaaggagggcagcaacaucugccugaccagaaccgacagaggcugguacugcgacaacgccggcagcgugagcuucuucccccaggccgagaccugcaaggugcagagcaacagaguguucugcgacaccaugaacagccugacccugcccagcgaggugaaccugugcaacaucgacaucuucaaccccaaguacgacugcaagaucaugaccagcaagaccgacgugagcagcagcgugaucaccagccugggcgccaucgugagcugcuacggcaagaccaagugcaccgccagcaacaagaacagaggcaucaucaagaccuucagcaacggcugcgacuacgugagcaacaagggcguggacaccgugagcgugggcaacacccuguacugcgugaacaagcaggagggccagagccuguacgugaagggcgagcccaucaucaacuucuacgacccccugguguuccccagcgacgaguucgacgccagcaucagccaggugaacgagaagaucaaccagagccuggccuucaucagaaagagcgacgagcugcugcacaacgugaacgugggcaagagcaccaccaacaucaugaucaccaccaucaucaucgugaucaucgugauccugcugcugcugaucgccgugggccuguuccuguacugcaaggccagaagcacccccgugacccugagcaaggaccagcugagcggcaucaacaacaucgccuucagcaacugaggacuagugaagggaacacccaaauuuaauucagccuuaagcacaauuaauuaagagugaaacguaauuguacaagcaguuggucacccaccauagggcaugaucaacaccgcaaccuuuccuuuuucccccagugauucugaaaaaccccucuucccuucagcuugcuuagauguuccaaauuuaguaagcuuaaggcggccuacagaagaaaaagaaaaaaaaggccacaaaaguucccucucacuuucaguaaauaaaauaaaagcagcaacagaaauaaagaaauaaaugaaauucaaaaugaaauaaauauuguguugugcagcauuaaaaaaucaauaaaaauuaaaaaugagcaagaucuaaaaaaaaaaaaaaaaaaaaaaaaaaaaaaaaaaaaaaaaaaaaaaaaaaaaaaaaaaaaaaaaugcaucccccccccccccccccccccccccccccccaaaggcucuuuucagagccaccagaauu

SEQ ID NO: 15726 - RNA, 2202 nt, Artificial Sequence
  mRNA product Design h-2 comprising derived and/or modified sequence from HRSV(Memphis-37)__AIY60640.1__F_DSCav1_mut3 (opt5)
gggagacccgugacccggaaguuguacggcuacgcgacuuucccucccacaaacccucgcgcccuuccuuuccuacuugggcccggcagaaagcuuaccauggagcugcccauccucaagaccaacgccauuacaacgauccuggcugccgugacccuuugcuucgcgagcucccagaauauuacagaagaguuuuaccaaucuaccuguagcgcugucuccaaaggcuaucugggggcccucagaacaggaugguacaccucuguuaucacaauugaacugagcaacaucaaggagaucaaaugcaauggcaccgacgccaaggugaaacuuauuaagcaggaacuggauaaguauaaaaacgcugugacggaccuccagcugcugaugcaguccaccccugccgcugggucuggaagcgccaucuguuccggcauugcggucugcaaggugcuccaccuggagggggagguuaauaaaaucaagaacgcccuucugagcacaaauaaagcuguggucucucucuccaacggagugagcguucugaccuucaaggugcuugaucugaagaauuacauugacaaacaacuccugccgauccugaacaagcagucuuguuccauucccaauaucgaaacagucaucgaguuucagcagaaaaacaaucggcuccuggaaauuacccgcgaguucagcgugaacgccggcgugacgacaccugucucuaccuauaugcuuacaaauuccgagcugcucagccugaucaacgauaugcccauuaccaacgaccaaaagaaacuuauguccaauaacguucagaucgugagacagcagucuuacagcauuaugugcaucaucaaggaagaggugcuggcuuaugucgugcaacucccucuguacggcguuauugauacccccuguuggaaacugcauacauccccucucugcacgaccaauacaaaggaagggagcaacaucugucugacccggacagaccgcggaugguacugcgauaaugccggcucuguguccuuuuucccgcaggcggagaccuguaagguccagagcaacagaguguuuugcgacacgaugaacucucuuacacugcccagcgaaguuaaucucugcaauauugauaucuucaacccuaaauaugacuguaagauuaugaccuccaaaaccgaugugucuagcuccgucaucacaagccugggggccaucgugucuugcuacggaaagaccaaauguacagcuuccaauaagaaccggggcauuaucaagacguuuagcaaugggugcgacuaugucucuaacaaaggaguggacaccguuuccgugggcaauacacuuuacugugucaacaagcaagagggccagagccuguaugugaaaggggagcccauuaucaacuucuacgauccucucguuuuucccuccgacgaguucgaugccucuauuagccaggugaaugaaaagaucaaccagucccuggcuuuuauucgcaaaucugacgaacugcuccacaaugucaacgugggaaagagcaccacaaauaucaugaucaccacgauuaucauugugaucauuguuauccugcuucugcucaucgccgucggccuguuccuguauugcaaggccagauccaccccggugacacuuagcaaagaucaacucucugggauuaacaauaucgcuuucuccaacugaggacuagugaagggaacacccaaauuuaauucagccuuaagcacaauuaauuaagagugaaacguaauuguacaagcaguuggucacccaccauagggcaugaucaacaccgcaaccuuuccuuuuucccccagugauucugaaaaaccccucuucccuucagcuugcuuagauguuccaaauuuaguaagcuuaaggcggccuacagaagaaaaagaaaaaaaaggccacaaaaguucccucucacuuucaguaaauaaaauaaaagcagcaacagaaauaaagaaauaaaugaaauucaaaaugaaauaaauauuguguugugcagcauuaaaaaaucaauaaaaauuaaaaaugagcaagaucuaaaaaaaaaaaaaaaaaaaaaaaaaaaaaaaaaaaaaaaaaaaaaaaaaaaaaaaaaaaaaaaaugcaucccccccccccccccccccccccccccccccaaaggcucuuuucagagccaccagaauu

SEQ ID NO: 15727 - RNA, 2202 nt, Artificial Sequence
  mRNA product Design h-2 comprising derived and/or modified sequence from HRSV(Memphis-37)__AIY60640.1__F_DSCav1_mut3 (opt6)
gggagacccgugacccggaaguuguacggcuacgcgacuuucccucccacaaacccucgcgcccuuccuuuccuacuugggcccggcagaaagcuuaccauggaauuaccaauacuaaaaacaaaugccaucaccaccauccuggccgccguaacauuaugcuucgcaaguucacaaaauauaacagaagaauuuuaucaaucaacuugcagcgccguaucaaaaggcuacuuaggcgcacuacguacaggaugguacacaucaguaauaaccauagaacuauccaauauuaaagaaauaaaaugcaauggaacagacgcaaaaguuaaacuaauaaaacaagaauuagacaaauacaaaaacgcaguaaccgaccuucaauuacuaaugcaaucuacccccgcugcagguuccggaucagcaauauguucaggaauugcaguaugcaaaguccuacacuuagaaggagaaguaaacaaaauaaaaaacgcacuauuaagcaccaauaaagcagucguaucauuauccaacggcguuucaguacuaacauuuaaaguacuugaccuaaaaaacuauauagacaaacaacuacuucccauccuuaacaaacaaagcugcucaauaccuaauaucgaaacaguaauagaauuucaacaaaaaaacaaucgauuauuagaaaucacacgagaauuuucugucaacgcaggagucaccacacccguaucuacuuauauguuaaccaacucugaauuauuaucacuaaucaaugacaugccaauaacaaacgaucaaaaaaaauuaaugucaaauaacguacaaauaguaagacaacaaucauacucaauaaugugcauuauaaaagaagaaguacuagccuauguuguacaacucccacucuacggcguaauagacacaccaugcuggaaauuacacacuucaccacuaugcacaacaaacacaaaagaaggaucaaacaucugccuaaccagaaccgauagaggaugguauugcgacaaugccggaucaguuucauucuucccacaagcagaaacaugcaaaguacaauccaacagaguuuucugugacacaaugaacucgcuaacauuacccagcgaaguaaaccucugcaacauagacauauucaacccaaaauacgauugcaaaauaaugacuucuaaaacagauguuuccucaagcgucauaacgaguuuaggagcaauaguaagcuguuacggaaaaaccaaauguaccgcaucaaacaaaaaccgaggaauaauaaaaaccuuuucaaacggaugcgauuacgucuccaacaaaggagucgacacaguaucaguuggcaauacucuuuacugcguaaauaaacaagaaggacaaucacuauacguaaaaggcgaaccaauaauaaacuucuacgacccccucgucuucccuucagaugaauuugacgcaagcaucucacaaguuaaugaaaaaauaaaucaauccuuagcauucauacgaaaaucagacgaacuauuacacaacguaaacguaggaaaaucaacgacaaacauaaugauaacaacuaucauuauagucauaauagucauacuacuacuauuaauagccguaggcuuauuccuauacugcaaagcaagaucuacuccaguaacacucucaaaagaccaauuaucuggaauaaauaacauagcauucucuaauuaaggacuagugaagggaacacccaaauuuaauucagccuuaagcacaauuaauuaagagugaaacguaauuguacaagcaguuggucacccaccauagggcaugaucaacaccgcaaccuuuccuuuuucccccagugauucugaaaaaccccucuucccuucagcuugcuuagauguuccaaauuuaguaagcuuaaggcggccuacagaagaaaaagaaaaaaaaggccacaaaaguucccucucacuuucaguaaauaaaauaaaagcagcaacagaaauaaagaaauaaaugaaauucaaaaugaaauaaauauuguguugugcagcauuaaaaaaucaauaaaaauuaaaaaugagcaagaucuaaaaaaaaaaaaaaaaaaaaaaaaaaaaaaaaaaaaaaaaaaaaaaaaaaaaaaaaaaaaaaaaugcaucccccccccccccccccccccccccccccccaaaggcucuuuucagagccaccagaauu

SEQ ID NO: 15728 - RNA, 2202 nt, Artificial Sequence
  mRNA product Design h-2 comprising derived and/or modified sequence from HRSV(Memphis-37)__AIY60640.1__F_DSCav1_mut3 (opt11)
gggagacccgugacccggaaguuguacggcuacgcgacuuucccucccacaaacccucgcgcccuuccuuuccuacuugggcccggcagaaagcuuaccauggaacuccccauccucaaaaccaacgccauuaccacgauccucgccgcagucacccucugcuucgccuccucacaaaacaucacagaagaauuuuaccaaaguaccugcuccgccgucagcaaaggauaccucggcgcccuccgcaccggcugguacacauccgucauaaccaucgaacucagcaacaucaaagaaaucaaauguaacggaaccgacgccaaaguaaaacuaauaaaacaagaacucgacaaauacaagaacgccgucaccgaccuccaacuccucaugcaaucuacccccgccgccggcucagguagcgccaucugcagcgguauugccgucugcaaaguacuccaccuagaaggagaagucaauaaaaucaaaaacgcccuacucuccaccaacaaggcagucgucagccucuccaacggcgucucagucuuaaccuucaaagugcucgaccucaaaaauuacauagacaaacaacuacuccccauucucaacaaacaauccugcuccauacccaacauagaaaccgucauugaauuucaacagaaaaacaaccgccuccucgaaaucacgcgcgaguucagugucaacgccggcgucaccaccccagucucgacauacaugcucacaaacucagaacuccucucguuaaucaacgacaugccaauaaccaacgaccaaaagaaacuaauguccaacaacguucaaauaguucgccaacaaucauacuccauaaugugcaucaucaaagaagaaguccucgccuacguuguacaauuaccccucuacggcgucaucgacacaccaugcuggaaacuccacacaucgccccucugcaccaccaacaccaaagaaggcagcaacauuugccucacccggacagaccgcggcugguacugcgacaaugcaggcagcgucucauucuucccacaagccgaaaccugcaaaguccaaagcaaccgugucuucugcgacacaaugaacucccuuacccucccaagcgaaguaaaccucugcaauauugacaucuucaaccccaaauacgacugcaaaaucaugaccuccaaaaccgacgucuccucaucagucaucaccucccuuggcgccauugucuccuguuacgguaaaaccaaaugcaccgccuccaacaaaaaccgcggcaucaucaaaaccuucucuaacggcugcgacuacgucucaaacaaaggcgucgacacugucuccgucggcaacacccuauacugcgucaacaagcaagaaggacagucccuauacguaaaaggugaaccaauuaucaacuucuacgacccccuagucuucccauccgacgaguucgaugccuccaucucccaaguaaaugaaaagaucaaucaaagccuggccuucauccgcaaauccgacgaacuacuccacaaugucaacgucggaaaaucaacaacaaacaucaugaucaccaccaucaucaucgucaucauaguaauccuccuacugcucaucgccgucggucucuuccuauacugcaaagcccguucuacuccagucacccucuccaaagaccaacuaucaggaaucaacaacaucgccuucagcaacuaaggacuagugaagggaacacccaaauuuaauucagccuuaagcacaauuaauuaagagugaaacguaauuguacaagcaguuggucacccaccauagggcaugaucaacaccgcaaccuuuccuuuuucccccagugauucugaaaaaccccucuucccuucagcuugcuuagauguuccaaauuuaguaagcuuaaggcggccuacagaagaaaaagaaaaaaaaggccacaaaaguucccucucacuuucaguaaauaaaauaaaagcagcaacagaaauaaagaaauaaaugaaauucaaaaugaaauaaauauuguguugugcagcauuaaaaaaucaauaaaaauuaaaaaugagcaagaucuaaaaaaaaaaaaaaaaaaaaaaaaaaaaaaaaaaaaaaaaaaaaaaaaaaaaaaaaaaaaaaaaugcaucccccccccccccccccccccccccccccccaaaggcucuuuucagagccaccagaauu

SEQ ID NO: 15729 - RNA, 1982 nt, Artificial Sequence
  mRNA product Design h-3 comprising derived and/or modified sequence from HRSV(Memphis-37)__AIY60640.1__F_DSCav1_mut3 (opt1)
gggagacccgugacccggaaguuguacggcuacgcgacuuucccucccacaaacccucgcgcccuuccuuuccuacuugggcccggcagaaagcuuaccauggagcugcccauccucaagaccaacgccaucaccacgauccuggccgcggugacccugugcuucgccagcucccagaacaucaccgaggaguucuaccagagcacgugcuccgccgucagcaagggcuaccucggcgcccugcgcaccgggugguacaccagcgugaucaccaucgagcuguccaacaucaaggagaucaagugcaacggcaccgacgccaaggugaagcucaucaagcaggagcuggacaaguacaagaacgcggucacggaccugcagcuccugaugcagagcaccccggccgccggcuccgggagcgcgaucugcuccggcaucgccgucugcaaggugcugcaccucgagggcgaggugaacaagaucaagaacgcccugcuguccaccaacaaggccgucgugagccucuccaacggggugagcguccugaccuucaaggugcuggaccucaagaacuacaucgacaagcagcugcugcccauccugaacaagcagagcugcuccauccccaacaucgagaccgucaucgaguuccagcagaagaacaaccgccuccuggagaucacgcgggaguucagcgugaacgcgggcgugaccacccccgucuccaccuacaugcugacgaacagcgagcuccugucccugaucaacgacaugccgaucaccaacgaccagaagaagcucaugagcaacaacgugcagaucgugcgccagcaguccuacagcaucaugugcaucaucaaggaggagguccuggccuacguggugcagcugccccucuacggggucaucgacacccccugcuggaagcugcacaccagcccccugugcacgaccaacaccaaggagggcuccaacaucugccucacccggacggaccgcgggugguacugcgacaacgccggcagcguguccuucuucccgcaggccgagaccugcaagguccagagcaaccggguguucugcgacaccaugaacucccugacccugcccagcgaggugaaccucugcaacaucgacaucuucaaccccaaguacgacugcaagaucaugacguccaagaccgacgucagcuccagcgugaucaccucccugggcgccaucgugagcugcuacgggaagaccaagugcacggcgagcaacaagaaccgcggcaucaucaagaccuucuccaacgggugcgacuacgucagcaacaagggcguggacaccguguccgucggcaacacccuguacugcgugaacaagcaggagggccagagccucuacgugaagggggagcccaucaucaacuucuacgacccgcuggucuuccccuccgacgaguucgacgccagcaucucccaggugaacgagaagaucaaccagagccuggccuucauccggaaguccgacgagcuccugcacaacgugaacgucggcaagagcaccacgaacaucaugaucaccaccaucaucaucgugaucaucgugauccugcugcuccugaucgccgucgggcuguuccucuacugcaaggcccgcuccacccccgugacgcugagcaaggaccagcuguccgggaucaacaacaucgcguucagcaacugaggacuaguggaagcauuuuccuggcugauuaaaagaaauuacucagcuauggucaucuguuccuguuagaaggcuaugcagcauauuauauacuaugcgcauguuaugaaaugcauaauaaaaaauuuuaaaaaaucuaaaagaucuaaaaaaaaaaaaaaaaaaaaaaaaaaaaaaaaaaaaaaaaaaaaaaaaaaaaaaaaaaaaaaaaugcaucccccccccccccccccccccccccccccccaaaggcucuuuucagagccaccagaauu

SEQ ID NO: 15730 - RNA, 1982 nt, Artificial Sequence
  mRNA product Design h-3 comprising derived and/or modified sequence from HRSV(Memphis-37)__AIY60640.1__F_DSCav1_mut3 (opt1)
gggagacccgugacccggaaguuguacggcuacgcgacuuucccucccacaaacccucgcgcccuuccuuuccuacuugggcccggcagaaagcuuaccauggagcugcccauccucaagaccaacgccaucaccacgauccuggccgcggugacccugugcuucgccagcucccagaacaucaccgaggaguucuaccagagcacgugcuccgccgucagcaagggcuaccucggggcccugcgcaccggcugguacaccuccgugaucaccaucgagcugagcaacaucaaggagaucaagugcaacgggaccgacgccaaggugaagcucaucaagcaggagcuggacaaguacaagaacgcggucacggaccugcagcuccugaugcaguccaccccggccgccggcagcggguccgccaucugcagcggcaucgcggugugcaaggugcugcaccucgagggcgaggucaacaagaucaagaacgcccugcuguccaccaacaaggccguggugagccucuccaacggggucagcgugcugaccuucaaggugcuggaccucaagaacuacaucgacaagcagcugcugcccauccucaacaagcaguccugcagcauccccaacaucgagacggucaucgaguuccagcagaagaacaaccggcugcuggagaucacccgcgaguucuccgugaacgccggcgugaccacccccgucagcacguacaugcucaccaacuccgagcugcugagccucaucaacgacaugccgaucaccaacgaccagaagaagcugaugagcaacaacgugcagaucgugcggcagcaguccuacagcaucaugugcaucaucaaggaggagguccuggccuacguggugcagcucccccuguacggggucaucgacacccccugcuggaagcugcacacgagcccccucugcaccaccaacaccaaggagggcuccaacaucugccugacgcgcaccgaccgggggugguacugcgacaacgcgggcuccgugagcuucuucccgcaggccgagaccugcaaggugcaguccaaccgcgucuucugcgacaccaugaacagccugacgcuccccuccgaggugaaccugugcaacaucgacaucuucaaccccaaguacgacugcaagaucaugaccagcaagaccgacgucuccagcuccgugaucaccagccugggcgccaucguguccugcuacgggaagacgaagugcaccgccagcaacaagaaccggggcaucaucaagaccuucuccaacgggugcgacuacgucagcaacaagggcguggacaccguguccgucggcaacacgcucuacugcgugaacaagcaggaggggcagagccuguacgugaagggcgagcccaucaucaacuucuacgacccgcuggucuuccccagcgacgaguucgacgccuccaucagccaggugaacgagaagaucaaccagucccucgcguucauccgcaagagcgacgagcugcugcacaacgugaacgucgggaaguccaccaccaacaucaugaucaccaccaucaucaucgugaucaucgugauccuccugcugcucaucgccgucggccuguuccuguacugcaaggcccggagcacgcccgugacccuguccaaggaccagcucagcgggaucaacaacaucgccuucuccaacugaggacuaguggaagcauuuuccuggcugauuaaaagaaauuacucagcuauggucaucuguuccuguuagaaggcuaugcagcauauuauauacuaugcgcauguuaugaaaugcauaauaaaaaauuuuaaaaaaucuaaaagaucuaaaaaaaaaaaaaaaaaaaaaaaaaaaaaaaaaaaaaaaaaaaaaaaaaaaaaaaaaaaaaaaaugcaucccccccccccccccccccccccccccccccaaaggcucuuuucagagccaccagaauu

SEQ ID NO: 15731 - RNA, 1982 nt, Artificial Sequence
  mRNA product Design h-3 comprising derived and/or modified sequence from HRSV(Memphis-37)__AIY60640.1__F_DSCav1_mut3 (opt2)
gggagacccgugacccggaaguuguacggcuacgcgacuuucccucccacaaacccucgcgcccuuccuuuccuacuugggcccggcagaaagcuuaccauggagcuccccauccucaagaccaacgccaucaccaccauccucgccgccgucacccucugcuucgccuccucccagaacaucaccgaggaguucuaccaguccaccugcuccgccgucuccaagggcuaccucggcgcccuccgcaccggcugguacaccuccgucaucaccaucgagcucuccaacaucaaggagaucaagugcaacggcaccgacgccaaggucaagcucaucaagcaggagcucgacaaguacaagaacgccgucaccgaccuccagcuccucaugcaguccacccccgccgccggcuccggcuccgccaucugcuccggcaucgccgucugcaagguccuccaccucgagggcgaggucaacaagaucaagaacgcccuccucuccaccaacaaggccgucgucucccucuccaacggcgucuccguccucaccuucaagguccucgaccucaagaacuacaucgacaagcagcuccuccccauccucaacaagcaguccugcuccauccccaacaucgagaccgucaucgaguuccagcagaagaacaaccgccuccucgagaucacccgcgaguucuccgucaacgccggcgucaccacccccgucuccaccuacaugcucaccaacuccgagcuccucucccucaucaacgacaugcccaucaccaacgaccagaagaagcucauguccaacaacguccagaucguccgccagcaguccuacuccaucaugugcaucaucaaggaggagguccucgccuacgucguccagcucccccucuacggcgucaucgacacccccugcuggaagcuccacaccuccccccucugcaccaccaacaccaaggagggcuccaacaucugccucacccgcaccgaccgcggcugguacugcgacaacgccggcuccgucuccuucuucccccaggccgagaccugcaagguccaguccaaccgcgucuucugcgacaccaugaacucccucacccuccccuccgaggucaaccucugcaacaucgacaucuucaaccccaaguacgacugcaagaucaugaccuccaagaccgacgucuccuccuccgucaucaccucccucggcgccaucgucuccugcuacggcaagaccaagugcaccgccuccaacaagaaccgcggcaucaucaagaccuucuccaacggcugcgacuacgucuccaacaagggcgucgacaccgucuccgucggcaacacccucuacugcgucaacaagcaggagggccagucccucuacgucaagggcgagcccaucaucaacuucuacgacccccucgucuuccccuccgacgaguucgacgccuccaucucccaggucaacgagaagaucaaccagucccucgccuucauccgcaaguccgacgagcuccuccacaacgucaacgucggcaaguccaccaccaacaucaugaucaccaccaucaucaucgucaucaucgucauccuccuccuccucaucgccgucggccucuuccucuacugcaaggcccgcuccacccccgucacccucuccaaggaccagcucuccggcaucaacaacaucgccuucuccaacugaggacuaguggaagcauuuuccuggcugauuaaaagaaauuacucagcuauggucaucuguuccuguuagaaggcuaugcagcauauuauauacuaugcgcauguuaugaaaugcauaauaaaaaauuuuaaaaaaucuaaaagaucuaaaaaaaaaaaaaaaaaaaaaaaaaaaaaaaaaaaaaaaaaaaaaaaaaaaaaaaaaaaaaaaaugcaucccccccccccccccccccccccccccccccaaaggcucuuuucagagccaccagaauu

SEQ ID NO: 15732 - RNA, 1982 nt, Artificial Sequence
  mRNA product Design h-3 comprising derived and/or modified sequence from HRSV(Memphis-37)__AIY60640.1__F_DSCav1_mut3 (opt3)
gggagacccgugacccggaaguuguacggcuacgcgacuuucccucccacaaacccucgcgcccuuccuuuccuacuugggcccggcagaaagcuuaccauggagcugcccauccucaagaccaacgccauuacaacuauacuugcugcagugacgcugugcuucgccagcucccagaauaucaccgaagaguuuuaccaaucuacauguucagcggucaguaaaggcuauuugggggcuuuaagaacuggaugguacaccagcguuauuacaaucgaacuguccaacauuaaggagaucaaaugcaaugguaccgacgccaaggugaaacuaauaaagcaggaacucgauaaguauaaaaacgcaguaacugaccugcagcuucugaugcagucuacuccugccgcuggcucggggucagcaaucuguagcggaauugccgugugcaaggucuugcaccucgagggcgaggugaauaaaaucaagaacgcucugcugaguaccaauaaagccguugugucccucucuaacggugucagcguguuaacguucaagguacuggaucuuaagaauuacauugacaaacaauugcugccaauccuaaacaagcaguccuguucaauaccgaauauugaaacuguuaucgaguuucagcagaaaaacaauaggcuccuggaaauuacccgggaguucagugugaacgcgggggucacaacucccgugagcaccuauaugcuuacaaauucugagcuguugucccucaucaacgauaugccuaucaccaacgaccaaaagaaacugaugucaaauaacgugcagauuguccgccagcagagcuacaguauaaugugcaucauuaaggaagagguuuuagcauaugugguacaacugccacucuacggagugaucgauacgcccuguuggaaacuucauacuucuccucugugcacaaccaauacuaaggaaggcuccaacauauguuugacacgaaccgaccguggcugguacugcgauaaugccgggagcgucucguuuuucccacaggcugagacguguaaggugcagucuaacagaguuuucugcgacaccaugaacucccuaacacugcccucagaagugaaucucugcaauauugauaucuucaacccuaaauaugacuguaagaucaugacaaguaaaaccgaugucagcuccucugugauuacaagccugggagccaucguaucaugcuacgguaagacuaaauguaccgcaaguaauaagaacaggggcauuauaaagacauuuuccaaugggugcgacuauguuagcaacaaaggaguggacaccgucucugugggcaauacucuuuacugugucaacaagcaagagggucagucacuguaugugaaaggggagccaaucauuaacuucuacgauccguugguuuuucccagugacgaauuugaugcuagcaucucccaggugaaugagaagaucaaccagucucucgccuuuauucggaaaucggacgaacuguuacacaauguaaacgucggaaagagcacgacaaauauaaugaucaccacuauuaucauugugaucauaguuauccugcuacuccugauugcggugggccuuuucuuguauugcaaggcccgcuccaccccugucacacugucaaaagaucaacucaguggcaucaacaauauugcauucucuaacugaggacuaguggaagcauuuuccuggcugauuaaaagaaauuacucagcuauggucaucuguuccuguuagaaggcuaugcagcauauuauauacuaugcgcauguuaugaaaugcauaauaaaaaauuuuaaaaaaucuaaaagaucuaaaaaaaaaaaaaaaaaaaaaaaaaaaaaaaaaaaaaaaaaaaaaaaaaaaaaaaaaaaaaaaaugcaucccccccccccccccccccccccccccccccaaaggcucuuuucagagccaccagaauu

SEQ ID NO: 15733 - RNA, 1982 nt, Artificial Sequence
  mRNA product Design h-3 comprising derived and/or modified sequence from HRSV(Memphis-37)__AIY60640.1__F_DSCav1_mut3 (opt4)
gggagacccgugacccggaaguuguacggcuacgcgacuuucccucccacaaacccucgcgcccuuccuuuccuacuugggcccggcagaaagcuuaccauggagcugcccauccugaagaccaacgccaucaccaccauccuggccgccgugacccugugcuucgccagcagccagaacaucaccgaggaguucuaccagagcaccugcagcgccgugagcaagggcuaccugggcgcccugagaaccggcugguacaccagcgugaucaccaucgagcugagcaacaucaaggagaucaagugcaacggcaccgacgccaaggugaagcugaucaagcaggagcuggacaaguacaagaacgccgugaccgaccugcagcugcugaugcagagcacccccgccgccggcagcggcagcgccaucugcagcggcaucgccgugugcaaggugcugcaccuggagggcgaggugaacaagaucaagaacgcccugcugagcaccaacaaggccguggugagccugagcaacggcgugagcgugcugaccuucaaggugcuggaccugaagaacuacaucgacaagcagcugcugcccauccugaacaagcagagcugcagcauccccaacaucgagaccgugaucgaguuccagcagaagaacaacagacugcuggagaucaccagagaguucagcgugaacgccggcgugaccacccccgugagcaccuacaugcugaccaacagcgagcugcugagccugaucaacgacaugcccaucaccaacgaccagaagaagcugaugagcaacaacgugcagaucgugagacagcagagcuacagcaucaugugcaucaucaaggaggaggugcuggccuacguggugcagcugccccuguacggcgugaucgacacccccugcuggaagcugcacaccagcccccugugcaccaccaacaccaaggagggcagcaacaucugccugaccagaaccgacagaggcugguacugcgacaacgccggcagcgugagcuucuucccccaggccgagaccugcaaggugcagagcaacagaguguucugcgacaccaugaacagccugacccugcccagcgaggugaaccugugcaacaucgacaucuucaaccccaaguacgacugcaagaucaugaccagcaagaccgacgugagcagcagcgugaucaccagccugggcgccaucgugagcugcuacggcaagaccaagugcaccgccagcaacaagaacagaggcaucaucaagaccuucagcaacggcugcgacuacgugagcaacaagggcguggacaccgugagcgugggcaacacccuguacugcgugaacaagcaggagggccagagccuguacgugaagggcgagcccaucaucaacuucuacgacccccugguguuccccagcgacgaguucgacgccagcaucagccaggugaacgagaagaucaaccagagccuggccuucaucagaaagagcgacgagcugcugcacaacgugaacgugggcaagagcaccaccaacaucaugaucaccaccaucaucaucgugaucaucgugauccugcugcugcugaucgccgugggccuguuccuguacugcaaggccagaagcacccccgugacccugagcaaggaccagcugagcggcaucaacaacaucgccuucagcaacugaggacuaguggaagcauuuuccuggcugauuaaaagaaauuacucagcuauggucaucuguuccuguuagaaggcuaugcagcauauuauauacuaugcgcauguuaugaaaugcauaauaaaaaauuuuaaaaaaucuaaaagaucuaaaaaaaaaaaaaaaaaaaaaaaaaaaaaaaaaaaaaaaaaaaaaaaaaaaaaaaaaaaaaaaaugcaucccccccccccccccccccccccccccccccaaaggcucuuuucagagccaccagaauu

SEQ ID NO: 15734 - RNA, 1982 nt, Artificial Sequence
  mRNA product Design h-3 comprising derived and/or modified sequence from HRSV(Memphis-37)__AIY60640.1__F_DSCav1_mut3 (opt5)
gggagacccgugacccggaaguuguacggcuacgcgacuuucccucccacaaacccucgcgcccuuccuuuccuacuugggcccggcagaaagcuuaccauggagcugcccauccucaagaccaacgccauuacaacgauccuggcugccgugacccuuugcuucgcgagcucccagaauauuacagaagaguuuuaccaaucuaccuguagcgcugucuccaaaggcuaucugggggcccucagaacaggaugguacaccucuguuaucacaauugaacugagcaacaucaaggagaucaaaugcaauggcaccgacgccaaggugaaacuuauuaagcaggaacuggauaaguauaaaaacgcugugacggaccuccagcugcugaugcaguccaccccugccgcugggucuggaagcgccaucuguuccggcauugcggucugcaaggugcuccaccuggagggggagguuaauaaaaucaagaacgcccuucugagcacaaauaaagcuguggucucucucuccaacggagugagcguucugaccuucaaggugcuugaucugaagaauuacauugacaaacaacuccugccgauccugaacaagcagucuuguuccauucccaauaucgaaacagucaucgaguuucagcagaaaaacaaucggcuccuggaaauuacccgcgaguucagcgugaacgccggcgugacgacaccugucucuaccuauaugcuuacaaauuccgagcugcucagccugaucaacgauaugcccauuaccaacgaccaaaagaaacuuauguccaauaacguucagaucgugagacagcagucuuacagcauuaugugcaucaucaaggaagaggugcuggcuuaugucgugcaacucccucuguacggcguuauugauacccccuguuggaaacugcauacauccccucucugcacgaccaauacaaaggaagggagcaacaucugucugacccggacagaccgcggaugguacugcgauaaugccggcucuguguccuuuuucccgcaggcggagaccuguaagguccagagcaacagaguguuuugcgacacgaugaacucucuuacacugcccagcgaaguuaaucucugcaauauugauaucuucaacccuaaauaugacuguaagauuaugaccuccaaaaccgaugugucuagcuccgucaucacaagccugggggccaucgugucuugcuacggaaagaccaaauguacagcuuccaauaagaaccggggcauuaucaagacguuuagcaaugggugcgacuaugucucuaacaaaggaguggacaccguuuccgugggcaauacacuuuacugugucaacaagcaagagggccagagccuguaugugaaaggggagcccauuaucaacuucuacgauccucucguuuuucccuccgacgaguucgaugccucuauuagccaggugaaugaaaagaucaaccagucccuggcuuuuauucgcaaaucugacgaacugcuccacaaugucaacgugggaaagagcaccacaaauaucaugaucaccacgauuaucauugugaucauuguuauccugcuucugcucaucgccgucggccuguuccuguauugcaaggccagauccaccccggugacacuuagcaaagaucaacucucugggauuaacaauaucgcuuucuccaacugaggacuaguggaagcauuuuccuggcugauuaaaagaaauuacucagcuauggucaucuguuccuguuagaaggcuaugcagcauauuauauacuaugcgcauguuaugaaaugcauaauaaaaaauuuuaaaaaaucuaaaagaucuaaaaaaaaaaaaaaaaaaaaaaaaaaaaaaaaaaaaaaaaaaaaaaaaaaaaaaaaaaaaaaaaugcaucccccccccccccccccccccccccccccccaaaggcucuuuucagagccaccagaauu

SEQ ID NO: 15735 - RNA, 1982 nt, Artificial Sequence
  mRNA product Design h-3 comprising derived and/or modified sequence from HRSV(Memphis-37)__AIY60640.1__F_DSCav1_mut3 (opt6)
gggagacccgugacccggaaguuguacggcuacgcgacuuucccucccacaaacccucgcgcccuuccuuuccuacuugggcccggcagaaagcuuaccauggaauuaccaauacuaaaaacaaaugccaucaccaccauccuggccgccguaacauuaugcuucgcaaguucacaaaauauaacagaagaauuuuaucaaucaacuugcagcgccguaucaaaaggcuacuuaggcgcacuacguacaggaugguacacaucaguaauaaccauagaacuauccaauauuaaagaaauaaaaugcaauggaacagacgcaaaaguuaaacuaauaaaacaagaauuagacaaauacaaaaacgcaguaaccgaccuucaauuacuaaugcaaucuacccccgcugcagguuccggaucagcaauauguucaggaauugcaguaugcaaaguccuacacuuagaaggagaaguaaacaaaauaaaaaacgcacuauuaagcaccaauaaagcagucguaucauuauccaacggcguuucaguacuaacauuuaaaguacuugaccuaaaaaacuauauagacaaacaacuacuucccauccuuaacaaacaaagcugcucaauaccuaauaucgaaacaguaauagaauuucaacaaaaaaacaaucgauuauuagaaaucacacgagaauuuucugucaacgcaggagucaccacacccguaucuacuuauauguuaaccaacucugaauuauuaucacuaaucaaugacaugccaauaacaaacgaucaaaaaaaauuaaugucaaauaacguacaaauaguaagacaacaaucauacucaauaaugugcauuauaaaagaagaaguacuagccuauguuguacaacucccacucuacggcguaauagacacaccaugcuggaaauuacacacuucaccacuaugcacaacaaacacaaaagaaggaucaaacaucugccuaaccagaaccgauagaggaugguauugcgacaaugccggaucaguuucauucuucccacaagcagaaacaugcaaaguacaauccaacagaguuuucugugacacaaugaacucgcuaacauuacccagcgaaguaaaccucugcaacauagacauauucaacccaaaauacgauugcaaaauaaugacuucuaaaacagauguuuccucaagcgucauaacgaguuuaggagcaauaguaagcuguuacggaaaaaccaaauguaccgcaucaaacaaaaaccgaggaauaauaaaaaccuuuucaaacggaugcgauuacgucuccaacaaaggagucgacacaguaucaguuggcaauacucuuuacugcguaaauaaacaagaaggacaaucacuauacguaaaaggcgaaccaauaauaaacuucuacgacccccucgucuucccuucagaugaauuugacgcaagcaucucacaaguuaaugaaaaaauaaaucaauccuuagcauucauacgaaaaucagacgaacuauuacacaacguaaacguaggaaaaucaacgacaaacauaaugauaacaacuaucauuauagucauaauagucauacuacuacuauuaauagccguaggcuuauuccuauacugcaaagcaagaucuacuccaguaacacucucaaaagaccaauuaucuggaauaaauaacauagcauucucuaauuaaggacuaguggaagcauuuuccuggcugauuaaaagaaauuacucagcuauggucaucuguuccuguuagaaggcuaugcagcauauuauauacuaugcgcauguuaugaaaugcauaauaaaaaauuuuaaaaaaucuaaaagaucuaaaaaaaaaaaaaaaaaaaaaaaaaaaaaaaaaaaaaaaaaaaaaaaaaaaaaaaaaaaaaaaaugcaucccccccccccccccccccccccccccccccaaaggcucuuuucagagccaccagaauu

SEQ ID NO: 15736 - RNA, 1982 nt, Artificial Sequence
  mRNA product Design h-3 comprising derived and/or modified sequence from HRSV(Memphis-37)__AIY60640.1__F_DSCav1_mut3 (opt11)
gggagacccgugacccggaaguuguacggcuacgcgacuuucccucccacaaacccucgcgcccuuccuuuccuacuugggcccggcagaaagcuuaccauggaacuccccauccucaaaaccaacgccauuaccacgauccucgccgcagucacccucugcuucgccuccucacaaaacaucacagaagaauuuuaccaaaguaccugcuccgccgucagcaaaggauaccucggcgcccuccgcaccggcugguacacauccgucauaaccaucgaacucagcaacaucaaagaaaucaaauguaacggaaccgacgccaaaguaaaacuaauaaaacaagaacucgacaaauacaagaacgccgucaccgaccuccaacuccucaugcaaucuacccccgccgccggcucagguagcgccaucugcagcgguauugccgucugcaaaguacuccaccuagaaggagaagucaauaaaaucaaaaacgcccuacucuccaccaacaaggcagucgucagccucuccaacggcgucucagucuuaaccuucaaagugcucgaccucaaaaauuacauagacaaacaacuacuccccauucucaacaaacaauccugcuccauacccaacauagaaaccgucauugaauuucaacagaaaaacaaccgccuccucgaaaucacgcgcgaguucagugucaacgccggcgucaccaccccagucucgacauacaugcucacaaacucagaacuccucucguuaaucaacgacaugccaauaaccaacgaccaaaagaaacuaauguccaacaacguucaaauaguucgccaacaaucauacuccauaaugugcaucaucaaagaagaaguccucgccuacguuguacaauuaccccucuacggcgucaucgacacaccaugcuggaaacuccacacaucgccccucugcaccaccaacaccaaagaaggcagcaacauuugccucacccggacagaccgcggcugguacugcgacaaugcaggcagcgucucauucuucccacaagccgaaaccugcaaaguccaaagcaaccgugucuucugcgacacaaugaacucccuuacccucccaagcgaaguaaaccucugcaauauugacaucuucaaccccaaauacgacugcaaaaucaugaccuccaaaaccgacgucuccucaucagucaucaccucccuuggcgccauugucuccuguuacgguaaaaccaaaugcaccgccuccaacaaaaaccgcggcaucaucaaaaccuucucuaacggcugcgacuacgucucaaacaaaggcgucgacacugucuccgucggcaacacccuauacugcgucaacaagcaagaaggacagucccuauacguaaaaggugaaccaauuaucaacuucuacgacccccuagucuucccauccgacgaguucgaugccuccaucucccaaguaaaugaaaagaucaaucaaagccuggccuucauccgcaaauccgacgaacuacuccacaaugucaacgucggaaaaucaacaacaaacaucaugaucaccaccaucaucaucgucaucauaguaauccuccuacugcucaucgccgucggucucuuccuauacugcaaagcccguucuacuccagucacccucuccaaagaccaacuaucaggaaucaacaacaucgccuucagcaacuaaggacuaguggaagcauuuuccuggcugauuaaaagaaauuacucagcuauggucaucuguuccuguuagaaggcuaugcagcauauuauauacuaugcgcauguuaugaaaugcauaauaaaaaauuuuaaaaaaucuaaaagaucuaaaaaaaaaaaaaaaaaaaaaaaaaaaaaaaaaaaaaaaaaaaaaaaaaaaaaaaaaaaaaaaaugcaucccccccccccccccccccccccccccccccaaaggcucuuuucagagccaccagaauu

SEQ ID NO: 15737 - RNA, 2045 nt, Artificial Sequence
  mRNA product Design h-4 comprising derived and/or modified sequence from HRSV(Memphis-37)__AIY60640.1__F_DSCav1_mut3 (opt1)
gggagagggcgcuuggcuugcaaggacccugagcugcggcauugaagcacacccaacccaacucgacugaagucagccucacugaaccggaucugagaaucuucucucucugggcuugccagggcucuccgaaccuagcuagcauccucuucaauuccaacuagaaagcuuaccauggagcugcccauccucaagaccaacgccaucaccacgauccuggccgcggugacccugugcuucgccagcucccagaacaucaccgaggaguucuaccagagcacgugcuccgccgucagcaagggcuaccucggcgcccugcgcaccgggugguacaccagcgugaucaccaucgagcuguccaacaucaaggagaucaagugcaacggcaccgacgccaaggugaagcucaucaagcaggagcuggacaaguacaagaacgcggucacggaccugcagcuccugaugcagagcaccccggccgccggcuccgggagcgcgaucugcuccggcaucgccgucugcaaggugcugcaccucgagggcgaggugaacaagaucaagaacgcccugcuguccaccaacaaggccgucgugagccucuccaacggggugagcguccugaccuucaaggugcuggaccucaagaacuacaucgacaagcagcugcugcccauccugaacaagcagagcugcuccauccccaacaucgagaccgucaucgaguuccagcagaagaacaaccgccuccuggagaucacgcgggaguucagcgugaacgcgggcgugaccacccccgucuccaccuacaugcugacgaacagcgagcuccugucccugaucaacgacaugccgaucaccaacgaccagaagaagcucaugagcaacaacgugcagaucgugcgccagcaguccuacagcaucaugugcaucaucaaggaggagguccuggccuacguggugcagcugccccucuacggggucaucgacacccccugcuggaagcugcacaccagcccccugugcacgaccaacaccaaggagggcuccaacaucugccucacccggacggaccgcgggugguacugcgacaacgccggcagcguguccuucuucccgcaggccgagaccugcaagguccagagcaaccggguguucugcgacaccaugaacucccugacccugcccagcgaggugaaccucugcaacaucgacaucuucaaccccaaguacgacugcaagaucaugacguccaagaccgacgucagcuccagcgugaucaccucccugggcgccaucgugagcugcuacgggaagaccaagugcacggcgagcaacaagaaccgcggcaucaucaagaccuucuccaacgggugcgacuacgucagcaacaagggcguggacaccguguccgucggcaacacccuguacugcgugaacaagcaggagggccagagccucuacgugaagggggagcccaucaucaacuucuacgacccgcuggucuuccccuccgacgaguucgacgccagcaucucccaggugaacgagaagaucaaccagagccuggccuucauccggaaguccgacgagcuccugcacaacgugaacgucggcaagagcaccacgaacaucaugaucaccaccaucaucaucgugaucaucgugauccugcugcuccugaucgccgucgggcuguuccucuacugcaaggcccgcuccacccccgugacgcugagcaaggaccagcuguccgggaucaacaacaucgcguucagcaacugaggacuaguaauaaggaaacuguaugaaugucugugggcaggaagugaagagauccuucuguaaagguuuuuggaauuaugucugcugaauaauaaacuuuuuugaaauaauaaaucugguagaaaaaugagaucuaaaaaaaaaaaaaaaaaaaaaaaaaaaaaaaaaaaaaaaaaaaaaaaaaaaaaaaaaaaaaaaaugcaucccccccccccccccccccccccccccccccaaaggcucuuuucagagccaccagaauu

SEQ ID NO: 15738 - RNA, 2045 nt, Artificial Sequence
  mRNA product Design h-4 comprising derived and/or modified sequence from HRSV(Memphis-37)__AIY60640.1__F_DSCav1_mut3 (opt1)
gggagagggcgcuuggcuugcaaggacccugagcugcggcauugaagcacacccaacccaacucgacugaagucagccucacugaaccggaucugagaaucuucucucucugggcuugccagggcucuccgaaccuagcuagcauccucuucaauuccaacuagaaagcuuaccauggagcugcccauccucaagaccaacgccaucaccacgauccuggccgcggugacccugugcuucgccagcucccagaacaucaccgaggaguucuaccagagcacgugcuccgccgucagcaagggcuaccucggggcccugcgcaccggcugguacaccuccgugaucaccaucgagcugagcaacaucaaggagaucaagugcaacgggaccgacgccaaggugaagcucaucaagcaggagcuggacaaguacaagaacgcggucacggaccugcagcuccugaugcaguccaccccggccgccggcagcggguccgccaucugcagcggcaucgcggugugcaaggugcugcaccucgagggcgaggucaacaagaucaagaacgcccugcuguccaccaacaaggccguggugagccucuccaacggggucagcgugcugaccuucaaggugcuggaccucaagaacuacaucgacaagcagcugcugcccauccucaacaagcaguccugcagcauccccaacaucgagacggucaucgaguuccagcagaagaacaaccggcugcuggagaucacccgcgaguucuccgugaacgccggcgugaccacccccgucagcacguacaugcucaccaacuccgagcugcugagccucaucaacgacaugccgaucaccaacgaccagaagaagcugaugagcaacaacgugcagaucgugcggcagcaguccuacagcaucaugugcaucaucaaggaggagguccuggccuacguggugcagcucccccuguacggggucaucgacacccccugcuggaagcugcacacgagcccccucugcaccaccaacaccaaggagggcuccaacaucugccugacgcgcaccgaccgggggugguacugcgacaacgcgggcuccgugagcuucuucccgcaggccgagaccugcaaggugcaguccaaccgcgucuucugcgacaccaugaacagccugacgcuccccuccgaggugaaccugugcaacaucgacaucuucaaccccaaguacgacugcaagaucaugaccagcaagaccgacgucuccagcuccgugaucaccagccugggcgccaucguguccugcuacgggaagacgaagugcaccgccagcaacaagaaccggggcaucaucaagaccuucuccaacgggugcgacuacgucagcaacaagggcguggacaccguguccgucggcaacacgcucuacugcgugaacaagcaggaggggcagagccuguacgugaagggcgagcccaucaucaacuucuacgacccgcuggucuuccccagcgacgaguucgacgccuccaucagccaggugaacgagaagaucaaccagucccucgcguucauccgcaagagcgacgagcugcugcacaacgugaacgucgggaaguccaccaccaacaucaugaucaccaccaucaucaucgugaucaucgugauccuccugcugcucaucgccgucggccuguuccuguacugcaaggcccggagcacgcccgugacccuguccaaggaccagcucagcgggaucaacaacaucgccuucuccaacugaggacuaguaauaaggaaacuguaugaaugucugugggcaggaagugaagagauccuucuguaaagguuuuuggaauuaugucugcugaauaauaaacuuuuuugaaauaauaaaucugguagaaaaaugagaucuaaaaaaaaaaaaaaaaaaaaaaaaaaaaaaaaaaaaaaaaaaaaaaaaaaaaaaaaaaaaaaaaugcaucccccccccccccccccccccccccccccccaaaggcucuuuucagagccaccagaauu

SEQ ID NO: 15739 - RNA, 2045 nt, Artificial Sequence
  mRNA product Design h-4 comprising derived and/or modified sequence from HRSV(Memphis-37)__AIY60640.1__F_DSCav1_mut3 (opt2)
gggagagggcgcuuggcuugcaaggacccugagcugcggcauugaagcacacccaacccaacucgacugaagucagccucacugaaccggaucugagaaucuucucucucugggcuugccagggcucuccgaaccuagcuagcauccucuucaauuccaacuagaaagcuuaccauggagcuccccauccucaagaccaacgccaucaccaccauccucgccgccgucacccucugcuucgccuccucccagaacaucaccgaggaguucuaccaguccaccugcuccgccgucuccaagggcuaccucggcgcccuccgcaccggcugguacaccuccgucaucaccaucgagcucuccaacaucaaggagaucaagugcaacggcaccgacgccaaggucaagcucaucaagcaggagcucgacaaguacaagaacgccgucaccgaccuccagcuccucaugcaguccacccccgccgccggcuccggcuccgccaucugcuccggcaucgccgucugcaagguccuccaccucgagggcgaggucaacaagaucaagaacgcccuccucuccaccaacaaggccgucgucucccucuccaacggcgucuccguccucaccuucaagguccucgaccucaagaacuacaucgacaagcagcuccuccccauccucaacaagcaguccugcuccauccccaacaucgagaccgucaucgaguuccagcagaagaacaaccgccuccucgagaucacccgcgaguucuccgucaacgccggcgucaccacccccgucuccaccuacaugcucaccaacuccgagcuccucucccucaucaacgacaugcccaucaccaacgaccagaagaagcucauguccaacaacguccagaucguccgccagcaguccuacuccaucaugugcaucaucaaggaggagguccucgccuacgucguccagcucccccucuacggcgucaucgacacccccugcuggaagcuccacaccuccccccucugcaccaccaacaccaaggagggcuccaacaucugccucacccgcaccgaccgcggcugguacugcgacaacgccggcuccgucuccuucuucccccaggccgagaccugcaagguccaguccaaccgcgucuucugcgacaccaugaacucccucacccuccccuccgaggucaaccucugcaacaucgacaucuucaaccccaaguacgacugcaagaucaugaccuccaagaccgacgucuccuccuccgucaucaccucccucggcgccaucgucuccugcuacggcaagaccaagugcaccgccuccaacaagaaccgcggcaucaucaagaccuucuccaacggcugcgacuacgucuccaacaagggcgucgacaccgucuccgucggcaacacccucuacugcgucaacaagcaggagggccagucccucuacgucaagggcgagcccaucaucaacuucuacgacccccucgucuuccccuccgacgaguucgacgccuccaucucccaggucaacgagaagaucaaccagucccucgccuucauccgcaaguccgacgagcuccuccacaacgucaacgucggcaaguccaccaccaacaucaugaucaccaccaucaucaucgucaucaucgucauccuccuccuccucaucgccgucggccucuuccucuacugcaaggcccgcuccacccccgucacccucuccaaggaccagcucuccggcaucaacaacaucgccuucuccaacugaggacuaguaauaaggaaacuguaugaaugucugugggcaggaagugaagagauccuucuguaaagguuuuuggaauuaugucugcugaauaauaaacuuuuuugaaauaauaaaucugguagaaaaaugagaucuaaaaaaaaaaaaaaaaaaaaaaaaaaaaaaaaaaaaaaaaaaaaaaaaaaaaaaaaaaaaaaaaugcaucccccccccccccccccccccccccccccccaaaggcucuuuucagagccaccagaauu

SEQ ID NO: 15740 - RNA, 2045 nt, Artificial Sequence
  mRNA product Design h-4 comprising derived and/or modified sequence from HRSV(Memphis-37)__AIY60640.1__F_DSCav1_mut3 (opt3)
gggagagggcgcuuggcuugcaaggacccugagcugcggcauugaagcacacccaacccaacucgacugaagucagccucacugaaccggaucugagaaucuucucucucugggcuugccagggcucuccgaaccuagcuagcauccucuucaauuccaacuagaaagcuuaccauggagcugcccauccucaagaccaacgccauuacaacuauacuugcugcagugacgcugugcuucgccagcucccagaauaucaccgaagaguuuuaccaaucuacauguucagcggucaguaaaggcuauuugggggcuuuaagaacuggaugguacaccagcguuauuacaaucgaacuguccaacauuaaggagaucaaaugcaaugguaccgacgccaaggugaaacuaauaaagcaggaacucgauaaguauaaaaacgcaguaacugaccugcagcuucugaugcagucuacuccugccgcuggcucggggucagcaaucuguagcggaauugccgugugcaaggucuugcaccucgagggcgaggugaauaaaaucaagaacgcucugcugaguaccaauaaagccguugugucccucucuaacggugucagcguguuaacguucaagguacuggaucuuaagaauuacauugacaaacaauugcugccaauccuaaacaagcaguccuguucaauaccgaauauugaaacuguuaucgaguuucagcagaaaaacaauaggcuccuggaaauuacccgggaguucagugugaacgcgggggucacaacucccgugagcaccuauaugcuuacaaauucugagcuguugucccucaucaacgauaugccuaucaccaacgaccaaaagaaacugaugucaaauaacgugcagauuguccgccagcagagcuacaguauaaugugcaucauuaaggaagagguuuuagcauaugugguacaacugccacucuacggagugaucgauacgcccuguuggaaacuucauacuucuccucugugcacaaccaauacuaaggaaggcuccaacauauguuugacacgaaccgaccguggcugguacugcgauaaugccgggagcgucucguuuuucccacaggcugagacguguaaggugcagucuaacagaguuuucugcgacaccaugaacucccuaacacugcccucagaagugaaucucugcaauauugauaucuucaacccuaaauaugacuguaagaucaugacaaguaaaaccgaugucagcuccucugugauuacaagccugggagccaucguaucaugcuacgguaagacuaaauguaccgcaaguaauaagaacaggggcauuauaaagacauuuuccaaugggugcgacuauguuagcaacaaaggaguggacaccgucucugugggcaauacucuuuacugugucaacaagcaagagggucagucacuguaugugaaaggggagccaaucauuaacuucuacgauccguugguuuuucccagugacgaauuugaugcuagcaucucccaggugaaugagaagaucaaccagucucucgccuuuauucggaaaucggacgaacuguuacacaauguaaacgucggaaagagcacgacaaauauaaugaucaccacuauuaucauugugaucauaguuauccugcuacuccugauugcggugggccuuuucuuguauugcaaggcccgcuccaccccugucacacugucaaaagaucaacucaguggcaucaacaauauugcauucucuaacugaggacuaguaauaaggaaacuguaugaaugucugugggcaggaagugaagagauccuucuguaaagguuuuuggaauuaugucugcugaauaauaaacuuuuuugaaauaauaaaucugguagaaaaaugagaucuaaaaaaaaaaaaaaaaaaaaaaaaaaaaaaaaaaaaaaaaaaaaaaaaaaaaaaaaaaaaaaaaugcaucccccccccccccccccccccccccccccccaaaggcucuuuucagagccaccagaauu

SEQ ID NO: 15741 - RNA, 2045 nt, Artificial Sequence
  mRNA product Design h-4 comprising derived and/or modified sequence from HRSV(Memphis-37)__AIY60640.1__F_DSCav1_mut3 (opt4)
gggagagggcgcuuggcuugcaaggacccugagcugcggcauugaagcacacccaacccaacucgacugaagucagccucacugaaccggaucugagaaucuucucucucugggcuugccagggcucuccgaaccuagcuagcauccucuucaauuccaacuagaaagcuuaccauggagcugcccauccugaagaccaacgccaucaccaccauccuggccgccgugacccugugcuucgccagcagccagaacaucaccgaggaguucuaccagagcaccugcagcgccgugagcaagggcuaccugggcgcccugagaaccggcugguacaccagcgugaucaccaucgagcugagcaacaucaaggagaucaagugcaacggcaccgacgccaaggugaagcugaucaagcaggagcuggacaaguacaagaacgccgugaccgaccugcagcugcugaugcagagcacccccgccgccggcagcggcagcgccaucugcagcggcaucgccgugugcaaggugcugcaccuggagggcgaggugaacaagaucaagaacgcccugcugagcaccaacaaggccguggugagccugagcaacggcgugagcgugcugaccuucaaggugcuggaccugaagaacuacaucgacaagcagcugcugcccauccugaacaagcagagcugcagcauccccaacaucgagaccgugaucgaguuccagcagaagaacaacagacugcuggagaucaccagagaguucagcgugaacgccggcgugaccacccccgugagcaccuacaugcugaccaacagcgagcugcugagccugaucaacgacaugcccaucaccaacgaccagaagaagcugaugagcaacaacgugcagaucgugagacagcagagcuacagcaucaugugcaucaucaaggaggaggugcuggccuacguggugcagcugccccuguacggcgugaucgacacccccugcuggaagcugcacaccagcccccugugcaccaccaacaccaaggagggcagcaacaucugccugaccagaaccgacagaggcugguacugcgacaacgccggcagcgugagcuucuucccccaggccgagaccugcaaggugcagagcaacagaguguucugcgacaccaugaacagccugacccugcccagcgaggugaaccugugcaacaucgacaucuucaaccccaaguacgacugcaagaucaugaccagcaagaccgacgugagcagcagcgugaucaccagccugggcgccaucgugagcugcuacggcaagaccaagugcaccgccagcaacaagaacagaggcaucaucaagaccuucagcaacggcugcgacuacgugagcaacaagggcguggacaccgugagcgugggcaacacccuguacugcgugaacaagcaggagggccagagccuguacgugaagggcgagcccaucaucaacuucuacgacccccugguguuccccagcgacgaguucgacgccagcaucagccaggugaacgagaagaucaaccagagccuggccuucaucagaaagagcgacgagcugcugcacaacgugaacgugggcaagagcaccaccaacaucaugaucaccaccaucaucaucgugaucaucgugauccugcugcugcugaucgccgugggccuguuccuguacugcaaggccagaagcacccccgugacccugagcaaggaccagcugagcggcaucaacaacaucgccuucagcaacugaggacuaguaauaaggaaacuguaugaaugucugugggcaggaagugaagagauccuucuguaaagguuuuuggaauuaugucugcugaauaauaaacuuuuuugaaauaauaaaucugguagaaaaaugagaucuaaaaaaaaaaaaaaaaaaaaaaaaaaaaaaaaaaaaaaaaaaaaaaaaaaaaaaaaaaaaaaaaugcaucccccccccccccccccccccccccccccccaaaggcucuuuucagagccaccagaauu

SEQ ID NO: 15742 - RNA, 2045 nt, Artificial Sequence
  mRNA product Design h-4 comprising derived and/or modified sequence from HRSV(Memphis-37)__AIY60640.1__F_DSCav1_mut3 (opt5)
gggagagggcgcuuggcuugcaaggacccugagcugcggcauugaagcacacccaacccaacucgacugaagucagccucacugaaccggaucugagaaucuucucucucugggcuugccagggcucuccgaaccuagcuagcauccucuucaauuccaacuagaaagcuuaccauggagcugcccauccucaagaccaacgccauuacaacgauccuggcugccgugacccuuugcuucgcgagcucccagaauauuacagaagaguuuuaccaaucuaccuguagcgcugucuccaaaggcuaucugggggcccucagaacaggaugguacaccucuguuaucacaauugaacugagcaacaucaaggagaucaaaugcaauggcaccgacgccaaggugaaacuuauuaagcaggaacuggauaaguauaaaaacgcugugacggaccuccagcugcugaugcaguccaccccugccgcugggucuggaagcgccaucuguuccggcauugcggucugcaaggugcuccaccuggagggggagguuaauaaaaucaagaacgcccuucugagcacaaauaaagcuguggucucucucuccaacggagugagcguucugaccuucaaggugcuugaucugaagaauuacauugacaaacaacuccugccgauccugaacaagcagucuuguuccauucccaauaucgaaacagucaucgaguuucagcagaaaaacaaucggcuccuggaaauuacccgcgaguucagcgugaacgccggcgugacgacaccugucucuaccuauaugcuuacaaauuccgagcugcucagccugaucaacgauaugcccauuaccaacgaccaaaagaaacuuauguccaauaacguucagaucgugagacagcagucuuacagcauuaugugcaucaucaaggaagaggugcuggcuuaugucgugcaacucccucuguacggcguuauugauacccccuguuggaaacugcauacauccccucucugcacgaccaauacaaaggaagggagcaacaucugucugacccggacagaccgcggaugguacugcgauaaugccggcucuguguccuuuuucccgcaggcggagaccuguaagguccagagcaacagaguguuuugcgacacgaugaacucucuuacacugcccagcgaaguuaaucucugcaauauugauaucuucaacccuaaauaugacuguaagauuaugaccuccaaaaccgaugugucuagcuccgucaucacaagccugggggccaucgugucuugcuacggaaagaccaaauguacagcuuccaauaagaaccggggcauuaucaagacguuuagcaaugggugcgacuaugucucuaacaaaggaguggacaccguuuccgugggcaauacacuuuacugugucaacaagcaagagggccagagccuguaugugaaaggggagcccauuaucaacuucuacgauccucucguuuuucccuccgacgaguucgaugccucuauuagccaggugaaugaaaagaucaaccagucccuggcuuuuauucgcaaaucugacgaacugcuccacaaugucaacgugggaaagagcaccacaaauaucaugaucaccacgauuaucauugugaucauuguuauccugcuucugcucaucgccgucggccuguuccuguauugcaaggccagauccaccccggugacacuuagcaaagaucaacucucugggauuaacaauaucgcuuucuccaacugaggacuaguaauaaggaaacuguaugaaugucugugggcaggaagugaagagauccuucuguaaagguuuuuggaauuaugucugcugaauaauaaacuuuuuugaaauaauaaaucugguagaaaaaugagaucuaaaaaaaaaaaaaaaaaaaaaaaaaaaaaaaaaaaaaaaaaaaaaaaaaaaaaaaaaaaaaaaaugcaucccccccccccccccccccccccccccccccaaaggcucuuuucagagccaccagaauu

SEQ ID NO: 15743 - RNA, 2045 nt, Artificial Sequence
  mRNA product Design h-4 comprising derived and/or modified sequence from HRSV(Memphis-37)__AIY60640.1__F_DSCav1_mut3 (opt6)
gggagagggcgcuuggcuugcaaggacccugagcugcggcauugaagcacacccaacccaacucgacugaagucagccucacugaaccggaucugagaaucuucucucucugggcuugccagggcucuccgaaccuagcuagcauccucuucaauuccaacuagaaagcuuaccauggaauuaccaauacuaaaaacaaaugccaucaccaccauccuggccgccguaacauuaugcuucgcaaguucacaaaauauaacagaagaauuuuaucaaucaacuugcagcgccguaucaaaaggcuacuuaggcgcacuacguacaggaugguacacaucaguaauaaccauagaacuauccaauauuaaagaaauaaaaugcaauggaacagacgcaaaaguuaaacuaauaaaacaagaauuagacaaauacaaaaacgcaguaaccgaccuucaauuacuaaugcaaucuacccccgcugcagguuccggaucagcaauauguucaggaauugcaguaugcaaaguccuacacuuagaaggagaaguaaacaaaauaaaaaacgcacuauuaagcaccaauaaagcagucguaucauuauccaacggcguuucaguacuaacauuuaaaguacuugaccuaaaaaacuauauagacaaacaacuacuucccauccuuaacaaacaaagcugcucaauaccuaauaucgaaacaguaauagaauuucaacaaaaaaacaaucgauuauuagaaaucacacgagaauuuucugucaacgcaggagucaccacacccguaucuacuuauauguuaaccaacucugaauuauuaucacuaaucaaugacaugccaauaacaaacgaucaaaaaaaauuaaugucaaauaacguacaaauaguaagacaacaaucauacucaauaaugugcauuauaaaagaagaaguacuagccuauguuguacaacucccacucuacggcguaauagacacaccaugcuggaaauuacacacuucaccacuaugcacaacaaacacaaaagaaggaucaaacaucugccuaaccagaaccgauagaggaugguauugcgacaaugccggaucaguuucauucuucccacaagcagaaacaugcaaaguacaauccaacagaguuuucugugacacaaugaacucgcuaacauuacccagcgaaguaaaccucugcaacauagacauauucaacccaaaauacgauugcaaaauaaugacuucuaaaacagauguuuccucaagcgucauaacgaguuuaggagcaauaguaagcuguuacggaaaaaccaaauguaccgcaucaaacaaaaaccgaggaauaauaaaaaccuuuucaaacggaugcgauuacgucuccaacaaaggagucgacacaguaucaguuggcaauacucuuuacugcguaaauaaacaagaaggacaaucacuauacguaaaaggcgaaccaauaauaaacuucuacgacccccucgucuucccuucagaugaauuugacgcaagcaucucacaaguuaaugaaaaaauaaaucaauccuuagcauucauacgaaaaucagacgaacuauuacacaacguaaacguaggaaaaucaacgacaaacauaaugauaacaacuaucauuauagucauaauagucauacuacuacuauuaauagccguaggcuuauuccuauacugcaaagcaagaucuacuccaguaacacucucaaaagaccaauuaucuggaauaaauaacauagcauucucuaauuaaggacuaguaauaaggaaacuguaugaaugucugugggcaggaagugaagagauccuucuguaaagguuuuuggaauuaugucugcugaauaauaaacuuuuuugaaauaauaaaucugguagaaaaaugagaucuaaaaaaaaaaaaaaaaaaaaaaaaaaaaaaaaaaaaaaaaaaaaaaaaaaaaaaaaaaaaaaaaugcaucccccccccccccccccccccccccccccccaaaggcucuuuucagagccaccagaauu

SEQ ID NO: 15744 - RNA, 2045 nt, Artificial Sequence
  mRNA product Design h-4 comprising derived and/or modified sequence from HRSV(Memphis-37)__AIY60640.1__F_DSCav1_mut3 (opt11)
gggagagggcgcuuggcuugcaaggacccugagcugcggcauugaagcacacccaacccaacucgacugaagucagccucacugaaccggaucugagaaucuucucucucugggcuugccagggcucuccgaaccuagcuagcauccucuucaauuccaacuagaaagcuuaccauggaacuccccauccucaaaaccaacgccauuaccacgauccucgccgcagucacccucugcuucgccuccucacaaaacaucacagaagaauuuuaccaaaguaccugcuccgccgucagcaaaggauaccucggcgcccuccgcaccggcugguacacauccgucauaaccaucgaacucagcaacaucaaagaaaucaaauguaacggaaccgacgccaaaguaaaacuaauaaaacaagaacucgacaaauacaagaacgccgucaccgaccuccaacuccucaugcaaucuacccccgccgccggcucagguagcgccaucugcagcgguauugccgucugcaaaguacuccaccuagaaggagaagucaauaaaaucaaaaacgcccuacucuccaccaacaaggcagucgucagccucuccaacggcgucucagucuuaaccuucaaagugcucgaccucaaaaauuacauagacaaacaacuacuccccauucucaacaaacaauccugcuccauacccaacauagaaaccgucauugaauuucaacagaaaaacaaccgccuccucgaaaucacgcgcgaguucagugucaacgccggcgucaccaccccagucucgacauacaugcucacaaacucagaacuccucucguuaaucaacgacaugccaauaaccaacgaccaaaagaaacuaauguccaacaacguucaaauaguucgccaacaaucauacuccauaaugugcaucaucaaagaagaaguccucgccuacguuguacaauuaccccucuacggcgucaucgacacaccaugcuggaaacuccacacaucgccccucugcaccaccaacaccaaagaaggcagcaacauuugccucacccggacagaccgcggcugguacugcgacaaugcaggcagcgucucauucuucccacaagccgaaaccugcaaaguccaaagcaaccgugucuucugcgacacaaugaacucccuuacccucccaagcgaaguaaaccucugcaauauugacaucuucaaccccaaauacgacugcaaaaucaugaccuccaaaaccgacgucuccucaucagucaucaccucccuuggcgccauugucuccuguuacgguaaaaccaaaugcaccgccuccaacaaaaaccgcggcaucaucaaaaccuucucuaacggcugcgacuacgucucaaacaaaggcgucgacacugucuccgucggcaacacccuauacugcgucaacaagcaagaaggacagucccuauacguaaaaggugaaccaauuaucaacuucuacgacccccuagucuucccauccgacgaguucgaugccuccaucucccaaguaaaugaaaagaucaaucaaagccuggccuucauccgcaaauccgacgaacuacuccacaaugucaacgucggaaaaucaacaacaaacaucaugaucaccaccaucaucaucgucaucauaguaauccuccuacugcucaucgccgucggucucuuccuauacugcaaagcccguucuacuccagucacccucuccaaagaccaacuaucaggaaucaacaacaucgccuucagcaacuaaggacuaguaauaaggaaacuguaugaaugucugugggcaggaagugaagagauccuucuguaaagguuuuuggaauuaugucugcugaauaauaaacuuuuuugaaauaauaaaucugguagaaaaaugagaucuaaaaaaaaaaaaaaaaaaaaaaaaaaaaaaaaaaaaaaaaaaaaaaaaaaaaaaaaaaaaaaaaugcaucccccccccccccccccccccccccccccccaaaggcucuuuucagagccaccagaauu

SEQ ID NO: 15745 - RNA, 2061 nt, Artificial Sequence
  mRNA product Design h-5 comprising derived and/or modified sequence from HRSV(Memphis-37)__AIY60640.1__F_DSCav1_mut3 (opt1)
gggagagggcgcuuggcuugcaaggacccugagcugcggcauugaagcacacccaacccaacucgacugaagucagccucacugaaccggaucugagaaucuucucucucugggcuugccagggcucuccgaaccuagcuagcauccucuucaauuccaacuagaaagcuuaccauggagcugcccauccucaagaccaacgccaucaccacgauccuggccgcggugacccugugcuucgccagcucccagaacaucaccgaggaguucuaccagagcacgugcuccgccgucagcaagggcuaccucggcgcccugcgcaccgggugguacaccagcgugaucaccaucgagcuguccaacaucaaggagaucaagugcaacggcaccgacgccaaggugaagcucaucaagcaggagcuggacaaguacaagaacgcggucacggaccugcagcuccugaugcagagcaccccggccgccggcuccgggagcgcgaucugcuccggcaucgccgucugcaaggugcugcaccucgagggcgaggugaacaagaucaagaacgcccugcuguccaccaacaaggccgucgugagccucuccaacggggugagcguccugaccuucaaggugcuggaccucaagaacuacaucgacaagcagcugcugcccauccugaacaagcagagcugcuccauccccaacaucgagaccgucaucgaguuccagcagaagaacaaccgccuccuggagaucacgcgggaguucagcgugaacgcgggcgugaccacccccgucuccaccuacaugcugacgaacagcgagcuccugucccugaucaacgacaugccgaucaccaacgaccagaagaagcucaugagcaacaacgugcagaucgugcgccagcaguccuacagcaucaugugcaucaucaaggaggagguccuggccuacguggugcagcugccccucuacggggucaucgacacccccugcuggaagcugcacaccagcccccugugcacgaccaacaccaaggagggcuccaacaucugccucacccggacggaccgcgggugguacugcgacaacgccggcagcguguccuucuucccgcaggccgagaccugcaagguccagagcaaccggguguucugcgacaccaugaacucccugacccugcccagcgaggugaaccucugcaacaucgacaucuucaaccccaaguacgacugcaagaucaugacguccaagaccgacgucagcuccagcgugaucaccucccugggcgccaucgugagcugcuacgggaagaccaagugcacggcgagcaacaagaaccgcggcaucaucaagaccuucuccaacgggugcgacuacgucagcaacaagggcguggacaccguguccgucggcaacacccuguacugcgugaacaagcaggagggccagagccucuacgugaagggggagcccaucaucaacuucuacgacccgcuggucuuccccuccgacgaguucgacgccagcaucucccaggugaacgagaagaucaaccagagccuggccuucauccggaaguccgacgagcuccugcacaacgugaacgucggcaagagcaccacgaacaucaugaucaccaccaucaucaucgugaucaucgugauccugcugcuccugaucgccgucgggcuguuccucuacugcaaggcccgcuccacccccgugacgcugagcaaggaccagcuguccgggaucaacaacaucgcguucagcaacugaggacuaguacuggcugcaucucccuuuccucuguccuccauccuucucccaggauggugaagggggaccugguacccagugauccccaccccaggauccuaaaucaugacuuaccugcuaauaaaaacucauuggaaaagugagaagaucuaaaaaaaaaaaaaaaaaaaaaaaaaaaaaaaaaaaaaaaaaaaaaaaaaaaaaaaaaaaaaaaaugcaucccccccccccccccccccccccccccccccaaaggcucuuuucagagccaccagaauu

SEQ ID NO: 15746 - RNA, 2061 nt, Artificial Sequence
  mRNA product Design h-5 comprising derived and/or modified sequence from HRSV(Memphis-37)__AIY60640.1__F_DSCav1_mut3 (opt1)
gggagagggcgcuuggcuugcaaggacccugagcugcggcauugaagcacacccaacccaacucgacugaagucagccucacugaaccggaucugagaaucuucucucucugggcuugccagggcucuccgaaccuagcuagcauccucuucaauuccaacuagaaagcuuaccauggagcugcccauccucaagaccaacgccaucaccacgauccuggccgcggugacccugugcuucgccagcucccagaacaucaccgaggaguucuaccagagcacgugcuccgccgucagcaagggcuaccucggggcccugcgcaccggcugguacaccuccgugaucaccaucgagcugagcaacaucaaggagaucaagugcaacgggaccgacgccaaggugaagcucaucaagcaggagcuggacaaguacaagaacgcggucacggaccugcagcuccugaugcaguccaccccggccgccggcagcggguccgccaucugcagcggcaucgcggugugcaaggugcugcaccucgagggcgaggucaacaagaucaagaacgcccugcuguccaccaacaaggccguggugagccucuccaacggggucagcgugcugaccuucaaggugcuggaccucaagaacuacaucgacaagcagcugcugcccauccucaacaagcaguccugcagcauccccaacaucgagacggucaucgaguuccagcagaagaacaaccggcugcuggagaucacccgcgaguucuccgugaacgccggcgugaccacccccgucagcacguacaugcucaccaacuccgagcugcugagccucaucaacgacaugccgaucaccaacgaccagaagaagcugaugagcaacaacgugcagaucgugcggcagcaguccuacagcaucaugugcaucaucaaggaggagguccuggccuacguggugcagcucccccuguacggggucaucgacacccccugcuggaagcugcacacgagcccccucugcaccaccaacaccaaggagggcuccaacaucugccugacgcgcaccgaccgggggugguacugcgacaacgcgggcuccgugagcuucuucccgcaggccgagaccugcaaggugcaguccaaccgcgucuucugcgacaccaugaacagccugacgcuccccuccgaggugaaccugugcaacaucgacaucuucaaccccaaguacgacugcaagaucaugaccagcaagaccgacgucuccagcuccgugaucaccagccugggcgccaucguguccugcuacgggaagacgaagugcaccgccagcaacaagaaccggggcaucaucaagaccuucuccaacgggugcgacuacgucagcaacaagggcguggacaccguguccgucggcaacacgcucuacugcgugaacaagcaggaggggcagagccuguacgugaagggcgagcccaucaucaacuucuacgacccgcuggucuuccccagcgacgaguucgacgccuccaucagccaggugaacgagaagaucaaccagucccucgcguucauccgcaagagcgacgagcugcugcacaacgugaacgucgggaaguccaccaccaacaucaugaucaccaccaucaucaucgugaucaucgugauccuccugcugcucaucgccgucggccuguuccuguacugcaaggcccggagcacgcccgugacccuguccaaggaccagcucagcgggaucaacaacaucgccuucuccaacugaggacuaguacuggcugcaucucccuuuccucuguccuccauccuucucccaggauggugaagggggaccugguacccagugauccccaccccaggauccuaaaucaugacuuaccugcuaauaaaaacucauuggaaaagugagaagaucuaaaaaaaaaaaaaaaaaaaaaaaaaaaaaaaaaaaaaaaaaaaaaaaaaaaaaaaaaaaaaaaaugcaucccccccccccccccccccccccccccccccaaaggcucuuuucagagccaccagaauu

SEQ ID NO: 15747 - RNA, 2061 nt, Artificial Sequence
  mRNA product Design h-5 comprising derived and/or modified sequence from HRSV(Memphis-37)__AIY60640.1__F_DSCav1_mut3 (opt2)
gggagagggcgcuuggcuugcaaggacccugagcugcggcauugaagcacacccaacccaacucgacugaagucagccucacugaaccggaucugagaaucuucucucucugggcuugccagggcucuccgaaccuagcuagcauccucuucaauuccaacuagaaagcuuaccauggagcuccccauccucaagaccaacgccaucaccaccauccucgccgccgucacccucugcuucgccuccucccagaacaucaccgaggaguucuaccaguccaccugcuccgccgucuccaagggcuaccucggcgcccuccgcaccggcugguacaccuccgucaucaccaucgagcucuccaacaucaaggagaucaagugcaacggcaccgacgccaaggucaagcucaucaagcaggagcucgacaaguacaagaacgccgucaccgaccuccagcuccucaugcaguccacccccgccgccggcuccggcuccgccaucugcuccggcaucgccgucugcaagguccuccaccucgagggcgaggucaacaagaucaagaacgcccuccucuccaccaacaaggccgucgucucccucuccaacggcgucuccguccucaccuucaagguccucgaccucaagaacuacaucgacaagcagcuccuccccauccucaacaagcaguccugcuccauccccaacaucgagaccgucaucgaguuccagcagaagaacaaccgccuccucgagaucacccgcgaguucuccgucaacgccggcgucaccacccccgucuccaccuacaugcucaccaacuccgagcuccucucccucaucaacgacaugcccaucaccaacgaccagaagaagcucauguccaacaacguccagaucguccgccagcaguccuacuccaucaugugcaucaucaaggaggagguccucgccuacgucguccagcucccccucuacggcgucaucgacacccccugcuggaagcuccacaccuccccccucugcaccaccaacaccaaggagggcuccaacaucugccucacccgcaccgaccgcggcugguacugcgacaacgccggcuccgucuccuucuucccccaggccgagaccugcaagguccaguccaaccgcgucuucugcgacaccaugaacucccucacccuccccuccgaggucaaccucugcaacaucgacaucuucaaccccaaguacgacugcaagaucaugaccuccaagaccgacgucuccuccuccgucaucaccucccucggcgccaucgucuccugcuacggcaagaccaagugcaccgccuccaacaagaaccgcggcaucaucaagaccuucuccaacggcugcgacuacgucuccaacaagggcgucgacaccgucuccgucggcaacacccucuacugcgucaacaagcaggagggccagucccucuacgucaagggcgagcccaucaucaacuucuacgacccccucgucuuccccuccgacgaguucgacgccuccaucucccaggucaacgagaagaucaaccagucccucgccuucauccgcaaguccgacgagcuccuccacaacgucaacgucggcaaguccaccaccaacaucaugaucaccaccaucaucaucgucaucaucgucauccuccuccuccucaucgccgucggccucuuccucuacugcaaggcccgcuccacccccgucacccucuccaaggaccagcucuccggcaucaacaacaucgccuucuccaacugaggacuaguacuggcugcaucucccuuuccucuguccuccauccuucucccaggauggugaagggggaccugguacccagugauccccaccccaggauccuaaaucaugacuuaccugcuaauaaaaacucauuggaaaagugagaagaucuaaaaaaaaaaaaaaaaaaaaaaaaaaaaaaaaaaaaaaaaaaaaaaaaaaaaaaaaaaaaaaaaugcaucccccccccccccccccccccccccccccccaaaggcucuuuucagagccaccagaauu

SEQ ID NO: 15748 - RNA, 2061 nt, Artificial Sequence
  mRNA product Design h-5 comprising derived and/or modified sequence from HRSV(Memphis-37)__AIY60640.1__F_DSCav1_mut3 (opt3)
gggagagggcgcuuggcuugcaaggacccugagcugcggcauugaagcacacccaacccaacucgacugaagucagccucacugaaccggaucugagaaucuucucucucugggcuugccagggcucuccgaaccuagcuagcauccucuucaauuccaacuagaaagcuuaccauggagcugcccauccucaagaccaacgccauuacaacuauacuugcugcagugacgcugugcuucgccagcucccagaauaucaccgaagaguuuuaccaaucuacauguucagcggucaguaaaggcuauuugggggcuuuaagaacuggaugguacaccagcguuauuacaaucgaacuguccaacauuaaggagaucaaaugcaaugguaccgacgccaaggugaaacuaauaaagcaggaacucgauaaguauaaaaacgcaguaacugaccugcagcuucugaugcagucuacuccugccgcuggcucggggucagcaaucuguagcggaauugccgugugcaaggucuugcaccucgagggcgaggugaauaaaaucaagaacgcucugcugaguaccaauaaagccguugugucccucucuaacggugucagcguguuaacguucaagguacuggaucuuaagaauuacauugacaaacaauugcugccaauccuaaacaagcaguccuguucaauaccgaauauugaaacuguuaucgaguuucagcagaaaaacaauaggcuccuggaaauuacccgggaguucagugugaacgcgggggucacaacucccgugagcaccuauaugcuuacaaauucugagcuguugucccucaucaacgauaugccuaucaccaacgaccaaaagaaacugaugucaaauaacgugcagauuguccgccagcagagcuacaguauaaugugcaucauuaaggaagagguuuuagcauaugugguacaacugccacucuacggagugaucgauacgcccuguuggaaacuucauacuucuccucugugcacaaccaauacuaaggaaggcuccaacauauguuugacacgaaccgaccguggcugguacugcgauaaugccgggagcgucucguuuuucccacaggcugagacguguaaggugcagucuaacagaguuuucugcgacaccaugaacucccuaacacugcccucagaagugaaucucugcaauauugauaucuucaacccuaaauaugacuguaagaucaugacaaguaaaaccgaugucagcuccucugugauuacaagccugggagccaucguaucaugcuacgguaagacuaaauguaccgcaaguaauaagaacaggggcauuauaaagacauuuuccaaugggugcgacuauguuagcaacaaaggaguggacaccgucucugugggcaauacucuuuacugugucaacaagcaagagggucagucacuguaugugaaaggggagccaaucauuaacuucuacgauccguugguuuuucccagugacgaauuugaugcuagcaucucccaggugaaugagaagaucaaccagucucucgccuuuauucggaaaucggacgaacuguuacacaauguaaacgucggaaagagcacgacaaauauaaugaucaccacuauuaucauugugaucauaguuauccugcuacuccugauugcggugggccuuuucuuguauugcaaggcccgcuccaccccugucacacugucaaaagaucaacucaguggcaucaacaauauugcauucucuaacugaggacuaguacuggcugcaucucccuuuccucuguccuccauccuucucccaggauggugaagggggaccugguacccagugauccccaccccaggauccuaaaucaugacuuaccugcuaauaaaaacucauuggaaaagugagaagaucuaaaaaaaaaaaaaaaaaaaaaaaaaaaaaaaaaaaaaaaaaaaaaaaaaaaaaaaaaaaaaaaaugcaucccccccccccccccccccccccccccccccaaaggcucuuuucagagccaccagaauu

SEQ ID NO: 15749 - RNA, 2061 nt, Artificial Sequence
  mRNA product Design h-5 comprising derived and/or modified sequence from HRSV(Memphis-37)__AIY60640.1__F_DSCav1_mut3 (opt4)
gggagagggcgcuuggcuugcaaggacccugagcugcggcauugaagcacacccaacccaacucgacugaagucagccucacugaaccggaucugagaaucuucucucucugggcuugccagggcucuccgaaccuagcuagcauccucuucaauuccaacuagaaagcuuaccauggagcugcccauccugaagaccaacgccaucaccaccauccuggccgccgugacccugugcuucgccagcagccagaacaucaccgaggaguucuaccagagcaccugcagcgccgugagcaagggcuaccugggcgcccugagaaccggcugguacaccagcgugaucaccaucgagcugagcaacaucaaggagaucaagugcaacggcaccgacgccaaggugaagcugaucaagcaggagcuggacaaguacaagaacgccgugaccgaccugcagcugcugaugcagagcacccccgccgccggcagcggcagcgccaucugcagcggcaucgccgugugcaaggugcugcaccuggagggcgaggugaacaagaucaagaacgcccugcugagcaccaacaaggccguggugagccugagcaacggcgugagcgugcugaccuucaaggugcuggaccugaagaacuacaucgacaagcagcugcugcccauccugaacaagcagagcugcagcauccccaacaucgagaccgugaucgaguuccagcagaagaacaacagacugcuggagaucaccagagaguucagcgugaacgccggcgugaccacccccgugagcaccuacaugcugaccaacagcgagcugcugagccugaucaacgacaugcccaucaccaacgaccagaagaagcugaugagcaacaacgugcagaucgugagacagcagagcuacagcaucaugugcaucaucaaggaggaggugcuggccuacguggugcagcugccccuguacggcgugaucgacacccccugcuggaagcugcacaccagcccccugugcaccaccaacaccaaggagggcagcaacaucugccugaccagaaccgacagaggcugguacugcgacaacgccggcagcgugagcuucuucccccaggccgagaccugcaaggugcagagcaacagaguguucugcgacaccaugaacagccugacccugcccagcgaggugaaccugugcaacaucgacaucuucaaccccaaguacgacugcaagaucaugaccagcaagaccgacgugagcagcagcgugaucaccagccugggcgccaucgugagcugcuacggcaagaccaagugcaccgccagcaacaagaacagaggcaucaucaagaccuucagcaacggcugcgacuacgugagcaacaagggcguggacaccgugagcgugggcaacacccuguacugcgugaacaagcaggagggccagagccuguacgugaagggcgagcccaucaucaacuucuacgacccccugguguuccccagcgacgaguucgacgccagcaucagccaggugaacgagaagaucaaccagagccuggccuucaucagaaagagcgacgagcugcugcacaacgugaacgugggcaagagcaccaccaacaucaugaucaccaccaucaucaucgugaucaucgugauccugcugcugcugaucgccgugggccuguuccuguacugcaaggccagaagcacccccgugacccugagcaaggaccagcugagcggcaucaacaacaucgccuucagcaacugaggacuaguacuggcugcaucucccuuuccucuguccuccauccuucucccaggauggugaagggggaccugguacccagugauccccaccccaggauccuaaaucaugacuuaccugcuaauaaaaacucauuggaaaagugagaagaucuaaaaaaaaaaaaaaaaaaaaaaaaaaaaaaaaaaaaaaaaaaaaaaaaaaaaaaaaaaaaaaaaugcaucccccccccccccccccccccccccccccccaaaggcucuuuucagagccaccagaauu

SEQ ID NO: 15750 - RNA, 2061 nt, Artificial Sequence
  mRNA product Design h-5 comprising derived and/or modified sequence from HRSV(Memphis-37)__AIY60640.1__F_DSCav1_mut3 (opt5)
gggagagggcgcuuggcuugcaaggacccugagcugcggcauugaagcacacccaacccaacucgacugaagucagccucacugaaccggaucugagaaucuucucucucugggcuugccagggcucuccgaaccuagcuagcauccucuucaauuccaacuagaaagcuuaccauggagcugcccauccucaagaccaacgccauuacaacgauccuggcugccgugacccuuugcuucgcgagcucccagaauauuacagaagaguuuuaccaaucuaccuguagcgcugucuccaaaggcuaucugggggcccucagaacaggaugguacaccucuguuaucacaauugaacugagcaacaucaaggagaucaaaugcaauggcaccgacgccaaggugaaacuuauuaagcaggaacuggauaaguauaaaaacgcugugacggaccuccagcugcugaugcaguccaccccugccgcugggucuggaagcgccaucuguuccggcauugcggucugcaaggugcuccaccuggagggggagguuaauaaaaucaagaacgcccuucugagcacaaauaaagcuguggucucucucuccaacggagugagcguucugaccuucaaggugcuugaucugaagaauuacauugacaaacaacuccugccgauccugaacaagcagucuuguuccauucccaauaucgaaacagucaucgaguuucagcagaaaaacaaucggcuccuggaaauuacccgcgaguucagcgugaacgccggcgugacgacaccugucucuaccuauaugcuuacaaauuccgagcugcucagccugaucaacgauaugcccauuaccaacgaccaaaagaaacuuauguccaauaacguucagaucgugagacagcagucuuacagcauuaugugcaucaucaaggaagaggugcuggcuuaugucgugcaacucccucuguacggcguuauugauacccccuguuggaaacugcauacauccccucucugcacgaccaauacaaaggaagggagcaacaucugucugacccggacagaccgcggaugguacugcgauaaugccggcucuguguccuuuuucccgcaggcggagaccuguaagguccagagcaacagaguguuuugcgacacgaugaacucucuuacacugcccagcgaaguuaaucucugcaauauugauaucuucaacccuaaauaugacuguaagauuaugaccuccaaaaccgaugugucuagcuccgucaucacaagccugggggccaucgugucuugcuacggaaagaccaaauguacagcuuccaauaagaaccggggcauuaucaagacguuuagcaaugggugcgacuaugucucuaacaaaggaguggacaccguuuccgugggcaauacacuuuacugugucaacaagcaagagggccagagccuguaugugaaaggggagcccauuaucaacuucuacgauccucucguuuuucccuccgacgaguucgaugccucuauuagccaggugaaugaaaagaucaaccagucccuggcuuuuauucgcaaaucugacgaacugcuccacaaugucaacgugggaaagagcaccacaaauaucaugaucaccacgauuaucauugugaucauuguuauccugcuucugcucaucgccgucggccuguuccuguauugcaaggccagauccaccccggugacacuuagcaaagaucaacucucugggauuaacaauaucgcuuucuccaacugaggacuaguacuggcugcaucucccuuuccucuguccuccauccuucucccaggauggugaagggggaccugguacccagugauccccaccccaggauccuaaaucaugacuuaccugcuaauaaaaacucauuggaaaagugagaagaucuaaaaaaaaaaaaaaaaaaaaaaaaaaaaaaaaaaaaaaaaaaaaaaaaaaaaaaaaaaaaaaaaugcaucccccccccccccccccccccccccccccccaaaggcucuuuucagagccaccagaauu

SEQ ID NO: 15751 - RNA, 2061 nt, Artificial Sequence
  mRNA product Design h-5 comprising derived and/or modified sequence from HRSV(Memphis-37)__AIY60640.1__F_DSCav1_mut3 (opt6)
gggagagggcgcuuggcuugcaaggacccugagcugcggcauugaagcacacccaacccaacucgacugaagucagccucacugaaccggaucugagaaucuucucucucugggcuugccagggcucuccgaaccuagcuagcauccucuucaauuccaacuagaaagcuuaccauggaauuaccaauacuaaaaacaaaugccaucaccaccauccuggccgccguaacauuaugcuucgcaaguucacaaaauauaacagaagaauuuuaucaaucaacuugcagcgccguaucaaaaggcuacuuaggcgcacuacguacaggaugguacacaucaguaauaaccauagaacuauccaauauuaaagaaauaaaaugcaauggaacagacgcaaaaguuaaacuaauaaaacaagaauuagacaaauacaaaaacgcaguaaccgaccuucaauuacuaaugcaaucuacccccgcugcagguuccggaucagcaauauguucaggaauugcaguaugcaaaguccuacacuuagaaggagaaguaaacaaaauaaaaaacgcacuauuaagcaccaauaaagcagucguaucauuauccaacggcguuucaguacuaacauuuaaaguacuugaccuaaaaaacuauauagacaaacaacuacuucccauccuuaacaaacaaagcugcucaauaccuaauaucgaaacaguaauagaauuucaacaaaaaaacaaucgauuauuagaaaucacacgagaauuuucugucaacgcaggagucaccacacccguaucuacuuauauguuaaccaacucugaauuauuaucacuaaucaaugacaugccaauaacaaacgaucaaaaaaaauuaaugucaaauaacguacaaauaguaagacaacaaucauacucaauaaugugcauuauaaaagaagaaguacuagccuauguuguacaacucccacucuacggcguaauagacacaccaugcuggaaauuacacacuucaccacuaugcacaacaaacacaaaagaaggaucaaacaucugccuaaccagaaccgauagaggaugguauugcgacaaugccggaucaguuucauucuucccacaagcagaaacaugcaaaguacaauccaacagaguuuucugugacacaaugaacucgcuaacauuacccagcgaaguaaaccucugcaacauagacauauucaacccaaaauacgauugcaaaauaaugacuucuaaaacagauguuuccucaagcgucauaacgaguuuaggagcaauaguaagcuguuacggaaaaaccaaauguaccgcaucaaacaaaaaccgaggaauaauaaaaaccuuuucaaacggaugcgauuacgucuccaacaaaggagucgacacaguaucaguuggcaauacucuuuacugcguaaauaaacaagaaggacaaucacuauacguaaaaggcgaaccaauaauaaacuucuacgacccccucgucuucccuucagaugaauuugacgcaagcaucucacaaguuaaugaaaaaauaaaucaauccuuagcauucauacgaaaaucagacgaacuauuacacaacguaaacguaggaaaaucaacgacaaacauaaugauaacaacuaucauuauagucauaauagucauacuacuacuauuaauagccguaggcuuauuccuauacugcaaagcaagaucuacuccaguaacacucucaaaagaccaauuaucuggaauaaauaacauagcauucucuaauuaaggacuaguacuggcugcaucucccuuuccucuguccuccauccuucucccaggauggugaagggggaccugguacccagugauccccaccccaggauccuaaaucaugacuuaccugcuaauaaaaacucauuggaaaagugagaagaucuaaaaaaaaaaaaaaaaaaaaaaaaaaaaaaaaaaaaaaaaaaaaaaaaaaaaaaaaaaaaaaaaugcaucccccccccccccccccccccccccccccccaaaggcucuuuucagagccaccagaauu

SEQ ID NO: 15752 - RNA, 2061 nt, Artificial Sequence
  mRNA product Design h-5 comprising derived and/or modified sequence from HRSV(Memphis-37)__AIY60640.1__F_DSCav1_mut3 (opt11)
gggagagggcgcuuggcuugcaaggacccugagcugcggcauugaagcacacccaacccaacucgacugaagucagccucacugaaccggaucugagaaucuucucucucugggcuugccagggcucuccgaaccuagcuagcauccucuucaauuccaacuagaaagcuuaccauggaacuccccauccucaaaaccaacgccauuaccacgauccucgccgcagucacccucugcuucgccuccucacaaaacaucacagaagaauuuuaccaaaguaccugcuccgccgucagcaaaggauaccucggcgcccuccgcaccggcugguacacauccgucauaaccaucgaacucagcaacaucaaagaaaucaaauguaacggaaccgacgccaaaguaaaacuaauaaaacaagaacucgacaaauacaagaacgccgucaccgaccuccaacuccucaugcaaucuacccccgccgccggcucagguagcgccaucugcagcgguauugccgucugcaaaguacuccaccuagaaggagaagucaauaaaaucaaaaacgcccuacucuccaccaacaaggcagucgucagccucuccaacggcgucucagucuuaaccuucaaagugcucgaccucaaaaauuacauagacaaacaacuacuccccauucucaacaaacaauccugcuccauacccaacauagaaaccgucauugaauuucaacagaaaaacaaccgccuccucgaaaucacgcgcgaguucagugucaacgccggcgucaccaccccagucucgacauacaugcucacaaacucagaacuccucucguuaaucaacgacaugccaauaaccaacgaccaaaagaaacuaauguccaacaacguucaaauaguucgccaacaaucauacuccauaaugugcaucaucaaagaagaaguccucgccuacguuguacaauuaccccucuacggcgucaucgacacaccaugcuggaaacuccacacaucgccccucugcaccaccaacaccaaagaaggcagcaacauuugccucacccggacagaccgcggcugguacugcgacaaugcaggcagcgucucauucuucccacaagccgaaaccugcaaaguccaaagcaaccgugucuucugcgacacaaugaacucccuuacccucccaagcgaaguaaaccucugcaauauugacaucuucaaccccaaauacgacugcaaaaucaugaccuccaaaaccgacgucuccucaucagucaucaccucccuuggcgccauugucuccuguuacgguaaaaccaaaugcaccgccuccaacaaaaaccgcggcaucaucaaaaccuucucuaacggcugcgacuacgucucaaacaaaggcgucgacacugucuccgucggcaacacccuauacugcgucaacaagcaagaaggacagucccuauacguaaaaggugaaccaauuaucaacuucuacgacccccuagucuucccauccgacgaguucgaugccuccaucucccaaguaaaugaaaagaucaaucaaagccuggccuucauccgcaaauccgacgaacuacuccacaaugucaacgucggaaaaucaacaacaaacaucaugaucaccaccaucaucaucgucaucauaguaauccuccuacugcucaucgccgucggucucuuccuauacugcaaagcccguucuacuccagucacccucuccaaagaccaacuaucaggaaucaacaacaucgccuucagcaacuaaggacuaguacuggcugcaucucccuuuccucuguccuccauccuucucccaggauggugaagggggaccugguacccagugauccccaccccaggauccuaaaucaugacuuaccugcuaauaaaaacucauuggaaaagugagaagaucuaaaaaaaaaaaaaaaaaaaaaaaaaaaaaaaaaaaaaaaaaaaaaaaaaaaaaaaaaaaaaaaaugcaucccccccccccccccccccccccccccccccaaaggcucuuuucagagccaccagaauu

SEQ ID NO: 15753 - RNA, 1994 nt, Artificial Sequence
  mRNA product Design i-1 comprising derived and/or modified sequence from HRSV(Memphis-37)__AIY60640.1__F_DSCav1_mut3 (opt1)
gggagagggcgcuuggcuugcaaggacccugagcugcggcauugaagcacacccaacccaacucgacugaagucagccucacugaaccggaucugagaaucuucucucucugggcuugccagggcucuccgaaccuagcuagcauccucuucaauuccaacuagaaagcuuaccauggagcugcccauccucaagaccaacgccaucaccacgauccuggccgcggugacccugugcuucgccagcucccagaacaucaccgaggaguucuaccagagcacgugcuccgccgucagcaagggcuaccucggcgcccugcgcaccgggugguacaccagcgugaucaccaucgagcuguccaacaucaaggagaucaagugcaacggcaccgacgccaaggugaagcucaucaagcaggagcuggacaaguacaagaacgcggucacggaccugcagcuccugaugcagagcaccccggccgccggcuccgggagcgcgaucugcuccggcaucgccgucugcaaggugcugcaccucgagggcgaggugaacaagaucaagaacgcccugcuguccaccaacaaggccgucgugagccucuccaacggggugagcguccugaccuucaaggugcuggaccucaagaacuacaucgacaagcagcugcugcccauccugaacaagcagagcugcuccauccccaacaucgagaccgucaucgaguuccagcagaagaacaaccgccuccuggagaucacgcgggaguucagcgugaacgcgggcgugaccacccccgucuccaccuacaugcugacgaacagcgagcuccugucccugaucaacgacaugccgaucaccaacgaccagaagaagcucaugagcaacaacgugcagaucgugcgccagcaguccuacagcaucaugugcaucaucaaggaggagguccuggccuacguggugcagcugccccucuacggggucaucgacacccccugcuggaagcugcacaccagcccccugugcacgaccaacaccaaggagggcuccaacaucugccucacccggacggaccgcgggugguacugcgacaacgccggcagcguguccuucuucccgcaggccgagaccugcaagguccagagcaaccggguguucugcgacaccaugaacucccugacccugcccagcgaggugaaccucugcaacaucgacaucuucaaccccaaguacgacugcaagaucaugacguccaagaccgacgucagcuccagcgugaucaccucccugggcgccaucgugagcugcuacgggaagaccaagugcacggcgagcaacaagaaccgcggcaucaucaagaccuucuccaacgggugcgacuacgucagcaacaagggcguggacaccguguccgucggcaacacccuguacugcgugaacaagcaggagggccagagccucuacgugaagggggagcccaucaucaacuucuacgacccgcuggucuuccccuccgacgaguucgacgccagcaucucccaggugaacgagaagaucaaccagagccuggccuucauccggaaguccgacgagcuccugcacaacgugaacgucggcaagagcaccacgaacaucaugaucaccaccaucaucaucgugaucaucgugauccugcugcuccugaucgccgucgggcuguuccucuacugcaaggcccgcuccacccccgugacgcugagcaaggaccagcuguccgggaucaacaacaucgcguucagcaacugaggacuaguguccaccugucccuccugggcugcuggauugucucguuuuccugccaaauaaacaggaucagcgcuuuacagaucuaaaaaaaaaaaaaaaaaaaaaaaaaaaaaaaaaaaaaaaaaaaaaaaaaaaaaaaaaaaaaaaaugcaucccccccccccccccccccccccccccccccaaaggcucuuuucagagccaccagaauu

SEQ ID NO: 15754 - RNA, 1994 nt, Artificial Sequence
  mRNA product Design i-1 comprising derived and/or modified sequence from HRSV(Memphis-37)__AIY60640.1__F_DSCav1_mut3 (opt1)
gggagagggcgcuuggcuugcaaggacccugagcugcggcauugaagcacacccaacccaacucgacugaagucagccucacugaaccggaucugagaaucuucucucucugggcuugccagggcucuccgaaccuagcuagcauccucuucaauuccaacuagaaagcuuaccauggagcugcccauccucaagaccaacgccaucaccacgauccuggccgcggugacccugugcuucgccagcucccagaacaucaccgaggaguucuaccagagcacgugcuccgccgucagcaagggcuaccucggggcccugcgcaccggcugguacaccuccgugaucaccaucgagcugagcaacaucaaggagaucaagugcaacgggaccgacgccaaggugaagcucaucaagcaggagcuggacaaguacaagaacgcggucacggaccugcagcuccugaugcaguccaccccggccgccggcagcggguccgccaucugcagcggcaucgcggugugcaaggugcugcaccucgagggcgaggucaacaagaucaagaacgcccugcuguccaccaacaaggccguggugagccucuccaacggggucagcgugcugaccuucaaggugcuggaccucaagaacuacaucgacaagcagcugcugcccauccucaacaagcaguccugcagcauccccaacaucgagacggucaucgaguuccagcagaagaacaaccggcugcuggagaucacccgcgaguucuccgugaacgccggcgugaccacccccgucagcacguacaugcucaccaacuccgagcugcugagccucaucaacgacaugccgaucaccaacgaccagaagaagcugaugagcaacaacgugcagaucgugcggcagcaguccuacagcaucaugugcaucaucaaggaggagguccuggccuacguggugcagcucccccuguacggggucaucgacacccccugcuggaagcugcacacgagcccccucugcaccaccaacaccaaggagggcuccaacaucugccugacgcgcaccgaccgggggugguacugcgacaacgcgggcuccgugagcuucuucccgcaggccgagaccugcaaggugcaguccaaccgcgucuucugcgacaccaugaacagccugacgcuccccuccgaggugaaccugugcaacaucgacaucuucaaccccaaguacgacugcaagaucaugaccagcaagaccgacgucuccagcuccgugaucaccagccugggcgccaucguguccugcuacgggaagacgaagugcaccgccagcaacaagaaccggggcaucaucaagaccuucuccaacgggugcgacuacgucagcaacaagggcguggacaccguguccgucggcaacacgcucuacugcgugaacaagcaggaggggcagagccuguacgugaagggcgagcccaucaucaacuucuacgacccgcuggucuuccccagcgacgaguucgacgccuccaucagccaggugaacgagaagaucaaccagucccucgcguucauccgcaagagcgacgagcugcugcacaacgugaacgucgggaaguccaccaccaacaucaugaucaccaccaucaucaucgugaucaucgugauccuccugcugcucaucgccgucggccuguuccuguacugcaaggcccggagcacgcccgugacccuguccaaggaccagcucagcgggaucaacaacaucgccuucuccaacugaggacuaguguccaccugucccuccugggcugcuggauugucucguuuuccugccaaauaaacaggaucagcgcuuuacagaucuaaaaaaaaaaaaaaaaaaaaaaaaaaaaaaaaaaaaaaaaaaaaaaaaaaaaaaaaaaaaaaaaugcaucccccccccccccccccccccccccccccccaaaggcucuuuucagagccaccagaauu

SEQ ID NO: 15755 - RNA, 1994 nt, Artificial Sequence
  mRNA product Design i-1 comprising derived and/or modified sequence from HRSV(Memphis-37)__AIY60640.1__F_DSCav1_mut3 (opt2)
gggagagggcgcuuggcuugcaaggacccugagcugcggcauugaagcacacccaacccaacucgacugaagucagccucacugaaccggaucugagaaucuucucucucugggcuugccagggcucuccgaaccuagcuagcauccucuucaauuccaacuagaaagcuuaccauggagcuccccauccucaagaccaacgccaucaccaccauccucgccgccgucacccucugcuucgccuccucccagaacaucaccgaggaguucuaccaguccaccugcuccgccgucuccaagggcuaccucggcgcccuccgcaccggcugguacaccuccgucaucaccaucgagcucuccaacaucaaggagaucaagugcaacggcaccgacgccaaggucaagcucaucaagcaggagcucgacaaguacaagaacgccgucaccgaccuccagcuccucaugcaguccacccccgccgccggcuccggcuccgccaucugcuccggcaucgccgucugcaagguccuccaccucgagggcgaggucaacaagaucaagaacgcccuccucuccaccaacaaggccgucgucucccucuccaacggcgucuccguccucaccuucaagguccucgaccucaagaacuacaucgacaagcagcuccuccccauccucaacaagcaguccugcuccauccccaacaucgagaccgucaucgaguuccagcagaagaacaaccgccuccucgagaucacccgcgaguucuccgucaacgccggcgucaccacccccgucuccaccuacaugcucaccaacuccgagcuccucucccucaucaacgacaugcccaucaccaacgaccagaagaagcucauguccaacaacguccagaucguccgccagcaguccuacuccaucaugugcaucaucaaggaggagguccucgccuacgucguccagcucccccucuacggcgucaucgacacccccugcuggaagcuccacaccuccccccucugcaccaccaacaccaaggagggcuccaacaucugccucacccgcaccgaccgcggcugguacugcgacaacgccggcuccgucuccuucuucccccaggccgagaccugcaagguccaguccaaccgcgucuucugcgacaccaugaacucccucacccuccccuccgaggucaaccucugcaacaucgacaucuucaaccccaaguacgacugcaagaucaugaccuccaagaccgacgucuccuccuccgucaucaccucccucggcgccaucgucuccugcuacggcaagaccaagugcaccgccuccaacaagaaccgcggcaucaucaagaccuucuccaacggcugcgacuacgucuccaacaagggcgucgacaccgucuccgucggcaacacccucuacugcgucaacaagcaggagggccagucccucuacgucaagggcgagcccaucaucaacuucuacgacccccucgucuuccccuccgacgaguucgacgccuccaucucccaggucaacgagaagaucaaccagucccucgccuucauccgcaaguccgacgagcuccuccacaacgucaacgucggcaaguccaccaccaacaucaugaucaccaccaucaucaucgucaucaucgucauccuccuccuccucaucgccgucggccucuuccucuacugcaaggcccgcuccacccccgucacccucuccaaggaccagcucuccggcaucaacaacaucgccuucuccaacugaggacuaguguccaccugucccuccugggcugcuggauugucucguuuuccugccaaauaaacaggaucagcgcuuuacagaucuaaaaaaaaaaaaaaaaaaaaaaaaaaaaaaaaaaaaaaaaaaaaaaaaaaaaaaaaaaaaaaaaugcaucccccccccccccccccccccccccccccccaaaggcucuuuucagagccaccagaauu

SEQ ID NO: 15756 - RNA, 1994 nt, Artificial Sequence
  mRNA product Design i-1 comprising derived and/or modified sequence from HRSV(Memphis-37)__AIY60640.1__F_DSCav1_mut3 (opt3)
gggagagggcgcuuggcuugcaaggacccugagcugcggcauugaagcacacccaacccaacucgacugaagucagccucacugaaccggaucugagaaucuucucucucugggcuugccagggcucuccgaaccuagcuagcauccucuucaauuccaacuagaaagcuuaccauggagcugcccauccucaagaccaacgccauuacaacuauacuugcugcagugacgcugugcuucgccagcucccagaauaucaccgaagaguuuuaccaaucuacauguucagcggucaguaaaggcuauuugggggcuuuaagaacuggaugguacaccagcguuauuacaaucgaacuguccaacauuaaggagaucaaaugcaaugguaccgacgccaaggugaaacuaauaaagcaggaacucgauaaguauaaaaacgcaguaacugaccugcagcuucugaugcagucuacuccugccgcuggcucggggucagcaaucuguagcggaauugccgugugcaaggucuugcaccucgagggcgaggugaauaaaaucaagaacgcucugcugaguaccaauaaagccguugugucccucucuaacggugucagcguguuaacguucaagguacuggaucuuaagaauuacauugacaaacaauugcugccaauccuaaacaagcaguccuguucaauaccgaauauugaaacuguuaucgaguuucagcagaaaaacaauaggcuccuggaaauuacccgggaguucagugugaacgcgggggucacaacucccgugagcaccuauaugcuuacaaauucugagcuguugucccucaucaacgauaugccuaucaccaacgaccaaaagaaacugaugucaaauaacgugcagauuguccgccagcagagcuacaguauaaugugcaucauuaaggaagagguuuuagcauaugugguacaacugccacucuacggagugaucgauacgcccuguuggaaacuucauacuucuccucugugcacaaccaauacuaaggaaggcuccaacauauguuugacacgaaccgaccguggcugguacugcgauaaugccgggagcgucucguuuuucccacaggcugagacguguaaggugcagucuaacagaguuuucugcgacaccaugaacucccuaacacugcccucagaagugaaucucugcaauauugauaucuucaacccuaaauaugacuguaagaucaugacaaguaaaaccgaugucagcuccucugugauuacaagccugggagccaucguaucaugcuacgguaagacuaaauguaccgcaaguaauaagaacaggggcauuauaaagacauuuuccaaugggugcgacuauguuagcaacaaaggaguggacaccgucucugugggcaauacucuuuacugugucaacaagcaagagggucagucacuguaugugaaaggggagccaaucauuaacuucuacgauccguugguuuuucccagugacgaauuugaugcuagcaucucccaggugaaugagaagaucaaccagucucucgccuuuauucggaaaucggacgaacuguuacacaauguaaacgucggaaagagcacgacaaauauaaugaucaccacuauuaucauugugaucauaguuauccugcuacuccugauugcggugggccuuuucuuguauugcaaggcccgcuccaccccugucacacugucaaaagaucaacucaguggcaucaacaauauugcauucucuaacugaggacuaguguccaccugucccuccugggcugcuggauugucucguuuuccugccaaauaaacaggaucagcgcuuuacagaucuaaaaaaaaaaaaaaaaaaaaaaaaaaaaaaaaaaaaaaaaaaaaaaaaaaaaaaaaaaaaaaaaugcaucccccccccccccccccccccccccccccccaaaggcucuuuucagagccaccagaauu

SEQ ID NO: 15757 - RNA, 1994 nt, Artificial Sequence
  mRNA product Design i-1 comprising derived and/or modified sequence from HRSV(Memphis-37)__AIY60640.1__F_DSCav1_mut3 (opt4)
gggagagggcgcuuggcuugcaaggacccugagcugcggcauugaagcacacccaacccaacucgacugaagucagccucacugaaccggaucugagaaucuucucucucugggcuugccagggcucuccgaaccuagcuagcauccucuucaauuccaacuagaaagcuuaccauggagcugcccauccugaagaccaacgccaucaccaccauccuggccgccgugacccugugcuucgccagcagccagaacaucaccgaggaguucuaccagagcaccugcagcgccgugagcaagggcuaccugggcgcccugagaaccggcugguacaccagcgugaucaccaucgagcugagcaacaucaaggagaucaagugcaacggcaccgacgccaaggugaagcugaucaagcaggagcuggacaaguacaagaacgccgugaccgaccugcagcugcugaugcagagcacccccgccgccggcagcggcagcgccaucugcagcggcaucgccgugugcaaggugcugcaccuggagggcgaggugaacaagaucaagaacgcccugcugagcaccaacaaggccguggugagccugagcaacggcgugagcgugcugaccuucaaggugcuggaccugaagaacuacaucgacaagcagcugcugcccauccugaacaagcagagcugcagcauccccaacaucgagaccgugaucgaguuccagcagaagaacaacagacugcuggagaucaccagagaguucagcgugaacgccggcgugaccacccccgugagcaccuacaugcugaccaacagcgagcugcugagccugaucaacgacaugcccaucaccaacgaccagaagaagcugaugagcaacaacgugcagaucgugagacagcagagcuacagcaucaugugcaucaucaaggaggaggugcuggccuacguggugcagcugccccuguacggcgugaucgacacccccugcuggaagcugcacaccagcccccugugcaccaccaacaccaaggagggcagcaacaucugccugaccagaaccgacagaggcugguacugcgacaacgccggcagcgugagcuucuucccccaggccgagaccugcaaggugcagagcaacagaguguucugcgacaccaugaacagccugacccugcccagcgaggugaaccugugcaacaucgacaucuucaaccccaaguacgacugcaagaucaugaccagcaagaccgacgugagcagcagcgugaucaccagccugggcgccaucgugagcugcuacggcaagaccaagugcaccgccagcaacaagaacagaggcaucaucaagaccuucagcaacggcugcgacuacgugagcaacaagggcguggacaccgugagcgugggcaacacccuguacugcgugaacaagcaggagggccagagccuguacgugaagggcgagcccaucaucaacuucuacgacccccugguguuccccagcgacgaguucgacgccagcaucagccaggugaacgagaagaucaaccagagccuggccuucaucagaaagagcgacgagcugcugcacaacgugaacgugggcaagagcaccaccaacaucaugaucaccaccaucaucaucgugaucaucgugauccugcugcugcugaucgccgugggccuguuccuguacugcaaggccagaagcacccccgugacccugagcaaggaccagcugagcggcaucaacaacaucgccuucagcaacugaggacuaguguccaccugucccuccugggcugcuggauugucucguuuuccugccaaauaaacaggaucagcgcuuuacagaucuaaaaaaaaaaaaaaaaaaaaaaaaaaaaaaaaaaaaaaaaaaaaaaaaaaaaaaaaaaaaaaaaugcaucccccccccccccccccccccccccccccccaaaggcucuuuucagagccaccagaauu

SEQ ID NO: 15758 - RNA, 1994 nt, Artificial Sequence
  mRNA product Design i-1 comprising derived and/or modified sequence from HRSV(Memphis-37)__AIY60640.1__F_DSCav1_mut3 (opt5)
gggagagggcgcuuggcuugcaaggacccugagcugcggcauugaagcacacccaacccaacucgacugaagucagccucacugaaccggaucugagaaucuucucucucugggcuugccagggcucuccgaaccuagcuagcauccucuucaauuccaacuagaaagcuuaccauggagcugcccauccucaagaccaacgccauuacaacgauccuggcugccgugacccuuugcuucgcgagcucccagaauauuacagaagaguuuuaccaaucuaccuguagcgcugucuccaaaggcuaucugggggcccucagaacaggaugguacaccucuguuaucacaauugaacugagcaacaucaaggagaucaaaugcaauggcaccgacgccaaggugaaacuuauuaagcaggaacuggauaaguauaaaaacgcugugacggaccuccagcugcugaugcaguccaccccugccgcugggucuggaagcgccaucuguuccggcauugcggucugcaaggugcuccaccuggagggggagguuaauaaaaucaagaacgcccuucugagcacaaauaaagcuguggucucucucuccaacggagugagcguucugaccuucaaggugcuugaucugaagaauuacauugacaaacaacuccugccgauccugaacaagcagucuuguuccauucccaauaucgaaacagucaucgaguuucagcagaaaaacaaucggcuccuggaaauuacccgcgaguucagcgugaacgccggcgugacgacaccugucucuaccuauaugcuuacaaauuccgagcugcucagccugaucaacgauaugcccauuaccaacgaccaaaagaaacuuauguccaauaacguucagaucgugagacagcagucuuacagcauuaugugcaucaucaaggaagaggugcuggcuuaugucgugcaacucccucuguacggcguuauugauacccccuguuggaaacugcauacauccccucucugcacgaccaauacaaaggaagggagcaacaucugucugacccggacagaccgcggaugguacugcgauaaugccggcucuguguccuuuuucccgcaggcggagaccuguaagguccagagcaacagaguguuuugcgacacgaugaacucucuuacacugcccagcgaaguuaaucucugcaauauugauaucuucaacccuaaauaugacuguaagauuaugaccuccaaaaccgaugugucuagcuccgucaucacaagccugggggccaucgugucuugcuacggaaagaccaaauguacagcuuccaauaagaaccggggcauuaucaagacguuuagcaaugggugcgacuaugucucuaacaaaggaguggacaccguuuccgugggcaauacacuuuacugugucaacaagcaagagggccagagccuguaugugaaaggggagcccauuaucaacuucuacgauccucucguuuuucccuccgacgaguucgaugccucuauuagccaggugaaugaaaagaucaaccagucccuggcuuuuauucgcaaaucugacgaacugcuccacaaugucaacgugggaaagagcaccacaaauaucaugaucaccacgauuaucauugugaucauuguuauccugcuucugcucaucgccgucggccuguuccuguauugcaaggccagauccaccccggugacacuuagcaaagaucaacucucugggauuaacaauaucgcuuucuccaacugaggacuaguguccaccugucccuccugggcugcuggauugucucguuuuccugccaaauaaacaggaucagcgcuuuacagaucuaaaaaaaaaaaaaaaaaaaaaaaaaaaaaaaaaaaaaaaaaaaaaaaaaaaaaaaaaaaaaaaaugcaucccccccccccccccccccccccccccccccaaaggcucuuuucagagccaccagaauu

SEQ ID NO: 15759 - RNA, 1994 nt, Artificial Sequence
  mRNA product Design i-1 comprising derived and/or modified sequence from HRSV(Memphis-37)__AIY60640.1__F_DSCav1_mut3 (opt6)
gggagagggcgcuuggcuugcaaggacccugagcugcggcauugaagcacacccaacccaacucgacugaagucagccucacugaaccggaucugagaaucuucucucucugggcuugccagggcucuccgaaccuagcuagcauccucuucaauuccaacuagaaagcuuaccauggaauuaccaauacuaaaaacaaaugccaucaccaccauccuggccgccguaacauuaugcuucgcaaguucacaaaauauaacagaagaauuuuaucaaucaacuugcagcgccguaucaaaaggcuacuuaggcgcacuacguacaggaugguacacaucaguaauaaccauagaacuauccaauauuaaagaaauaaaaugcaauggaacagacgcaaaaguuaaacuaauaaaacaagaauuagacaaauacaaaaacgcaguaaccgaccuucaauuacuaaugcaaucuacccccgcugcagguuccggaucagcaauauguucaggaauugcaguaugcaaaguccuacacuuagaaggagaaguaaacaaaauaaaaaacgcacuauuaagcaccaauaaagcagucguaucauuauccaacggcguuucaguacuaacauuuaaaguacuugaccuaaaaaacuauauagacaaacaacuacuucccauccuuaacaaacaaagcugcucaauaccuaauaucgaaacaguaauagaauuucaacaaaaaaacaaucgauuauuagaaaucacacgagaauuuucugucaacgcaggagucaccacacccguaucuacuuauauguuaaccaacucugaauuauuaucacuaaucaaugacaugccaauaacaaacgaucaaaaaaaauuaaugucaaauaacguacaaauaguaagacaacaaucauacucaauaaugugcauuauaaaagaagaaguacuagccuauguuguacaacucccacucuacggcguaauagacacaccaugcuggaaauuacacacuucaccacuaugcacaacaaacacaaaagaaggaucaaacaucugccuaaccagaaccgauagaggaugguauugcgacaaugccggaucaguuucauucuucccacaagcagaaacaugcaaaguacaauccaacagaguuuucugugacacaaugaacucgcuaacauuacccagcgaaguaaaccucugcaacauagacauauucaacccaaaauacgauugcaaaauaaugacuucuaaaacagauguuuccucaagcgucauaacgaguuuaggagcaauaguaagcuguuacggaaaaaccaaauguaccgcaucaaacaaaaaccgaggaauaauaaaaaccuuuucaaacggaugcgauuacgucuccaacaaaggagucgacacaguaucaguuggcaauacucuuuacugcguaaauaaacaagaaggacaaucacuauacguaaaaggcgaaccaauaauaaacuucuacgacccccucgucuucccuucagaugaauuugacgcaagcaucucacaaguuaaugaaaaaauaaaucaauccuuagcauucauacgaaaaucagacgaacuauuacacaacguaaacguaggaaaaucaacgacaaacauaaugauaacaacuaucauuauagucauaauagucauacuacuacuauuaauagccguaggcuuauuccuauacugcaaagcaagaucuacuccaguaacacucucaaaagaccaauuaucuggaauaaauaacauagcauucucuaauuaaggacuaguguccaccugucccuccugggcugcuggauugucucguuuuccugccaaauaaacaggaucagcgcuuuacagaucuaaaaaaaaaaaaaaaaaaaaaaaaaaaaaaaaaaaaaaaaaaaaaaaaaaaaaaaaaaaaaaaaugcaucccccccccccccccccccccccccccccccaaaggcucuuuucagagccaccagaauu

SEQ ID NO: 15760 - RNA, 1994 nt, Artificial Sequence
  mRNA product Design i-1 comprising derived and/or modified sequence from HRSV(Memphis-37)__AIY60640.1__F_DSCav1_mut3 (opt11)
gggagagggcgcuuggcuugcaaggacccugagcugcggcauugaagcacacccaacccaacucgacugaagucagccucacugaaccggaucugagaaucuucucucucugggcuugccagggcucuccgaaccuagcuagcauccucuucaauuccaacuagaaagcuuaccauggaacuccccauccucaaaaccaacgccauuaccacgauccucgccgcagucacccucugcuucgccuccucacaaaacaucacagaagaauuuuaccaaaguaccugcuccgccgucagcaaaggauaccucggcgcccuccgcaccggcugguacacauccgucauaaccaucgaacucagcaacaucaaagaaaucaaauguaacggaaccgacgccaaaguaaaacuaauaaaacaagaacucgacaaauacaagaacgccgucaccgaccuccaacuccucaugcaaucuacccccgccgccggcucagguagcgccaucugcagcgguauugccgucugcaaaguacuccaccuagaaggagaagucaauaaaaucaaaaacgcccuacucuccaccaacaaggcagucgucagccucuccaacggcgucucagucuuaaccuucaaagugcucgaccucaaaaauuacauagacaaacaacuacuccccauucucaacaaacaauccugcuccauacccaacauagaaaccgucauugaauuucaacagaaaaacaaccgccuccucgaaaucacgcgcgaguucagugucaacgccggcgucaccaccccagucucgacauacaugcucacaaacucagaacuccucucguuaaucaacgacaugccaauaaccaacgaccaaaagaaacuaauguccaacaacguucaaauaguucgccaacaaucauacuccauaaugugcaucaucaaagaagaaguccucgccuacguuguacaauuaccccucuacggcgucaucgacacaccaugcuggaaacuccacacaucgccccucugcaccaccaacaccaaagaaggcagcaacauuugccucacccggacagaccgcggcugguacugcgacaaugcaggcagcgucucauucuucccacaagccgaaaccugcaaaguccaaagcaaccgugucuucugcgacacaaugaacucccuuacccucccaagcgaaguaaaccucugcaauauugacaucuucaaccccaaauacgacugcaaaaucaugaccuccaaaaccgacgucuccucaucagucaucaccucccuuggcgccauugucuccuguuacgguaaaaccaaaugcaccgccuccaacaaaaaccgcggcaucaucaaaaccuucucuaacggcugcgacuacgucucaaacaaaggcgucgacacugucuccgucggcaacacccuauacugcgucaacaagcaagaaggacagucccuauacguaaaaggugaaccaauuaucaacuucuacgacccccuagucuucccauccgacgaguucgaugccuccaucucccaaguaaaugaaaagaucaaucaaagccuggccuucauccgcaaauccgacgaacuacuccacaaugucaacgucggaaaaucaacaacaaacaucaugaucaccaccaucaucaucgucaucauaguaauccuccuacugcucaucgccgucggucucuuccuauacugcaaagcccguucuacuccagucacccucuccaaagaccaacuaucaggaaucaacaacaucgccuucagcaacuaaggacuaguguccaccugucccuccugggcugcuggauugucucguuuuccugccaaauaaacaggaucagcgcuuuacagaucuaaaaaaaaaaaaaaaaaaaaaaaaaaaaaaaaaaaaaaaaaaaaaaaaaaaaaaaaaaaaaaaaugcaucccccccccccccccccccccccccccccccaaaggcucuuuucagagccaccagaauu

SEQ ID NO: 15761 - RNA, 1994 nt, Artificial Sequence
  mRNA product Design i-2 comprising derived and/or modified sequence from HRSV(Memphis-37)__AIY60640.1__F_DSCav1_mut3 (opt1)
gggagaggcgcugccuacggagguggcagccaucuccuucucggcaucaagcuuaccauggagcugcccauccucaagaccaacgccaucaccacgauccuggccgcggugacccugugcuucgccagcucccagaacaucaccgaggaguucuaccagagcacgugcuccgccgucagcaagggcuaccucggcgcccugcgcaccgggugguacaccagcgugaucaccaucgagcuguccaacaucaaggagaucaagugcaacggcaccgacgccaaggugaagcucaucaagcaggagcuggacaaguacaagaacgcggucacggaccugcagcuccugaugcagagcaccccggccgccggcuccgggagcgcgaucugcuccggcaucgccgucugcaaggugcugcaccucgagggcgaggugaacaagaucaagaacgcccugcuguccaccaacaaggccgucgugagccucuccaacggggugagcguccugaccuucaaggugcuggaccucaagaacuacaucgacaagcagcugcugcccauccugaacaagcagagcugcuccauccccaacaucgagaccgucaucgaguuccagcagaagaacaaccgccuccuggagaucacgcgggaguucagcgugaacgcgggcgugaccacccccgucuccaccuacaugcugacgaacagcgagcuccugucccugaucaacgacaugccgaucaccaacgaccagaagaagcucaugagcaacaacgugcagaucgugcgccagcaguccuacagcaucaugugcaucaucaaggaggagguccuggccuacguggugcagcugccccucuacggggucaucgacacccccugcuggaagcugcacaccagcccccugugcacgaccaacaccaaggagggcuccaacaucugccucacccggacggaccgcgggugguacugcgacaacgccggcagcguguccuucuucccgcaggccgagaccugcaagguccagagcaaccggguguucugcgacaccaugaacucccugacccugcccagcgaggugaaccucugcaacaucgacaucuucaaccccaaguacgacugcaagaucaugacguccaagaccgacgucagcuccagcgugaucaccucccugggcgccaucgugagcugcuacgggaagaccaagugcacggcgagcaacaagaaccgcggcaucaucaagaccuucuccaacgggugcgacuacgucagcaacaagggcguggacaccguguccgucggcaacacccuguacugcgugaacaagcaggagggccagagccucuacgugaagggggagcccaucaucaacuucuacgacccgcuggucuuccccuccgacgaguucgacgccagcaucucccaggugaacgagaagaucaaccagagccuggccuucauccggaaguccgacgagcuccugcacaacgugaacgucggcaagagcaccacgaacaucaugaucaccaccaucaucaucgugaucaucgugauccugcugcuccugaucgccgucgggcuguuccucuacugcaaggcccgcuccacccccgugacgcugagcaaggaccagcuguccgggaucaacaacaucgcguucagcaacugaggacuagugcaucacauuuaaaagcaucucagccuaccaugagaauaagagaaagaaaaugaagaucaauagcuuauucaucucuuuuucuuuuucguugguguaaagccaacacccugucuaaaaaacauaaauuucuuuaaucauuuugccucuuuucucugugcuucaauuaauaaaaaauggaaagaaccuagaucuaaaaaaaaaaaaaaaaaaaaaaaaaaaaaaaaaaaaaaaaaaaaaaaaaaaaaaaaaaaaaaaaugcaucccccccccccccccccccccccccccccccaaaggcucuuuucagagccaccagaauu

SEQ ID NO: 15762 - RNA, 1994 nt, Artificial Sequence
  mRNA product Design i-2 comprising derived and/or modified sequence from HRSV(Memphis-37)__AIY60640.1__F_DSCav1_mut3 (opt1)
gggagaggcgcugccuacggagguggcagccaucuccuucucggcaucaagcuuaccauggagcugcccauccucaagaccaacgccaucaccacgauccuggccgcggugacccugugcuucgccagcucccagaacaucaccgaggaguucuaccagagcacgugcuccgccgucagcaagggcuaccucggggcccugcgcaccggcugguacaccuccgugaucaccaucgagcugagcaacaucaaggagaucaagugcaacgggaccgacgccaaggugaagcucaucaagcaggagcuggacaaguacaagaacgcggucacggaccugcagcuccugaugcaguccaccccggccgccggcagcggguccgccaucugcagcggcaucgcggugugcaaggugcugcaccucgagggcgaggucaacaagaucaagaacgcccugcuguccaccaacaaggccguggugagccucuccaacggggucagcgugcugaccuucaaggugcuggaccucaagaacuacaucgacaagcagcugcugcccauccucaacaagcaguccugcagcauccccaacaucgagacggucaucgaguuccagcagaagaacaaccggcugcuggagaucacccgcgaguucuccgugaacgccggcgugaccacccccgucagcacguacaugcucaccaacuccgagcugcugagccucaucaacgacaugccgaucaccaacgaccagaagaagcugaugagcaacaacgugcagaucgugcggcagcaguccuacagcaucaugugcaucaucaaggaggagguccuggccuacguggugcagcucccccuguacggggucaucgacacccccugcuggaagcugcacacgagcccccucugcaccaccaacaccaaggagggcuccaacaucugccugacgcgcaccgaccgggggugguacugcgacaacgcgggcuccgugagcuucuucccgcaggccgagaccugcaaggugcaguccaaccgcgucuucugcgacaccaugaacagccugacgcuccccuccgaggugaaccugugcaacaucgacaucuucaaccccaaguacgacugcaagaucaugaccagcaagaccgacgucuccagcuccgugaucaccagccugggcgccaucguguccugcuacgggaagacgaagugcaccgccagcaacaagaaccggggcaucaucaagaccuucuccaacgggugcgacuacgucagcaacaagggcguggacaccguguccgucggcaacacgcucuacugcgugaacaagcaggaggggcagagccuguacgugaagggcgagcccaucaucaacuucuacgacccgcuggucuuccccagcgacgaguucgacgccuccaucagccaggugaacgagaagaucaaccagucccucgcguucauccgcaagagcgacgagcugcugcacaacgugaacgucgggaaguccaccaccaacaucaugaucaccaccaucaucaucgugaucaucgugauccuccugcugcucaucgccgucggccuguuccuguacugcaaggcccggagcacgcccgugacccuguccaaggaccagcucagcgggaucaacaacaucgccuucuccaacugaggacuagugcaucacauuuaaaagcaucucagccuaccaugagaauaagagaaagaaaaugaagaucaauagcuuauucaucucuuuuucuuuuucguugguguaaagccaacacccugucuaaaaaacauaaauuucuuuaaucauuuugccucuuuucucugugcuucaauuaauaaaaaauggaaagaaccuagaucuaaaaaaaaaaaaaaaaaaaaaaaaaaaaaaaaaaaaaaaaaaaaaaaaaaaaaaaaaaaaaaaaugcaucccccccccccccccccccccccccccccccaaaggcucuuuucagagccaccagaauu

SEQ ID NO: 15763 - RNA, 1994 nt, Artificial Sequence
  mRNA product Design i-2 comprising derived and/or modified sequence from HRSV(Memphis-37)__AIY60640.1__F_DSCav1_mut3 (opt2)
gggagaggcgcugccuacggagguggcagccaucuccuucucggcaucaagcuuaccauggagcuccccauccucaagaccaacgccaucaccaccauccucgccgccgucacccucugcuucgccuccucccagaacaucaccgaggaguucuaccaguccaccugcuccgccgucuccaagggcuaccucggcgcccuccgcaccggcugguacaccuccgucaucaccaucgagcucuccaacaucaaggagaucaagugcaacggcaccgacgccaaggucaagcucaucaagcaggagcucgacaaguacaagaacgccgucaccgaccuccagcuccucaugcaguccacccccgccgccggcuccggcuccgccaucugcuccggcaucgccgucugcaagguccuccaccucgagggcgaggucaacaagaucaagaacgcccuccucuccaccaacaaggccgucgucucccucuccaacggcgucuccguccucaccuucaagguccucgaccucaagaacuacaucgacaagcagcuccuccccauccucaacaagcaguccugcuccauccccaacaucgagaccgucaucgaguuccagcagaagaacaaccgccuccucgagaucacccgcgaguucuccgucaacgccggcgucaccacccccgucuccaccuacaugcucaccaacuccgagcuccucucccucaucaacgacaugcccaucaccaacgaccagaagaagcucauguccaacaacguccagaucguccgccagcaguccuacuccaucaugugcaucaucaaggaggagguccucgccuacgucguccagcucccccucuacggcgucaucgacacccccugcuggaagcuccacaccuccccccucugcaccaccaacaccaaggagggcuccaacaucugccucacccgcaccgaccgcggcugguacugcgacaacgccggcuccgucuccuucuucccccaggccgagaccugcaagguccaguccaaccgcgucuucugcgacaccaugaacucccucacccuccccuccgaggucaaccucugcaacaucgacaucuucaaccccaaguacgacugcaagaucaugaccuccaagaccgacgucuccuccuccgucaucaccucccucggcgccaucgucuccugcuacggcaagaccaagugcaccgccuccaacaagaaccgcggcaucaucaagaccuucuccaacggcugcgacuacgucuccaacaagggcgucgacaccgucuccgucggcaacacccucuacugcgucaacaagcaggagggccagucccucuacgucaagggcgagcccaucaucaacuucuacgacccccucgucuuccccuccgacgaguucgacgccuccaucucccaggucaacgagaagaucaaccagucccucgccuucauccgcaaguccgacgagcuccuccacaacgucaacgucggcaaguccaccaccaacaucaugaucaccaccaucaucaucgucaucaucgucauccuccuccuccucaucgccgucggccucuuccucuacugcaaggcccgcuccacccccgucacccucuccaaggaccagcucuccggcaucaacaacaucgccuucuccaacugaggacuagugcaucacauuuaaaagcaucucagccuaccaugagaauaagagaaagaaaaugaagaucaauagcuuauucaucucuuuuucuuuuucguugguguaaagccaacacccugucuaaaaaacauaaauuucuuuaaucauuuugccucuuuucucugugcuucaauuaauaaaaaauggaaagaaccuagaucuaaaaaaaaaaaaaaaaaaaaaaaaaaaaaaaaaaaaaaaaaaaaaaaaaaaaaaaaaaaaaaaaugcaucccccccccccccccccccccccccccccccaaaggcucuuuucagagccaccagaauu

SEQ ID NO: 15764 - RNA, 1994 nt, Artificial Sequence
  mRNA product Design i-2 comprising derived and/or modified sequence from HRSV(Memphis-37)__AIY60640.1__F_DSCav1_mut3 (opt3)
gggagaggcgcugccuacggagguggcagccaucuccuucucggcaucaagcuuaccauggagcugcccauccucaagaccaacgccauuacaacuauacuugcugcagugacgcugugcuucgccagcucccagaauaucaccgaagaguuuuaccaaucuacauguucagcggucaguaaaggcuauuugggggcuuuaagaacuggaugguacaccagcguuauuacaaucgaacuguccaacauuaaggagaucaaaugcaaugguaccgacgccaaggugaaacuaauaaagcaggaacucgauaaguauaaaaacgcaguaacugaccugcagcuucugaugcagucuacuccugccgcuggcucggggucagcaaucuguagcggaauugccgugugcaaggucuugcaccucgagggcgaggugaauaaaaucaagaacgcucugcugaguaccaauaaagccguugugucccucucuaacggugucagcguguuaacguucaagguacuggaucuuaagaauuacauugacaaacaauugcugccaauccuaaacaagcaguccuguucaauaccgaauauugaaacuguuaucgaguuucagcagaaaaacaauaggcuccuggaaauuacccgggaguucagugugaacgcgggggucacaacucccgugagcaccuauaugcuuacaaauucugagcuguugucccucaucaacgauaugccuaucaccaacgaccaaaagaaacugaugucaaauaacgugcagauuguccgccagcagagcuacaguauaaugugcaucauuaaggaagagguuuuagcauaugugguacaacugccacucuacggagugaucgauacgcccuguuggaaacuucauacuucuccucugugcacaaccaauacuaaggaaggcuccaacauauguuugacacgaaccgaccguggcugguacugcgauaaugccgggagcgucucguuuuucccacaggcugagacguguaaggugcagucuaacagaguuuucugcgacaccaugaacucccuaacacugcccucagaagugaaucucugcaauauugauaucuucaacccuaaauaugacuguaagaucaugacaaguaaaaccgaugucagcuccucugugauuacaagccugggagccaucguaucaugcuacgguaagacuaaauguaccgcaaguaauaagaacaggggcauuauaaagacauuuuccaaugggugcgacuauguuagcaacaaaggaguggacaccgucucugugggcaauacucuuuacugugucaacaagcaagagggucagucacuguaugugaaaggggagccaaucauuaacuucuacgauccguugguuuuucccagugacgaauuugaugcuagcaucucccaggugaaugagaagaucaaccagucucucgccuuuauucggaaaucggacgaacuguuacacaauguaaacgucggaaagagcacgacaaauauaaugaucaccacuauuaucauugugaucauaguuauccugcuacuccugauugcggugggccuuuucuuguauugcaaggcccgcuccaccccugucacacugucaaaagaucaacucaguggcaucaacaauauugcauucucuaacugaggacuagugcaucacauuuaaaagcaucucagccuaccaugagaauaagagaaagaaaaugaagaucaauagcuuauucaucucuuuuucuuuuucguugguguaaagccaacacccugucuaaaaaacauaaauuucuuuaaucauuuugccucuuuucucugugcuucaauuaauaaaaaauggaaagaaccuagaucuaaaaaaaaaaaaaaaaaaaaaaaaaaaaaaaaaaaaaaaaaaaaaaaaaaaaaaaaaaaaaaaaugcaucccccccccccccccccccccccccccccccaaaggcucuuuucagagccaccagaauu

SEQ ID NO: 15765 - RNA, 1994 nt, Artificial Sequence
  mRNA product Design i-2 comprising derived and/or modified sequence from HRSV(Memphis-37)__AIY60640.1__F_DSCav1_mut3 (opt4)
gggagaggcgcugccuacggagguggcagccaucuccuucucggcaucaagcuuaccauggagcugcccauccugaagaccaacgccaucaccaccauccuggccgccgugacccugugcuucgccagcagccagaacaucaccgaggaguucuaccagagcaccugcagcgccgugagcaagggcuaccugggcgcccugagaaccggcugguacaccagcgugaucaccaucgagcugagcaacaucaaggagaucaagugcaacggcaccgacgccaaggugaagcugaucaagcaggagcuggacaaguacaagaacgccgugaccgaccugcagcugcugaugcagagcacccccgccgccggcagcggcagcgccaucugcagcggcaucgccgugugcaaggugcugcaccuggagggcgaggugaacaagaucaagaacgcccugcugagcaccaacaaggccguggugagccugagcaacggcgugagcgugcugaccuucaaggugcuggaccugaagaacuacaucgacaagcagcugcugcccauccugaacaagcagagcugcagcauccccaacaucgagaccgugaucgaguuccagcagaagaacaacagacugcuggagaucaccagagaguucagcgugaacgccggcgugaccacccccgugagcaccuacaugcugaccaacagcgagcugcugagccugaucaacgacaugcccaucaccaacgaccagaagaagcugaugagcaacaacgugcagaucgugagacagcagagcuacagcaucaugugcaucaucaaggaggaggugcuggccuacguggugcagcugccccuguacggcgugaucgacacccccugcuggaagcugcacaccagcccccugugcaccaccaacaccaaggagggcagcaacaucugccugaccagaaccgacagaggcugguacugcgacaacgccggcagcgugagcuucuucccccaggccgagaccugcaaggugcagagcaacagaguguucugcgacaccaugaacagccugacccugcccagcgaggugaaccugugcaacaucgacaucuucaaccccaaguacgacugcaagaucaugaccagcaagaccgacgugagcagcagcgugaucaccagccugggcgccaucgugagcugcuacggcaagaccaagugcaccgccagcaacaagaacagaggcaucaucaagaccuucagcaacggcugcgacuacgugagcaacaagggcguggacaccgugagcgugggcaacacccuguacugcgugaacaagcaggagggccagagccuguacgugaagggcgagcccaucaucaacuucuacgacccccugguguuccccagcgacgaguucgacgccagcaucagccaggugaacgagaagaucaaccagagccuggccuucaucagaaagagcgacgagcugcugcacaacgugaacgugggcaagagcaccaccaacaucaugaucaccaccaucaucaucgugaucaucgugauccugcugcugcugaucgccgugggccuguuccuguacugcaaggccagaagcacccccgugacccugagcaaggaccagcugagcggcaucaacaacaucgccuucagcaacugaggacuagugcaucacauuuaaaagcaucucagccuaccaugagaauaagagaaagaaaaugaagaucaauagcuuauucaucucuuuuucuuuuucguugguguaaagccaacacccugucuaaaaaacauaaauuucuuuaaucauuuugccucuuuucucugugcuucaauuaauaaaaaauggaaagaaccuagaucuaaaaaaaaaaaaaaaaaaaaaaaaaaaaaaaaaaaaaaaaaaaaaaaaaaaaaaaaaaaaaaaaugcaucccccccccccccccccccccccccccccccaaaggcucuuuucagagccaccagaauu

SEQ ID NO: 15766 - RNA, 1994 nt, Artificial Sequence
  mRNA product Design i-2 comprising derived and/or modified sequence from HRSV(Memphis-37)__AIY60640.1__F_DSCav1_mut3 (opt5)
gggagaggcgcugccuacggagguggcagccaucuccuucucggcaucaagcuuaccauggagcugcccauccucaagaccaacgccauuacaacgauccuggcugccgugacccuuugcuucgcgagcucccagaauauuacagaagaguuuuaccaaucuaccuguagcgcugucuccaaaggcuaucugggggcccucagaacaggaugguacaccucuguuaucacaauugaacugagcaacaucaaggagaucaaaugcaauggcaccgacgccaaggugaaacuuauuaagcaggaacuggauaaguauaaaaacgcugugacggaccuccagcugcugaugcaguccaccccugccgcugggucuggaagcgccaucuguuccggcauugcggucugcaaggugcuccaccuggagggggagguuaauaaaaucaagaacgcccuucugagcacaaauaaagcuguggucucucucuccaacggagugagcguucugaccuucaaggugcuugaucugaagaauuacauugacaaacaacuccugccgauccugaacaagcagucuuguuccauucccaauaucgaaacagucaucgaguuucagcagaaaaacaaucggcuccuggaaauuacccgcgaguucagcgugaacgccggcgugacgacaccugucucuaccuauaugcuuacaaauuccgagcugcucagccugaucaacgauaugcccauuaccaacgaccaaaagaaacuuauguccaauaacguucagaucgugagacagcagucuuacagcauuaugugcaucaucaaggaagaggugcuggcuuaugucgugcaacucccucuguacggcguuauugauacccccuguuggaaacugcauacauccccucucugcacgaccaauacaaaggaagggagcaacaucugucugacccggacagaccgcggaugguacugcgauaaugccggcucuguguccuuuuucccgcaggcggagaccuguaagguccagagcaacagaguguuuugcgacacgaugaacucucuuacacugcccagcgaaguuaaucucugcaauauugauaucuucaacccuaaauaugacuguaagauuaugaccuccaaaaccgaugugucuagcuccgucaucacaagccugggggccaucgugucuugcuacggaaagaccaaauguacagcuuccaauaagaaccggggcauuaucaagacguuuagcaaugggugcgacuaugucucuaacaaaggaguggacaccguuuccgugggcaauacacuuuacugugucaacaagcaagagggccagagccuguaugugaaaggggagcccauuaucaacuucuacgauccucucguuuuucccuccgacgaguucgaugccucuauuagccaggugaaugaaaagaucaaccagucccuggcuuuuauucgcaaaucugacgaacugcuccacaaugucaacgugggaaagagcaccacaaauaucaugaucaccacgauuaucauugugaucauuguuauccugcuucugcucaucgccgucggccuguuccuguauugcaaggccagauccaccccggugacacuuagcaaagaucaacucucugggauuaacaauaucgcuuucuccaacugaggacuagugcaucacauuuaaaagcaucucagccuaccaugagaauaagagaaagaaaaugaagaucaauagcuuauucaucucuuuuucuuuuucguugguguaaagccaacacccugucuaaaaaacauaaauuucuuuaaucauuuugccucuuuucucugugcuucaauuaauaaaaaauggaaagaaccuagaucuaaaaaaaaaaaaaaaaaaaaaaaaaaaaaaaaaaaaaaaaaaaaaaaaaaaaaaaaaaaaaaaaugcaucccccccccccccccccccccccccccccccaaaggcucuuuucagagccaccagaauu

SEQ ID NO: 15767 - RNA, 1994 nt, Artificial Sequence
  mRNA product Design i-2 comprising derived and/or modified sequence from HRSV(Memphis-37)__AIY60640.1__F_DSCav1_mut3 (opt6)
gggagaggcgcugccuacggagguggcagccaucuccuucucggcaucaagcuuaccauggaauuaccaauacuaaaaacaaaugccaucaccaccauccuggccgccguaacauuaugcuucgcaaguucacaaaauauaacagaagaauuuuaucaaucaacuugcagcgccguaucaaaaggcuacuuaggcgcacuacguacaggaugguacacaucaguaauaaccauagaacuauccaauauuaaagaaauaaaaugcaauggaacagacgcaaaaguuaaacuaauaaaacaagaauuagacaaauacaaaaacgcaguaaccgaccuucaauuacuaaugcaaucuacccccgcugcagguuccggaucagcaauauguucaggaauugcaguaugcaaaguccuacacuuagaaggagaaguaaacaaaauaaaaaacgcacuauuaagcaccaauaaagcagucguaucauuauccaacggcguuucaguacuaacauuuaaaguacuugaccuaaaaaacuauauagacaaacaacuacuucccauccuuaacaaacaaagcugcucaauaccuaauaucgaaacaguaauagaauuucaacaaaaaaacaaucgauuauuagaaaucacacgagaauuuucugucaacgcaggagucaccacacccguaucuacuuauauguuaaccaacucugaauuauuaucacuaaucaaugacaugccaauaacaaacgaucaaaaaaaauuaaugucaaauaacguacaaauaguaagacaacaaucauacucaauaaugugcauuauaaaagaagaaguacuagccuauguuguacaacucccacucuacggcguaauagacacaccaugcuggaaauuacacacuucaccacuaugcacaacaaacacaaaagaaggaucaaacaucugccuaaccagaaccgauagaggaugguauugcgacaaugccggaucaguuucauucuucccacaagcagaaacaugcaaaguacaauccaacagaguuuucugugacacaaugaacucgcuaacauuacccagcgaaguaaaccucugcaacauagacauauucaacccaaaauacgauugcaaaauaaugacuucuaaaacagauguuuccucaagcgucauaacgaguuuaggagcaauaguaagcuguuacggaaaaaccaaauguaccgcaucaaacaaaaaccgaggaauaauaaaaaccuuuucaaacggaugcgauuacgucuccaacaaaggagucgacacaguaucaguuggcaauacucuuuacugcguaaauaaacaagaaggacaaucacuauacguaaaaggcgaaccaauaauaaacuucuacgacccccucgucuucccuucagaugaauuugacgcaagcaucucacaaguuaaugaaaaaauaaaucaauccuuagcauucauacgaaaaucagacgaacuauuacacaacguaaacguaggaaaaucaacgacaaacauaaugauaacaacuaucauuauagucauaauagucauacuacuacuauuaauagccguaggcuuauuccuauacugcaaagcaagaucuacuccaguaacacucucaaaagaccaauuaucuggaauaaauaacauagcauucucuaauuaaggacuagugcaucacauuuaaaagcaucucagccuaccaugagaauaagagaaagaaaaugaagaucaauagcuuauucaucucuuuuucuuuuucguugguguaaagccaacacccugucuaaaaaacauaaauuucuuuaaucauuuugccucuuuucucugugcuucaauuaauaaaaaauggaaagaaccuagaucuaaaaaaaaaaaaaaaaaaaaaaaaaaaaaaaaaaaaaaaaaaaaaaaaaaaaaaaaaaaaaaaaugcaucccccccccccccccccccccccccccccccaaaggcucuuuucagagccaccagaauu

SEQ ID NO: 15768 - RNA, 1994 nt, Artificial Sequence
  mRNA product Design i-2 comprising derived and/or modified sequence from HRSV(Memphis-37)__AIY60640.1__F_DSCav1_mut3 (opt11)
gggagaggcgcugccuacggagguggcagccaucuccuucucggcaucaagcuuaccauggaacuccccauccucaaaaccaacgccauuaccacgauccucgccgcagucacccucugcuucgccuccucacaaaacaucacagaagaauuuuaccaaaguaccugcuccgccgucagcaaaggauaccucggcgcccuccgcaccggcugguacacauccgucauaaccaucgaacucagcaacaucaaagaaaucaaauguaacggaaccgacgccaaaguaaaacuaauaaaacaagaacucgacaaauacaagaacgccgucaccgaccuccaacuccucaugcaaucuacccccgccgccggcucagguagcgccaucugcagcgguauugccgucugcaaaguacuccaccuagaaggagaagucaauaaaaucaaaaacgcccuacucuccaccaacaaggcagucgucagccucuccaacggcgucucagucuuaaccuucaaagugcucgaccucaaaaauuacauagacaaacaacuacuccccauucucaacaaacaauccugcuccauacccaacauagaaaccgucauugaauuucaacagaaaaacaaccgccuccucgaaaucacgcgcgaguucagugucaacgccggcgucaccaccccagucucgacauacaugcucacaaacucagaacuccucucguuaaucaacgacaugccaauaaccaacgaccaaaagaaacuaauguccaacaacguucaaauaguucgccaacaaucauacuccauaaugugcaucaucaaagaagaaguccucgccuacguuguacaauuaccccucuacggcgucaucgacacaccaugcuggaaacuccacacaucgccccucugcaccaccaacaccaaagaaggcagcaacauuugccucacccggacagaccgcggcugguacugcgacaaugcaggcagcgucucauucuucccacaagccgaaaccugcaaaguccaaagcaaccgugucuucugcgacacaaugaacucccuuacccucccaagcgaaguaaaccucugcaauauugacaucuucaaccccaaauacgacugcaaaaucaugaccuccaaaaccgacgucuccucaucagucaucaccucccuuggcgccauugucuccuguuacgguaaaaccaaaugcaccgccuccaacaaaaaccgcggcaucaucaaaaccuucucuaacggcugcgacuacgucucaaacaaaggcgucgacacugucuccgucggcaacacccuauacugcgucaacaagcaagaaggacagucccuauacguaaaaggugaaccaauuaucaacuucuacgacccccuagucuucccauccgacgaguucgaugccuccaucucccaaguaaaugaaaagaucaaucaaagccuggccuucauccgcaaauccgacgaacuacuccacaaugucaacgucggaaaaucaacaacaaacaucaugaucaccaccaucaucaucgucaucauaguaauccuccuacugcucaucgccgucggucucuuccuauacugcaaagcccguucuacuccagucacccucuccaaagaccaacuaucaggaaucaacaacaucgccuucagcaacuaaggacuagugcaucacauuuaaaagcaucucagccuaccaugagaauaagagaaagaaaaugaagaucaauagcuuauucaucucuuuuucuuuuucguugguguaaagccaacacccugucuaaaaaacauaaauuucuuuaaucauuuugccucuuuucucugugcuucaauuaauaaaaaauggaaagaaccuagaucuaaaaaaaaaaaaaaaaaaaaaaaaaaaaaaaaaaaaaaaaaaaaaaaaaaaaaaaaaaaaaaaaugcaucccccccccccccccccccccccccccccccaaaggcucuuuucagagccaccagaauu

SEQ ID NO: 15769 - RNA, 1990 nt, Artificial Sequence
  mRNA product Design i-2 comprising derived and/or modified sequence from HRSV(Memphis-37)__AIY60640.1__F_DSCav1_mut3 (opt1)
ggggcgcugccuacggagguggcagccaucuccuucucggcaucaagcuuaccauggagcugcccauccucaagaccaacgccaucaccacgauccuggccgcggugacccugugcuucgccagcucccagaacaucaccgaggaguucuaccagagcacgugcuccgccgucagcaagggcuaccucggcgcccugcgcaccgggugguacaccagcgugaucaccaucgagcuguccaacaucaaggagaucaagugcaacggcaccgacgccaaggugaagcucaucaagcaggagcuggacaaguacaagaacgcggucacggaccugcagcuccugaugcagagcaccccggccgccggcuccgggagcgcgaucugcuccggcaucgccgucugcaaggugcugcaccucgagggcgaggugaacaagaucaagaacgcccugcuguccaccaacaaggccgucgugagccucuccaacggggugagcguccugaccuucaaggugcuggaccucaagaacuacaucgacaagcagcugcugcccauccugaacaagcagagcugcuccauccccaacaucgagaccgucaucgaguuccagcagaagaacaaccgccuccuggagaucacgcgggaguucagcgugaacgcgggcgugaccacccccgucuccaccuacaugcugacgaacagcgagcuccugucccugaucaacgacaugccgaucaccaacgaccagaagaagcucaugagcaacaacgugcagaucgugcgccagcaguccuacagcaucaugugcaucaucaaggaggagguccuggccuacguggugcagcugccccucuacggggucaucgacacccccugcuggaagcugcacaccagcccccugugcacgaccaacaccaaggagggcuccaacaucugccucacccggacggaccgcgggugguacugcgacaacgccggcagcguguccuucuucccgcaggccgagaccugcaagguccagagcaaccggguguucugcgacaccaugaacucccugacccugcccagcgaggugaaccucugcaacaucgacaucuucaaccccaaguacgacugcaagaucaugacguccaagaccgacgucagcuccagcgugaucaccucccugggcgccaucgugagcugcuacgggaagaccaagugcacggcgagcaacaagaaccgcggcaucaucaagaccuucuccaacgggugcgacuacgucagcaacaagggcguggacaccguguccgucggcaacacccuguacugcgugaacaagcaggagggccagagccucuacgugaagggggagcccaucaucaacuucuacgacccgcuggucuuccccuccgacgaguucgacgccagcaucucccaggugaacgagaagaucaaccagagccuggccuucauccggaaguccgacgagcuccugcacaacgugaacgucggcaagagcaccacgaacaucaugaucaccaccaucaucaucgugaucaucgugauccugcugcuccugaucgccgucgggcuguuccucuacugcaaggcccgcuccacccccgugacgcugagcaaggaccagcuguccgggaucaacaacaucgcguucagcaacugaggacuagugcaucacauuuaaaagcaucucagccuaccaugagaauaagagaaagaaaaugaagaucaauagcuuauucaucucuuuuucuuuuucguugguguaaagccaacacccugucuaaaaaacauaaauuucuuuaaucauuuugccucuuuucucugugcuucaauuaauaaaaaauggaaagaaccuagaucuaaaaaaaaaaaaaaaaaaaaaaaaaaaaaaaaaaaaaaaaaaaaaaaaaaaaaaaaaaaaaaaaugcaucccccccccccccccccccccccccccccccaaaggcucuuuucagagccaccagaauu

SEQ ID NO: 15770 - RNA, 1990 nt, Artificial Sequence
  mRNA product Design i-2 comprising derived and/or modified sequence from HRSV(Memphis-37)__AIY60640.1__F_DSCav1_mut3 (opt1)
ggggcgcugccuacggagguggcagccaucuccuucucggcaucaagcuuaccauggagcugcccauccucaagaccaacgccaucaccacgauccuggccgcggugacccugugcuucgccagcucccagaacaucaccgaggaguucuaccagagcacgugcuccgccgucagcaagggcuaccucggggcccugcgcaccggcugguacaccuccgugaucaccaucgagcugagcaacaucaaggagaucaagugcaacgggaccgacgccaaggugaagcucaucaagcaggagcuggacaaguacaagaacgcggucacggaccugcagcuccugaugcaguccaccccggccgccggcagcggguccgccaucugcagcggcaucgcggugugcaaggugcugcaccucgagggcgaggucaacaagaucaagaacgcccugcuguccaccaacaaggccguggugagccucuccaacggggucagcgugcugaccuucaaggugcuggaccucaagaacuacaucgacaagcagcugcugcccauccucaacaagcaguccugcagcauccccaacaucgagacggucaucgaguuccagcagaagaacaaccggcugcuggagaucacccgcgaguucuccgugaacgccggcgugaccacccccgucagcacguacaugcucaccaacuccgagcugcugagccucaucaacgacaugccgaucaccaacgaccagaagaagcugaugagcaacaacgugcagaucgugcggcagcaguccuacagcaucaugugcaucaucaaggaggagguccuggccuacguggugcagcucccccuguacggggucaucgacacccccugcuggaagcugcacacgagcccccucugcaccaccaacaccaaggagggcuccaacaucugccugacgcgcaccgaccgggggugguacugcgacaacgcgggcuccgugagcuucuucccgcaggccgagaccugcaaggugcaguccaaccgcgucuucugcgacaccaugaacagccugacgcuccccuccgaggugaaccugugcaacaucgacaucuucaaccccaaguacgacugcaagaucaugaccagcaagaccgacgucuccagcuccgugaucaccagccugggcgccaucguguccugcuacgggaagacgaagugcaccgccagcaacaagaaccggggcaucaucaagaccuucuccaacgggugcgacuacgucagcaacaagggcguggacaccguguccgucggcaacacgcucuacugcgugaacaagcaggaggggcagagccuguacgugaagggcgagcccaucaucaacuucuacgacccgcuggucuuccccagcgacgaguucgacgccuccaucagccaggugaacgagaagaucaaccagucccucgcguucauccgcaagagcgacgagcugcugcacaacgugaacgucgggaaguccaccaccaacaucaugaucaccaccaucaucaucgugaucaucgugauccuccugcugcucaucgccgucggccuguuccuguacugcaaggcccggagcacgcccgugacccuguccaaggaccagcucagcgggaucaacaacaucgccuucuccaacugaggacuagugcaucacauuuaaaagcaucucagccuaccaugagaauaagagaaagaaaaugaagaucaauagcuuauucaucucuuuuucuuuuucguugguguaaagccaacacccugucuaaaaaacauaaauuucuuuaaucauuuugccucuuuucucugugcuucaauuaauaaaaaauggaaagaaccuagaucuaaaaaaaaaaaaaaaaaaaaaaaaaaaaaaaaaaaaaaaaaaaaaaaaaaaaaaaaaaaaaaaaugcaucccccccccccccccccccccccccccccccaaaggcucuuuucagagccaccagaauu

SEQ ID NO: 15771 - RNA, 1990 nt, Artificial Sequence
  mRNA product Design i-2 comprising derived and/or modified sequence from HRSV(Memphis-37)__AIY60640.1__F_DSCav1_mut3 (opt2)
ggggcgcugccuacggagguggcagccaucuccuucucggcaucaagcuuaccauggagcuccccauccucaagaccaacgccaucaccaccauccucgccgccgucacccucugcuucgccuccucccagaacaucaccgaggaguucuaccaguccaccugcuccgccgucuccaagggcuaccucggcgcccuccgcaccggcugguacaccuccgucaucaccaucgagcucuccaacaucaaggagaucaagugcaacggcaccgacgccaaggucaagcucaucaagcaggagcucgacaaguacaagaacgccgucaccgaccuccagcuccucaugcaguccacccccgccgccggcuccggcuccgccaucugcuccggcaucgccgucugcaagguccuccaccucgagggcgaggucaacaagaucaagaacgcccuccucuccaccaacaaggccgucgucucccucuccaacggcgucuccguccucaccuucaagguccucgaccucaagaacuacaucgacaagcagcuccuccccauccucaacaagcaguccugcuccauccccaacaucgagaccgucaucgaguuccagcagaagaacaaccgccuccucgagaucacccgcgaguucuccgucaacgccggcgucaccacccccgucuccaccuacaugcucaccaacuccgagcuccucucccucaucaacgacaugcccaucaccaacgaccagaagaagcucauguccaacaacguccagaucguccgccagcaguccuacuccaucaugugcaucaucaaggaggagguccucgccuacgucguccagcucccccucuacggcgucaucgacacccccugcuggaagcuccacaccuccccccucugcaccaccaacaccaaggagggcuccaacaucugccucacccgcaccgaccgcggcugguacugcgacaacgccggcuccgucuccuucuucccccaggccgagaccugcaagguccaguccaaccgcgucuucugcgacaccaugaacucccucacccuccccuccgaggucaaccucugcaacaucgacaucuucaaccccaaguacgacugcaagaucaugaccuccaagaccgacgucuccuccuccgucaucaccucccucggcgccaucgucuccugcuacggcaagaccaagugcaccgccuccaacaagaaccgcggcaucaucaagaccuucuccaacggcugcgacuacgucuccaacaagggcgucgacaccgucuccgucggcaacacccucuacugcgucaacaagcaggagggccagucccucuacgucaagggcgagcccaucaucaacuucuacgacccccucgucuuccccuccgacgaguucgacgccuccaucucccaggucaacgagaagaucaaccagucccucgccuucauccgcaaguccgacgagcuccuccacaacgucaacgucggcaaguccaccaccaacaucaugaucaccaccaucaucaucgucaucaucgucauccuccuccuccucaucgccgucggccucuuccucuacugcaaggcccgcuccacccccgucacccucuccaaggaccagcucuccggcaucaacaacaucgccuucuccaacugaggacuagugcaucacauuuaaaagcaucucagccuaccaugagaauaagagaaagaaaaugaagaucaauagcuuauucaucucuuuuucuuuuucguugguguaaagccaacacccugucuaaaaaacauaaauuucuuuaaucauuuugccucuuuucucugugcuucaauuaauaaaaaauggaaagaaccuagaucuaaaaaaaaaaaaaaaaaaaaaaaaaaaaaaaaaaaaaaaaaaaaaaaaaaaaaaaaaaaaaaaaugcaucccccccccccccccccccccccccccccccaaaggcucuuuucagagccaccagaauu

SEQ ID NO: 15772 - RNA, 1990 nt, Artificial Sequence
  mRNA product Design i-2 comprising derived and/or modified sequence from HRSV(Memphis-37)__AIY60640.1__F_DSCav1_mut3 (opt3)
ggggcgcugccuacggagguggcagccaucuccuucucggcaucaagcuuaccauggagcugcccauccucaagaccaacgccauuacaacuauacuugcugcagugacgcugugcuucgccagcucccagaauaucaccgaagaguuuuaccaaucuacauguucagcggucaguaaaggcuauuugggggcuuuaagaacuggaugguacaccagcguuauuacaaucgaacuguccaacauuaaggagaucaaaugcaaugguaccgacgccaaggugaaacuaauaaagcaggaacucgauaaguauaaaaacgcaguaacugaccugcagcuucugaugcagucuacuccugccgcuggcucggggucagcaaucuguagcggaauugccgugugcaaggucuugcaccucgagggcgaggugaauaaaaucaagaacgcucugcugaguaccaauaaagccguugugucccucucuaacggugucagcguguuaacguucaagguacuggaucuuaagaauuacauugacaaacaauugcugccaauccuaaacaagcaguccuguucaauaccgaauauugaaacuguuaucgaguuucagcagaaaaacaauaggcuccuggaaauuacccgggaguucagugugaacgcgggggucacaacucccgugagcaccuauaugcuuacaaauucugagcuguugucccucaucaacgauaugccuaucaccaacgaccaaaagaaacugaugucaaauaacgugcagauuguccgccagcagagcuacaguauaaugugcaucauuaaggaagagguuuuagcauaugugguacaacugccacucuacggagugaucgauacgcccuguuggaaacuucauacuucuccucugugcacaaccaauacuaaggaaggcuccaacauauguuugacacgaaccgaccguggcugguacugcgauaaugccgggagcgucucguuuuucccacaggcugagacguguaaggugcagucuaacagaguuuucugcgacaccaugaacucccuaacacugcccucagaagugaaucucugcaauauugauaucuucaacccuaaauaugacuguaagaucaugacaaguaaaaccgaugucagcuccucugugauuacaagccugggagccaucguaucaugcuacgguaagacuaaauguaccgcaaguaauaagaacaggggcauuauaaagacauuuuccaaugggugcgacuauguuagcaacaaaggaguggacaccgucucugugggcaauacucuuuacugugucaacaagcaagagggucagucacuguaugugaaaggggagccaaucauuaacuucuacgauccguugguuuuucccagugacgaauuugaugcuagcaucucccaggugaaugagaagaucaaccagucucucgccuuuauucggaaaucggacgaacuguuacacaauguaaacgucggaaagagcacgacaaauauaaugaucaccacuauuaucauugugaucauaguuauccugcuacuccugauugcggugggccuuuucuuguauugcaaggcccgcuccaccccugucacacugucaaaagaucaacucaguggcaucaacaauauugcauucucuaacugaggacuagugcaucacauuuaaaagcaucucagccuaccaugagaauaagagaaagaaaaugaagaucaauagcuuauucaucucuuuuucuuuuucguugguguaaagccaacacccugucuaaaaaacauaaauuucuuuaaucauuuugccucuuuucucugugcuucaauuaauaaaaaauggaaagaaccuagaucuaaaaaaaaaaaaaaaaaaaaaaaaaaaaaaaaaaaaaaaaaaaaaaaaaaaaaaaaaaaaaaaaugcaucccccccccccccccccccccccccccccccaaaggcucuuuucagagccaccagaauu

SEQ ID NO: 15773 - RNA, 1990 nt, Artificial Sequence
  mRNA product Design i-2 comprising derived and/or modified sequence from HRSV(Memphis-37)__AIY60640.1__F_DSCav1_mut3 (opt4)
ggggcgcugccuacggagguggcagccaucuccuucucggcaucaagcuuaccauggagcugcccauccugaagaccaacgccaucaccaccauccuggccgccgugacccugugcuucgccagcagccagaacaucaccgaggaguucuaccagagcaccugcagcgccgugagcaagggcuaccugggcgcccugagaaccggcugguacaccagcgugaucaccaucgagcugagcaacaucaaggagaucaagugcaacggcaccgacgccaaggugaagcugaucaagcaggagcuggacaaguacaagaacgccgugaccgaccugcagcugcugaugcagagcacccccgccgccggcagcggcagcgccaucugcagcggcaucgccgugugcaaggugcugcaccuggagggcgaggugaacaagaucaagaacgcccugcugagcaccaacaaggccguggugagccugagcaacggcgugagcgugcugaccuucaaggugcuggaccugaagaacuacaucgacaagcagcugcugcccauccugaacaagcagagcugcagcauccccaacaucgagaccgugaucgaguuccagcagaagaacaacagacugcuggagaucaccagagaguucagcgugaacgccggcgugaccacccccgugagcaccuacaugcugaccaacagcgagcugcugagccugaucaacgacaugcccaucaccaacgaccagaagaagcugaugagcaacaacgugcagaucgugagacagcagagcuacagcaucaugugcaucaucaaggaggaggugcuggccuacguggugcagcugccccuguacggcgugaucgacacccccugcuggaagcugcacaccagcccccugugcaccaccaacaccaaggagggcagcaacaucugccugaccagaaccgacagaggcugguacugcgacaacgccggcagcgugagcuucuucccccaggccgagaccugcaaggugcagagcaacagaguguucugcgacaccaugaacagccugacccugcccagcgaggugaaccugugcaacaucgacaucuucaaccccaaguacgacugcaagaucaugaccagcaagaccgacgugagcagcagcgugaucaccagccugggcgccaucgugagcugcuacggcaagaccaagugcaccgccagcaacaagaacagaggcaucaucaagaccuucagcaacggcugcgacuacgugagcaacaagggcguggacaccgugagcgugggcaacacccuguacugcgugaacaagcaggagggccagagccuguacgugaagggcgagcccaucaucaacuucuacgacccccugguguuccccagcgacgaguucgacgccagcaucagccaggugaacgagaagaucaaccagagccuggccuucaucagaaagagcgacgagcugcugcacaacgugaacgugggcaagagcaccaccaacaucaugaucaccaccaucaucaucgugaucaucgugauccugcugcugcugaucgccgugggccuguuccuguacugcaaggccagaagcacccccgugacccugagcaaggaccagcugagcggcaucaacaacaucgccuucagcaacugaggacuagugcaucacauuuaaaagcaucucagccuaccaugagaauaagagaaagaaaaugaagaucaauagcuuauucaucucuuuuucuuuuucguugguguaaagccaacacccugucuaaaaaacauaaauuucuuuaaucauuuugccucuuuucucugugcuucaauuaauaaaaaauggaaagaaccuagaucuaaaaaaaaaaaaaaaaaaaaaaaaaaaaaaaaaaaaaaaaaaaaaaaaaaaaaaaaaaaaaaaaugcaucccccccccccccccccccccccccccccccaaaggcucuuuucagagccaccagaauu

SEQ ID NO: 15774 - RNA, 1990 nt, Artificial Sequence
  mRNA product Design i-2 comprising derived and/or modified sequence from HRSV(Memphis-37)__AIY60640.1__F_DSCav1_mut3 (opt5)
ggggcgcugccuacggagguggcagccaucuccuucucggcaucaagcuuaccauggagcugcccauccucaagaccaacgccauuacaacgauccuggcugccgugacccuuugcuucgcgagcucccagaauauuacagaagaguuuuaccaaucuaccuguagcgcugucuccaaaggcuaucugggggcccucagaacaggaugguacaccucuguuaucacaauugaacugagcaacaucaaggagaucaaaugcaauggcaccgacgccaaggugaaacuuauuaagcaggaacuggauaaguauaaaaacgcugugacggaccuccagcugcugaugcaguccaccccugccgcugggucuggaagcgccaucuguuccggcauugcggucugcaaggugcuccaccuggagggggagguuaauaaaaucaagaacgcccuucugagcacaaauaaagcuguggucucucucuccaacggagugagcguucugaccuucaaggugcuugaucugaagaauuacauugacaaacaacuccugccgauccugaacaagcagucuuguuccauucccaauaucgaaacagucaucgaguuucagcagaaaaacaaucggcuccuggaaauuacccgcgaguucagcgugaacgccggcgugacgacaccugucucuaccuauaugcuuacaaauuccgagcugcucagccugaucaacgauaugcccauuaccaacgaccaaaagaaacuuauguccaauaacguucagaucgugagacagcagucuuacagcauuaugugcaucaucaaggaagaggugcuggcuuaugucgugcaacucccucuguacggcguuauugauacccccuguuggaaacugcauacauccccucucugcacgaccaauacaaaggaagggagcaacaucugucugacccggacagaccgcggaugguacugcgauaaugccggcucuguguccuuuuucccgcaggcggagaccuguaagguccagagcaacagaguguuuugcgacacgaugaacucucuuacacugcccagcgaaguuaaucucugcaauauugauaucuucaacccuaaauaugacuguaagauuaugaccuccaaaaccgaugugucuagcuccgucaucacaagccugggggccaucgugucuugcuacggaaagaccaaauguacagcuuccaauaagaaccggggcauuaucaagacguuuagcaaugggugcgacuaugucucuaacaaaggaguggacaccguuuccgugggcaauacacuuuacugugucaacaagcaagagggccagagccuguaugugaaaggggagcccauuaucaacuucuacgauccucucguuuuucccuccgacgaguucgaugccucuauuagccaggugaaugaaaagaucaaccagucccuggcuuuuauucgcaaaucugacgaacugcuccacaaugucaacgugggaaagagcaccacaaauaucaugaucaccacgauuaucauugugaucauuguuauccugcuucugcucaucgccgucggccuguuccuguauugcaaggccagauccaccccggugacacuuagcaaagaucaacucucugggauuaacaauaucgcuuucuccaacugaggacuagugcaucacauuuaaaagcaucucagccuaccaugagaauaagagaaagaaaaugaagaucaauagcuuauucaucucuuuuucuuuuucguugguguaaagccaacacccugucuaaaaaacauaaauuucuuuaaucauuuugccucuuuucucugugcuucaauuaauaaaaaauggaaagaaccuagaucuaaaaaaaaaaaaaaaaaaaaaaaaaaaaaaaaaaaaaaaaaaaaaaaaaaaaaaaaaaaaaaaaugcaucccccccccccccccccccccccccccccccaaaggcucuuuucagagccaccagaauu

SEQ ID NO: 15775 - RNA, 1990 nt, Artificial Sequence
  mRNA product Design i-2 comprising derived and/or modified sequence from HRSV(Memphis-37)__AIY60640.1__F_DSCav1_mut3 (opt6)
ggggcgcugccuacggagguggcagccaucuccuucucggcaucaagcuuaccauggaauuaccaauacuaaaaacaaaugccaucaccaccauccuggccgccguaacauuaugcuucgcaaguucacaaaauauaacagaagaauuuuaucaaucaacuugcagcgccguaucaaaaggcuacuuaggcgcacuacguacaggaugguacacaucaguaauaaccauagaacuauccaauauuaaagaaauaaaaugcaauggaacagacgcaaaaguuaaacuaauaaaacaagaauuagacaaauacaaaaacgcaguaaccgaccuucaauuacuaaugcaaucuacccccgcugcagguuccggaucagcaauauguucaggaauugcaguaugcaaaguccuacacuuagaaggagaaguaaacaaaauaaaaaacgcacuauuaagcaccaauaaagcagucguaucauuauccaacggcguuucaguacuaacauuuaaaguacuugaccuaaaaaacuauauagacaaacaacuacuucccauccuuaacaaacaaagcugcucaauaccuaauaucgaaacaguaauagaauuucaacaaaaaaacaaucgauuauuagaaaucacacgagaauuuucugucaacgcaggagucaccacacccguaucuacuuauauguuaaccaacucugaauuauuaucacuaaucaaugacaugccaauaacaaacgaucaaaaaaaauuaaugucaaauaacguacaaauaguaagacaacaaucauacucaauaaugugcauuauaaaagaagaaguacuagccuauguuguacaacucccacucuacggcguaauagacacaccaugcuggaaauuacacacuucaccacuaugcacaacaaacacaaaagaaggaucaaacaucugccuaaccagaaccgauagaggaugguauugcgacaaugccggaucaguuucauucuucccacaagcagaaacaugcaaaguacaauccaacagaguuuucugugacacaaugaacucgcuaacauuacccagcgaaguaaaccucugcaacauagacauauucaacccaaaauacgauugcaaaauaaugacuucuaaaacagauguuuccucaagcgucauaacgaguuuaggagcaauaguaagcuguuacggaaaaaccaaauguaccgcaucaaacaaaaaccgaggaauaauaaaaaccuuuucaaacggaugcgauuacgucuccaacaaaggagucgacacaguaucaguuggcaauacucuuuacugcguaaauaaacaagaaggacaaucacuauacguaaaaggcgaaccaauaauaaacuucuacgacccccucgucuucccuucagaugaauuugacgcaagcaucucacaaguuaaugaaaaaauaaaucaauccuuagcauucauacgaaaaucagacgaacuauuacacaacguaaacguaggaaaaucaacgacaaacauaaugauaacaacuaucauuauagucauaauagucauacuacuacuauuaauagccguaggcuuauuccuauacugcaaagcaagaucuacuccaguaacacucucaaaagaccaauuaucuggaauaaauaacauagcauucucuaauuaaggacuagugcaucacauuuaaaagcaucucagccuaccaugagaauaagagaaagaaaaugaagaucaauagcuuauucaucucuuuuucuuuuucguugguguaaagccaacacccugucuaaaaaacauaaauuucuuuaaucauuuugccucuuuucucugugcuucaauuaauaaaaaauggaaagaaccuagaucuaaaaaaaaaaaaaaaaaaaaaaaaaaaaaaaaaaaaaaaaaaaaaaaaaaaaaaaaaaaaaaaaugcaucccccccccccccccccccccccccccccccaaaggcucuuuucagagccaccagaauu

SEQ ID NO: 15776 - RNA, 1990 nt, Artificial Sequence
  mRNA product Design i-2 comprising derived and/or modified sequence from HRSV(Memphis-37)__AIY60640.1__F_DSCav1_mut3 (opt11)
ggggcgcugccuacggagguggcagccaucuccuucucggcaucaagcuuaccauggaacuccccauccucaaaaccaacgccauuaccacgauccucgccgcagucacccucugcuucgccuccucacaaaacaucacagaagaauuuuaccaaaguaccugcuccgccgucagcaaaggauaccucggcgcccuccgcaccggcugguacacauccgucauaaccaucgaacucagcaacaucaaagaaaucaaauguaacggaaccgacgccaaaguaaaacuaauaaaacaagaacucgacaaauacaagaacgccgucaccgaccuccaacuccucaugcaaucuacccccgccgccggcucagguagcgccaucugcagcgguauugccgucugcaaaguacuccaccuagaaggagaagucaauaaaaucaaaaacgcccuacucuccaccaacaaggcagucgucagccucuccaacggcgucucagucuuaaccuucaaagugcucgaccucaaaaauuacauagacaaacaacuacuccccauucucaacaaacaauccugcuccauacccaacauagaaaccgucauugaauuucaacagaaaaacaaccgccuccucgaaaucacgcgcgaguucagugucaacgccggcgucaccaccccagucucgacauacaugcucacaaacucagaacuccucucguuaaucaacgacaugccaauaaccaacgaccaaaagaaacuaauguccaacaacguucaaauaguucgccaacaaucauacuccauaaugugcaucaucaaagaagaaguccucgccuacguuguacaauuaccccucuacggcgucaucgacacaccaugcuggaaacuccacacaucgccccucugcaccaccaacaccaaagaaggcagcaacauuugccucacccggacagaccgcggcugguacugcgacaaugcaggcagcgucucauucuucccacaagccgaaaccugcaaaguccaaagcaaccgugucuucugcgacacaaugaacucccuuacccucccaagcgaaguaaaccucugcaauauugacaucuucaaccccaaauacgacugcaaaaucaugaccuccaaaaccgacgucuccucaucagucaucaccucccuuggcgccauugucuccuguuacgguaaaaccaaaugcaccgccuccaacaaaaaccgcggcaucaucaaaaccuucucuaacggcugcgacuacgucucaaacaaaggcgucgacacugucuccgucggcaacacccuauacugcgucaacaagcaagaaggacagucccuauacguaaaaggugaaccaauuaucaacuucuacgacccccuagucuucccauccgacgaguucgaugccuccaucucccaaguaaaugaaaagaucaaucaaagccuggccuucauccgcaaauccgacgaacuacuccacaaugucaacgucggaaaaucaacaacaaacaucaugaucaccaccaucaucaucgucaucauaguaauccuccuacugcucaucgccgucggucucuuccuauacugcaaagcccguucuacuccagucacccucuccaaagaccaacuaucaggaaucaacaacaucgccuucagcaacuaaggacuagugcaucacauuuaaaagcaucucagccuaccaugagaauaagagaaagaaaaugaagaucaauagcuuauucaucucuuuuucuuuuucguugguguaaagccaacacccugucuaaaaaacauaaauuucuuuaaucauuuugccucuuuucucugugcuucaauuaauaaaaaauggaaagaaccuagaucuaaaaaaaaaaaaaaaaaaaaaaaaaaaaaaaaaaaaaaaaaaaaaaaaaaaaaaaaaaaaaaaaugcaucccccccccccccccccccccccccccccccaaaggcucuuuucagagccaccagaauu

SEQ ID NO: 15777 - RNA, 1825 nt, Artificial Sequence
  mRNA product Design i-3 comprising derived and/or modified sequence from HRSV(Memphis-37)__AIY60640.1__F_DSCav1_mut3 (opt1)
gggagaaagcuuaccauggagcugcccauccucaagaccaacgccaucaccacgauccuggccgcggugacccugugcuucgccagcucccagaacaucaccgaggaguucuaccagagcacgugcuccgccgucagcaagggcuaccucggcgcccugcgcaccgggugguacaccagcgugaucaccaucgagcuguccaacaucaaggagaucaagugcaacggcaccgacgccaaggugaagcucaucaagcaggagcuggacaaguacaagaacgcggucacggaccugcagcuccugaugcagagcaccccggccgccggcuccgggagcgcgaucugcuccggcaucgccgucugcaaggugcugcaccucgagggcgaggugaacaagaucaagaacgcccugcuguccaccaacaaggccgucgugagccucuccaacggggugagcguccugaccuucaaggugcuggaccucaagaacuacaucgacaagcagcugcugcccauccugaacaagcagagcugcuccauccccaacaucgagaccgucaucgaguuccagcagaagaacaaccgccuccuggagaucacgcgggaguucagcgugaacgcgggcgugaccacccccgucuccaccuacaugcugacgaacagcgagcuccugucccugaucaacgacaugccgaucaccaacgaccagaagaagcucaugagcaacaacgugcagaucgugcgccagcaguccuacagcaucaugugcaucaucaaggaggagguccuggccuacguggugcagcugccccucuacggggucaucgacacccccugcuggaagcugcacaccagcccccugugcacgaccaacaccaaggagggcuccaacaucugccucacccggacggaccgcgggugguacugcgacaacgccggcagcguguccuucuucccgcaggccgagaccugcaagguccagagcaaccggguguucugcgacaccaugaacucccugacccugcccagcgaggugaaccucugcaacaucgacaucuucaaccccaaguacgacugcaagaucaugacguccaagaccgacgucagcuccagcgugaucaccucccugggcgccaucgugagcugcuacgggaagaccaagugcacggcgagcaacaagaaccgcggcaucaucaagaccuucuccaacgggugcgacuacgucagcaacaagggcguggacaccguguccgucggcaacacccuguacugcgugaacaagcaggagggccagagccucuacgugaagggggagcccaucaucaacuucuacgacccgcuggucuuccccuccgacgaguucgacgccagcaucucccaggugaacgagaagaucaaccagagccuggccuucauccggaaguccgacgagcuccugcacaacgugaacgucggcaagagcaccacgaacaucaugaucaccaccaucaucaucgugaucaucgugauccugcugcuccugaucgccgucgggcuguuccucuacugcaaggcccgcuccacccccgugacgcugagcaaggaccagcuguccgggaucaacaacaucgcguucagcaacugaggacuaguuauaagacugacuagcccgaugggccucccaacgggcccuccuccccuccuugcaccgagauuaauaaaaaaaaaaaaaaaaaaaaaaaaaaaaaaaaaaaaaaaaaaaaaaaaaaaaaaaaaaaaaaaaugcaucccccccccccccccccccccccccccccccaaaggcucuuuucagagccaccagaauu

SEQ ID NO: 15778 - RNA, 1825 nt, Artificial Sequence
  mRNA product Design i-3 comprising derived and/or modified sequence from HRSV(Memphis-37)__AIY60640.1__F_DSCav1_mut3 (opt1)
gggagaaagcuuaccauggagcugcccauccucaagaccaacgccaucaccacgauccuggccgcggugacccugugcuucgccagcucccagaacaucaccgaggaguucuaccagagcacgugcuccgccgucagcaagggcuaccucggggcccugcgcaccggcugguacaccuccgugaucaccaucgagcugagcaacaucaaggagaucaagugcaacgggaccgacgccaaggugaagcucaucaagcaggagcuggacaaguacaagaacgcggucacggaccugcagcuccugaugcaguccaccccggccgccggcagcggguccgccaucugcagcggcaucgcggugugcaaggugcugcaccucgagggcgaggucaacaagaucaagaacgcccugcuguccaccaacaaggccguggugagccucuccaacggggucagcgugcugaccuucaaggugcuggaccucaagaacuacaucgacaagcagcugcugcccauccucaacaagcaguccugcagcauccccaacaucgagacggucaucgaguuccagcagaagaacaaccggcugcuggagaucacccgcgaguucuccgugaacgccggcgugaccacccccgucagcacguacaugcucaccaacuccgagcugcugagccucaucaacgacaugccgaucaccaacgaccagaagaagcugaugagcaacaacgugcagaucgugcggcagcaguccuacagcaucaugugcaucaucaaggaggagguccuggccuacguggugcagcucccccuguacggggucaucgacacccccugcuggaagcugcacacgagcccccucugcaccaccaacaccaaggagggcuccaacaucugccugacgcgcaccgaccgggggugguacugcgacaacgcgggcuccgugagcuucuucccgcaggccgagaccugcaaggugcaguccaaccgcgucuucugcgacaccaugaacagccugacgcuccccuccgaggugaaccugugcaacaucgacaucuucaaccccaaguacgacugcaagaucaugaccagcaagaccgacgucuccagcuccgugaucaccagccugggcgccaucguguccugcuacgggaagacgaagugcaccgccagcaacaagaaccggggcaucaucaagaccuucuccaacgggugcgacuacgucagcaacaagggcguggacaccguguccgucggcaacacgcucuacugcgugaacaagcaggaggggcagagccuguacgugaagggcgagcccaucaucaacuucuacgacccgcuggucuuccccagcgacgaguucgacgccuccaucagccaggugaacgagaagaucaaccagucccucgcguucauccgcaagagcgacgagcugcugcacaacgugaacgucgggaaguccaccaccaacaucaugaucaccaccaucaucaucgugaucaucgugauccuccugcugcucaucgccgucggccuguuccuguacugcaaggcccggagcacgcccgugacccuguccaaggaccagcucagcgggaucaacaacaucgccuucuccaacugaggacuaguuauaagacugacuagcccgaugggccucccaacgggcccuccuccccuccuugcaccgagauuaauaaaaaaaaaaaaaaaaaaaaaaaaaaaaaaaaaaaaaaaaaaaaaaaaaaaaaaaaaaaaaaaaugcaucccccccccccccccccccccccccccccccaaaggcucuuuucagagccaccagaauu

SEQ ID NO: 15779 - RNA, 1825 nt, Artificial Sequence
  mRNA product Design i-3 comprising derived and/or modified sequence from HRSV(Memphis-37)__AIY60640.1__F_DSCav1_mut3 (opt2)
gggagaaagcuuaccauggagcuccccauccucaagaccaacgccaucaccaccauccucgccgccgucacccucugcuucgccuccucccagaacaucaccgaggaguucuaccaguccaccugcuccgccgucuccaagggcuaccucggcgcccuccgcaccggcugguacaccuccgucaucaccaucgagcucuccaacaucaaggagaucaagugcaacggcaccgacgccaaggucaagcucaucaagcaggagcucgacaaguacaagaacgccgucaccgaccuccagcuccucaugcaguccacccccgccgccggcuccggcuccgccaucugcuccggcaucgccgucugcaagguccuccaccucgagggcgaggucaacaagaucaagaacgcccuccucuccaccaacaaggccgucgucucccucuccaacggcgucuccguccucaccuucaagguccucgaccucaagaacuacaucgacaagcagcuccuccccauccucaacaagcaguccugcuccauccccaacaucgagaccgucaucgaguuccagcagaagaacaaccgccuccucgagaucacccgcgaguucuccgucaacgccggcgucaccacccccgucuccaccuacaugcucaccaacuccgagcuccucucccucaucaacgacaugcccaucaccaacgaccagaagaagcucauguccaacaacguccagaucguccgccagcaguccuacuccaucaugugcaucaucaaggaggagguccucgccuacgucguccagcucccccucuacggcgucaucgacacccccugcuggaagcuccacaccuccccccucugcaccaccaacaccaaggagggcuccaacaucugccucacccgcaccgaccgcggcugguacugcgacaacgccggcuccgucuccuucuucccccaggccgagaccugcaagguccaguccaaccgcgucuucugcgacaccaugaacucccucacccuccccuccgaggucaaccucugcaacaucgacaucuucaaccccaaguacgacugcaagaucaugaccuccaagaccgacgucuccuccuccgucaucaccucccucggcgccaucgucuccugcuacggcaagaccaagugcaccgccuccaacaagaaccgcggcaucaucaagaccuucuccaacggcugcgacuacgucuccaacaagggcgucgacaccgucuccgucggcaacacccucuacugcgucaacaagcaggagggccagucccucuacgucaagggcgagcccaucaucaacuucuacgacccccucgucuuccccuccgacgaguucgacgccuccaucucccaggucaacgagaagaucaaccagucccucgccuucauccgcaaguccgacgagcuccuccacaacgucaacgucggcaaguccaccaccaacaucaugaucaccaccaucaucaucgucaucaucgucauccuccuccuccucaucgccgucggccucuuccucuacugcaaggcccgcuccacccccgucacccucuccaaggaccagcucuccggcaucaacaacaucgccuucuccaacugaggacuaguuauaagacugacuagcccgaugggccucccaacgggcccuccuccccuccuugcaccgagauuaauaaaaaaaaaaaaaaaaaaaaaaaaaaaaaaaaaaaaaaaaaaaaaaaaaaaaaaaaaaaaaaaaugcaucccccccccccccccccccccccccccccccaaaggcucuuuucagagccaccagaauu

SEQ ID NO: 15780 - RNA, 1825 nt, Artificial Sequence
  mRNA product Design i-3 comprising derived and/or modified sequence from HRSV(Memphis-37)__AIY60640.1__F_DSCav1_mut3 (opt3)
gggagaaagcuuaccauggagcugcccauccucaagaccaacgccauuacaacuauacuugcugcagugacgcugugcuucgccagcucccagaauaucaccgaagaguuuuaccaaucuacauguucagcggucaguaaaggcuauuugggggcuuuaagaacuggaugguacaccagcguuauuacaaucgaacuguccaacauuaaggagaucaaaugcaaugguaccgacgccaaggugaaacuaauaaagcaggaacucgauaaguauaaaaacgcaguaacugaccugcagcuucugaugcagucuacuccugccgcuggcucggggucagcaaucuguagcggaauugccgugugcaaggucuugcaccucgagggcgaggugaauaaaaucaagaacgcucugcugaguaccaauaaagccguugugucccucucuaacggugucagcguguuaacguucaagguacuggaucuuaagaauuacauugacaaacaauugcugccaauccuaaacaagcaguccuguucaauaccgaauauugaaacuguuaucgaguuucagcagaaaaacaauaggcuccuggaaauuacccgggaguucagugugaacgcgggggucacaacucccgugagcaccuauaugcuuacaaauucugagcuguugucccucaucaacgauaugccuaucaccaacgaccaaaagaaacugaugucaaauaacgugcagauuguccgccagcagagcuacaguauaaugugcaucauuaaggaagagguuuuagcauaugugguacaacugccacucuacggagugaucgauacgcccuguuggaaacuucauacuucuccucugugcacaaccaauacuaaggaaggcuccaacauauguuugacacgaaccgaccguggcugguacugcgauaaugccgggagcgucucguuuuucccacaggcugagacguguaaggugcagucuaacagaguuuucugcgacaccaugaacucccuaacacugcccucagaagugaaucucugcaauauugauaucuucaacccuaaauaugacuguaagaucaugacaaguaaaaccgaugucagcuccucugugauuacaagccugggagccaucguaucaugcuacgguaagacuaaauguaccgcaaguaauaagaacaggggcauuauaaagacauuuuccaaugggugcgacuauguuagcaacaaaggaguggacaccgucucugugggcaauacucuuuacugugucaacaagcaagagggucagucacuguaugugaaaggggagccaaucauuaacuucuacgauccguugguuuuucccagugacgaauuugaugcuagcaucucccaggugaaugagaagaucaaccagucucucgccuuuauucggaaaucggacgaacuguuacacaauguaaacgucggaaagagcacgacaaauauaaugaucaccacuauuaucauugugaucauaguuauccugcuacuccugauugcggugggccuuuucuuguauugcaaggcccgcuccaccccugucacacugucaaaagaucaacucaguggcaucaacaauauugcauucucuaacugaggacuaguuauaagacugacuagcccgaugggccucccaacgggcccuccuccccuccuugcaccgagauuaauaaaaaaaaaaaaaaaaaaaaaaaaaaaaaaaaaaaaaaaaaaaaaaaaaaaaaaaaaaaaaaaaugcaucccccccccccccccccccccccccccccccaaaggcucuuuucagagccaccagaauu

SEQ ID NO: 15781 - RNA, 1825 nt, Artificial Sequence
  mRNA product Design i-3 comprising derived and/or modified sequence from HRSV(Memphis-37)__AIY60640.1__F_DSCav1_mut3 (opt4)
gggagaaagcuuaccauggagcugcccauccugaagaccaacgccaucaccaccauccuggccgccgugacccugugcuucgccagcagccagaacaucaccgaggaguucuaccagagcaccugcagcgccgugagcaagggcuaccugggcgcccugagaaccggcugguacaccagcgugaucaccaucgagcugagcaacaucaaggagaucaagugcaacggcaccgacgccaaggugaagcugaucaagcaggagcuggacaaguacaagaacgccgugaccgaccugcagcugcugaugcagagcacccccgccgccggcagcggcagcgccaucugcagcggcaucgccgugugcaaggugcugcaccuggagggcgaggugaacaagaucaagaacgcccugcugagcaccaacaaggccguggugagccugagcaacggcgugagcgugcugaccuucaaggugcuggaccugaagaacuacaucgacaagcagcugcugcccauccugaacaagcagagcugcagcauccccaacaucgagaccgugaucgaguuccagcagaagaacaacagacugcuggagaucaccagagaguucagcgugaacgccggcgugaccacccccgugagcaccuacaugcugaccaacagcgagcugcugagccugaucaacgacaugcccaucaccaacgaccagaagaagcugaugagcaacaacgugcagaucgugagacagcagagcuacagcaucaugugcaucaucaaggaggaggugcuggccuacguggugcagcugccccuguacggcgugaucgacacccccugcuggaagcugcacaccagcccccugugcaccaccaacaccaaggagggcagcaacaucugccugaccagaaccgacagaggcugguacugcgacaacgccggcagcgugagcuucuucccccaggccgagaccugcaaggugcagagcaacagaguguucugcgacaccaugaacagccugacccugcccagcgaggugaaccugugcaacaucgacaucuucaaccccaaguacgacugcaagaucaugaccagcaagaccgacgugagcagcagcgugaucaccagccugggcgccaucgugagcugcuacggcaagaccaagugcaccgccagcaacaagaacagaggcaucaucaagaccuucagcaacggcugcgacuacgugagcaacaagggcguggacaccgugagcgugggcaacacccuguacugcgugaacaagcaggagggccagagccuguacgugaagggcgagcccaucaucaacuucuacgacccccugguguuccccagcgacgaguucgacgccagcaucagccaggugaacgagaagaucaaccagagccuggccuucaucagaaagagcgacgagcugcugcacaacgugaacgugggcaagagcaccaccaacaucaugaucaccaccaucaucaucgugaucaucgugauccugcugcugcugaucgccgugggccuguuccuguacugcaaggccagaagcacccccgugacccugagcaaggaccagcugagcggcaucaacaacaucgccuucagcaacugaggacuaguuauaagacugacuagcccgaugggccucccaacgggcccuccuccccuccuugcaccgagauuaauaaaaaaaaaaaaaaaaaaaaaaaaaaaaaaaaaaaaaaaaaaaaaaaaaaaaaaaaaaaaaaaaugcaucccccccccccccccccccccccccccccccaaaggcucuuuucagagccaccagaauu

SEQ ID NO: 15782 - RNA, 1825 nt, Artificial Sequence
  mRNA product Design i-3 comprising derived and/or modified sequence from HRSV(Memphis-37)__AIY60640.1__F_DSCav1_mut3 (opt5)
gggagaaagcuuaccauggagcugcccauccucaagaccaacgccauuacaacgauccuggcugccgugacccuuugcuucgcgagcucccagaauauuacagaagaguuuuaccaaucuaccuguagcgcugucuccaaaggcuaucugggggcccucagaacaggaugguacaccucuguuaucacaauugaacugagcaacaucaaggagaucaaaugcaauggcaccgacgccaaggugaaacuuauuaagcaggaacuggauaaguauaaaaacgcugugacggaccuccagcugcugaugcaguccaccccugccgcugggucuggaagcgccaucuguuccggcauugcggucugcaaggugcuccaccuggagggggagguuaauaaaaucaagaacgcccuucugagcacaaauaaagcuguggucucucucuccaacggagugagcguucugaccuucaaggugcuugaucugaagaauuacauugacaaacaacuccugccgauccugaacaagcagucuuguuccauucccaauaucgaaacagucaucgaguuucagcagaaaaacaaucggcuccuggaaauuacccgcgaguucagcgugaacgccggcgugacgacaccugucucuaccuauaugcuuacaaauuccgagcugcucagccugaucaacgauaugcccauuaccaacgaccaaaagaaacuuauguccaauaacguucagaucgugagacagcagucuuacagcauuaugugcaucaucaaggaagaggugcuggcuuaugucgugcaacucccucuguacggcguuauugauacccccuguuggaaacugcauacauccccucucugcacgaccaauacaaaggaagggagcaacaucugucugacccggacagaccgcggaugguacugcgauaaugccggcucuguguccuuuuucccgcaggcggagaccuguaagguccagagcaacagaguguuuugcgacacgaugaacucucuuacacugcccagcgaaguuaaucucugcaauauugauaucuucaacccuaaauaugacuguaagauuaugaccuccaaaaccgaugugucuagcuccgucaucacaagccugggggccaucgugucuugcuacggaaagaccaaauguacagcuuccaauaagaaccggggcauuaucaagacguuuagcaaugggugcgacuaugucucuaacaaaggaguggacaccguuuccgugggcaauacacuuuacugugucaacaagcaagagggccagagccuguaugugaaaggggagcccauuaucaacuucuacgauccucucguuuuucccuccgacgaguucgaugccucuauuagccaggugaaugaaaagaucaaccagucccuggcuuuuauucgcaaaucugacgaacugcuccacaaugucaacgugggaaagagcaccacaaauaucaugaucaccacgauuaucauugugaucauuguuauccugcuucugcucaucgccgucggccuguuccuguauugcaaggccagauccaccccggugacacuuagcaaagaucaacucucugggauuaacaauaucgcuuucuccaacugaggacuaguuauaagacugacuagcccgaugggccucccaacgggcccuccuccccuccuugcaccgagauuaauaaaaaaaaaaaaaaaaaaaaaaaaaaaaaaaaaaaaaaaaaaaaaaaaaaaaaaaaaaaaaaaaugcaucccccccccccccccccccccccccccccccaaaggcucuuuucagagccaccagaauu

SEQ ID NO: 15783 - RNA, 1825 nt, Artificial Sequence
  mRNA product Design i-3 comprising derived and/or modified sequence from HRSV(Memphis-37)__AIY60640.1__F_DSCav1_mut3 (opt6)
gggagaaagcuuaccauggaauuaccaauacuaaaaacaaaugccaucaccaccauccuggccgccguaacauuaugcuucgcaaguucacaaaauauaacagaagaauuuuaucaaucaacuugcagcgccguaucaaaaggcuacuuaggcgcacuacguacaggaugguacacaucaguaauaaccauagaacuauccaauauuaaagaaauaaaaugcaauggaacagacgcaaaaguuaaacuaauaaaacaagaauuagacaaauacaaaaacgcaguaaccgaccuucaauuacuaaugcaaucuacccccgcugcagguuccggaucagcaauauguucaggaauugcaguaugcaaaguccuacacuuagaaggagaaguaaacaaaauaaaaaacgcacuauuaagcaccaauaaagcagucguaucauuauccaacggcguuucaguacuaacauuuaaaguacuugaccuaaaaaacuauauagacaaacaacuacuucccauccuuaacaaacaaagcugcucaauaccuaauaucgaaacaguaauagaauuucaacaaaaaaacaaucgauuauuagaaaucacacgagaauuuucugucaacgcaggagucaccacacccguaucuacuuauauguuaaccaacucugaauuauuaucacuaaucaaugacaugccaauaacaaacgaucaaaaaaaauuaaugucaaauaacguacaaauaguaagacaacaaucauacucaauaaugugcauuauaaaagaagaaguacuagccuauguuguacaacucccacucuacggcguaauagacacaccaugcuggaaauuacacacuucaccacuaugcacaacaaacacaaaagaaggaucaaacaucugccuaaccagaaccgauagaggaugguauugcgacaaugccggaucaguuucauucuucccacaagcagaaacaugcaaaguacaauccaacagaguuuucugugacacaaugaacucgcuaacauuacccagcgaaguaaaccucugcaacauagacauauucaacccaaaauacgauugcaaaauaaugacuucuaaaacagauguuuccucaagcgucauaacgaguuuaggagcaauaguaagcuguuacggaaaaaccaaauguaccgcaucaaacaaaaaccgaggaauaauaaaaaccuuuucaaacggaugcgauuacgucuccaacaaaggagucgacacaguaucaguuggcaauacucuuuacugcguaaauaaacaagaaggacaaucacuauacguaaaaggcgaaccaauaauaaacuucuacgacccccucgucuucccuucagaugaauuugacgcaagcaucucacaaguuaaugaaaaaauaaaucaauccuuagcauucauacgaaaaucagacgaacuauuacacaacguaaacguaggaaaaucaacgacaaacauaaugauaacaacuaucauuauagucauaauagucauacuacuacuauuaauagccguaggcuuauuccuauacugcaaagcaagaucuacuccaguaacacucucaaaagaccaauuaucuggaauaaauaacauagcauucucuaauuaaggacuaguuauaagacugacuagcccgaugggccucccaacgggcccuccuccccuccuugcaccgagauuaauaaaaaaaaaaaaaaaaaaaaaaaaaaaaaaaaaaaaaaaaaaaaaaaaaaaaaaaaaaaaaaaaugcaucccccccccccccccccccccccccccccccaaaggcucuuuucagagccaccagaauu

SEQ ID NO: 15784 - RNA, 1825 nt, Artificial Sequence
  mRNA product Design i-3 comprising derived and/or modified sequence from HRSV(Memphis-37)__AIY60640.1__F_DSCav1_mut3 (opt11)
gggagaaagcuuaccauggaacuccccauccucaaaaccaacgccauuaccacgauccucgccgcagucacccucugcuucgccuccucacaaaacaucacagaagaauuuuaccaaaguaccugcuccgccgucagcaaaggauaccucggcgcccuccgcaccggcugguacacauccgucauaaccaucgaacucagcaacaucaaagaaaucaaauguaacggaaccgacgccaaaguaaaacuaauaaaacaagaacucgacaaauacaagaacgccgucaccgaccuccaacuccucaugcaaucuacccccgccgccggcucagguagcgccaucugcagcgguauugccgucugcaaaguacuccaccuagaaggagaagucaauaaaaucaaaaacgcccuacucuccaccaacaaggcagucgucagccucuccaacggcgucucagucuuaaccuucaaagugcucgaccucaaaaauuacauagacaaacaacuacuccccauucucaacaaacaauccugcuccauacccaacauagaaaccgucauugaauuucaacagaaaaacaaccgccuccucgaaaucacgcgcgaguucagugucaacgccggcgucaccaccccagucucgacauacaugcucacaaacucagaacuccucucguuaaucaacgacaugccaauaaccaacgaccaaaagaaacuaauguccaacaacguucaaauaguucgccaacaaucauacuccauaaugugcaucaucaaagaagaaguccucgccuacguuguacaauuaccccucuacggcgucaucgacacaccaugcuggaaacuccacacaucgccccucugcaccaccaacaccaaagaaggcagcaacauuugccucacccggacagaccgcggcugguacugcgacaaugcaggcagcgucucauucuucccacaagccgaaaccugcaaaguccaaagcaaccgugucuucugcgacacaaugaacucccuuacccucccaagcgaaguaaaccucugcaauauugacaucuucaaccccaaauacgacugcaaaaucaugaccuccaaaaccgacgucuccucaucagucaucaccucccuuggcgccauugucuccuguuacgguaaaaccaaaugcaccgccuccaacaaaaaccgcggcaucaucaaaaccuucucuaacggcugcgacuacgucucaaacaaaggcgucgacacugucuccgucggcaacacccuauacugcgucaacaagcaagaaggacagucccuauacguaaaaggugaaccaauuaucaacuucuacgacccccuagucuucccauccgacgaguucgaugccuccaucucccaaguaaaugaaaagaucaaucaaagccuggccuucauccgcaaauccgacgaacuacuccacaaugucaacgucggaaaaucaacaacaaacaucaugaucaccaccaucaucaucgucaucauaguaauccuccuacugcucaucgccgucggucucuuccuauacugcaaagcccguucuacuccagucacccucuccaaagaccaacuaucaggaaucaacaacaucgccuucagcaacuaaggacuaguuauaagacugacuagcccgaugggccucccaacgggcccuccuccccuccuugcaccgagauuaauaaaaaaaaaaaaaaaaaaaaaaaaaaaaaaaaaaaaaaaaaaaaaaaaaaaaaaaaaaaaaaaaugcaucccccccccccccccccccccccccccccccaaaggcucuuuucagagccaccagaauu

SEQ ID NO: 15785 - protein, 514 aa, Artificial Sequence
  derived and/or modified protein sequence (artificial) from HRSV(Memphis-37)__AIY60640.1__F-del_DSCav1_mut3
MELPILKTNAITTILAAVTLCFASSQNITEEFYQSTCSAVSKGYLGALRTGWYTSVITIELSNIKEIKCNGTDAKVKLIKQELDKYKNAVTDLQLLMQSTPAAGSGSAICSGIAVCKVLHLEGEVNKIKNALLSTNKAVVSLSNGVSVLTFKVLDLKNYIDKQLLPILNKQSCSIPNIETVIEFQQKNNRLLEITREFSVNAGVTTPVSTYMLTNSELLSLINDMPITNDQKKLMSNNVQIVRQQSYSIMCIIKEEVLAYVVQLPLYGVIDTPCWKLHTSPLCTTNTKEGSNICLTRTDRGWYCDNAGSVSFFPQAETCKVQSNRVFCDTMNSLTLPSEVNLCNIDIFNPKYDCKIMTSKTDVSSSVITSLGAIVSCYGKTKCTASNKNRGIIKTFSNGCDYVSNKGVDTVSVGNTLYCVNKQEGQSLYVKGEPIINFYDPLVFPSDEFDASISQVNEKINQSLAFIRKSDELLHNVNVGKSTTNIMITTIIIVIIVILLLLIAVGLFLYCKAR

SEQ ID NO: 15786 - RNA, 1545 nt, Artificial Sequence
  derived and/or modified CDS sequence (opt1) from HRSV(Memphis-37)__AIY60640.1__F-del_DSCav1_mut3
auggagcugcccauccucaagaccaacgccaucaccacgauccuggccgcggugacccugugcuucgccagcucccagaacaucaccgaggaguucuaccagagcacgugcuccgccgucagcaagggcuaccucggcgcccugcgcaccgggugguacaccagcgugaucaccaucgagcuguccaacaucaaggagaucaagugcaacggcaccgacgccaaggugaagcucaucaagcaggagcuggacaaguacaagaacgcggucacggaccugcagcuccugaugcagagcaccccggccgccggcuccgggagcgcgaucugcuccggcaucgccgucugcaaggugcugcaccucgagggcgaggugaacaagaucaagaacgcccugcuguccaccaacaaggccgucgugagccucuccaacggggugagcguccugaccuucaaggugcuggaccucaagaacuacaucgacaagcagcugcugcccauccugaacaagcagagcugcuccauccccaacaucgagaccgucaucgaguuccagcagaagaacaaccgccuccuggagaucacgcgggaguucagcgugaacgcgggcgugaccacccccgucuccaccuacaugcugacgaacagcgagcuccugucccugaucaacgacaugccgaucaccaacgaccagaagaagcucaugagcaacaacgugcagaucgugcgccagcaguccuacagcaucaugugcaucaucaaggaggagguccuggccuacguggugcagcugccccucuacggggucaucgacacccccugcuggaagcugcacaccagcccccugugcacgaccaacaccaaggagggcuccaacaucugccucacccggacggaccgcgggugguacugcgacaacgccggcagcguguccuucuucccgcaggccgagaccugcaagguccagagcaaccggguguucugcgacaccaugaacucccugacccugcccagcgaggugaaccucugcaacaucgacaucuucaaccccaaguacgacugcaagaucaugacguccaagaccgacgucagcuccagcgugaucaccucccugggcgccaucgugagcugcuacgggaagaccaagugcacggcgagcaacaagaaccgcggcaucaucaagaccuucuccaacgggugcgacuacgucagcaacaagggcguggacaccguguccgucggcaacacccuguacugcgugaacaagcaggagggccagagccucuacgugaagggggagcccaucaucaacuucuacgacccgcuggucuuccccuccgacgaguucgacgccagcaucucccaggugaacgagaagaucaaccagagccuggccuucauccggaaguccgacgagcuccugcacaacgugaacgucggcaagagcaccacgaacaucaugaucaccaccaucaucaucgugaucaucgugauccugcugcuccugaucgccgucgggcuguuccucuacugcaaggcccgcuga

SEQ ID NO: 15787 - RNA, 1545 nt, Artificial Sequence
  derived and/or modified CDS sequence (opt1) from HRSV(Memphis-37)__AIY60640.1__F-del_DSCav1_mut3
auggagcugcccauccucaagaccaacgccaucaccacgauccuggccgcggugacccugugcuucgccagcucccagaacaucaccgaggaguucuaccagagcacgugcuccgccgucagcaagggcuaccucggggcccugcgcaccggcugguacaccuccgugaucaccaucgagcugagcaacaucaaggagaucaagugcaacgggaccgacgccaaggugaagcucaucaagcaggagcuggacaaguacaagaacgcggucacggaccugcagcuccugaugcaguccaccccggccgccggcagcggguccgccaucugcagcggcaucgcggugugcaaggugcugcaccucgagggcgaggucaacaagaucaagaacgcccugcuguccaccaacaaggccguggugagccucuccaacggggucagcgugcugaccuucaaggugcuggaccucaagaacuacaucgacaagcagcugcugcccauccucaacaagcaguccugcagcauccccaacaucgagacggucaucgaguuccagcagaagaacaaccggcugcuggagaucacccgcgaguucuccgugaacgccggcgugaccacccccgucagcacguacaugcucaccaacuccgagcugcugagccucaucaacgacaugccgaucaccaacgaccagaagaagcugaugagcaacaacgugcagaucgugcggcagcaguccuacagcaucaugugcaucaucaaggaggagguccuggccuacguggugcagcucccccuguacggggucaucgacacccccugcuggaagcugcacacgagcccccucugcaccaccaacaccaaggagggcuccaacaucugccugacgcgcaccgaccgggggugguacugcgacaacgcgggcuccgugagcuucuucccgcaggccgagaccugcaaggugcaguccaaccgcgucuucugcgacaccaugaacagccugacgcuccccuccgaggugaaccugugcaacaucgacaucuucaaccccaaguacgacugcaagaucaugaccagcaagaccgacgucuccagcuccgugaucaccagccugggcgccaucguguccugcuacgggaagacgaagugcaccgccagcaacaagaaccggggcaucaucaagaccuucuccaacgggugcgacuacgucagcaacaagggcguggacaccguguccgucggcaacacgcucuacugcgugaacaagcaggaggggcagagccuguacgugaagggcgagcccaucaucaacuucuacgacccgcuggucuuccccagcgacgaguucgacgccuccaucagccaggugaacgagaagaucaaccagucccucgcguucauccgcaagagcgacgagcugcugcacaacgugaacgucgggaaguccaccaccaacaucaugaucaccaccaucaucaucgugaucaucgugauccuccugcugcucaucgccgucggccuguuccuguacugcaaggcccgguga

SEQ ID NO: 15788 - RNA, 1545 nt, Artificial Sequence
  derived and/or modified CDS sequence (opt2) from HRSV(Memphis-37)__AIY60640.1__F-del_DSCav1_mut3
auggagcuccccauccucaagaccaacgccaucaccaccauccucgccgccgucacccucugcuucgccuccucccagaacaucaccgaggaguucuaccaguccaccugcuccgccgucuccaagggcuaccucggcgcccuccgcaccggcugguacaccuccgucaucaccaucgagcucuccaacaucaaggagaucaagugcaacggcaccgacgccaaggucaagcucaucaagcaggagcucgacaaguacaagaacgccgucaccgaccuccagcuccucaugcaguccacccccgccgccggcuccggcuccgccaucugcuccggcaucgccgucugcaagguccuccaccucgagggcgaggucaacaagaucaagaacgcccuccucuccaccaacaaggccgucgucucccucuccaacggcgucuccguccucaccuucaagguccucgaccucaagaacuacaucgacaagcagcuccuccccauccucaacaagcaguccugcuccauccccaacaucgagaccgucaucgaguuccagcagaagaacaaccgccuccucgagaucacccgcgaguucuccgucaacgccggcgucaccacccccgucuccaccuacaugcucaccaacuccgagcuccucucccucaucaacgacaugcccaucaccaacgaccagaagaagcucauguccaacaacguccagaucguccgccagcaguccuacuccaucaugugcaucaucaaggaggagguccucgccuacgucguccagcucccccucuacggcgucaucgacacccccugcuggaagcuccacaccuccccccucugcaccaccaacaccaaggagggcuccaacaucugccucacccgcaccgaccgcggcugguacugcgacaacgccggcuccgucuccuucuucccccaggccgagaccugcaagguccaguccaaccgcgucuucugcgacaccaugaacucccucacccuccccuccgaggucaaccucugcaacaucgacaucuucaaccccaaguacgacugcaagaucaugaccuccaagaccgacgucuccuccuccgucaucaccucccucggcgccaucgucuccugcuacggcaagaccaagugcaccgccuccaacaagaaccgcggcaucaucaagaccuucuccaacggcugcgacuacgucuccaacaagggcgucgacaccgucuccgucggcaacacccucuacugcgucaacaagcaggagggccagucccucuacgucaagggcgagcccaucaucaacuucuacgacccccucgucuuccccuccgacgaguucgacgccuccaucucccaggucaacgagaagaucaaccagucccucgccuucauccgcaaguccgacgagcuccuccacaacgucaacgucggcaaguccaccaccaacaucaugaucaccaccaucaucaucgucaucaucgucauccuccuccuccucaucgccgucggccucuuccucuacugcaaggcccgcuga

SEQ ID NO: 15789 - RNA, 1545 nt, Artificial Sequence
  derived and/or modified CDS sequence (opt3) from HRSV(Memphis-37)__AIY60640.1__F-del_DSCav1_mut3
auggagcugcccauccucaagaccaacgccauuacaacuauacuugcugcagugacgcugugcuucgccagcucccagaauaucaccgaagaguuuuaccaaucuacauguucagcggucaguaaaggcuauuugggggcuuuaagaacuggaugguacaccagcguuauuacaaucgaacuguccaacauuaaggagaucaaaugcaaugguaccgacgccaaggugaaacuaauaaagcaggaacucgauaaguauaaaaacgcaguaacugaccugcagcuucugaugcagucuacuccugccgcuggcucggggucagcaaucuguagcggaauugccgugugcaaggucuugcaccucgagggcgaggugaauaaaaucaagaacgcucugcugaguaccaauaaagccguugugucccucucuaacggugucagcguguuaacguucaagguacuggaucuuaagaauuacauugacaaacaauugcugccaauccuaaacaagcaguccuguucaauaccgaauauugaaacuguuaucgaguuucagcagaaaaacaauaggcuccuggaaauuacccgggaguucagugugaacgcgggggucacaacucccgugagcaccuauaugcuuacaaauucugagcuguugucccucaucaacgauaugccuaucaccaacgaccaaaagaaacugaugucaaauaacgugcagauuguccgccagcagagcuacaguauaaugugcaucauuaaggaagagguuuuagcauaugugguacaacugccacucuacggagugaucgauacgcccuguuggaaacuucauacuucuccucugugcacaaccaauacuaaggaaggcuccaacauauguuugacacgaaccgaccguggcugguacugcgauaaugccgggagcgucucguuuuucccacaggcugagacguguaaggugcagucuaacagaguuuucugcgacaccaugaacucccuaacacugcccucagaagugaaucucugcaauauugauaucuucaacccuaaauaugacuguaagaucaugacaaguaaaaccgaugucagcuccucugugauuacaagccugggagccaucguaucaugcuacgguaagacuaaauguaccgcaaguaauaagaacaggggcauuauaaagacauuuuccaaugggugcgacuauguuagcaacaaaggaguggacaccgucucugugggcaauacucuuuacugugucaacaagcaagagggucagucacuguaugugaaaggggagccaaucauuaacuucuacgauccguugguuuuucccagugacgaauuugaugcuagcaucucccaggugaaugagaagaucaaccagucucucgccuuuauucggaaaucggacgaacuguuacacaauguaaacgucggaaagagcacgacaaauauaaugaucaccacuauuaucauugugaucauaguuauccugcuacuccugauugcggugggccuuuucuuguauugcaaggcccgcuga

SEQ ID NO: 15790 - RNA, 1545 nt, Artificial Sequence
  derived and/or modified CDS sequence (opt4) from HRSV(Memphis-37)__AIY60640.1__F-del_DSCav1_mut3
auggagcugcccauccugaagaccaacgccaucaccaccauccuggccgccgugacccugugcuucgccagcagccagaacaucaccgaggaguucuaccagagcaccugcagcgccgugagcaagggcuaccugggcgcccugagaaccggcugguacaccagcgugaucaccaucgagcugagcaacaucaaggagaucaagugcaacggcaccgacgccaaggugaagcugaucaagcaggagcuggacaaguacaagaacgccgugaccgaccugcagcugcugaugcagagcacccccgccgccggcagcggcagcgccaucugcagcggcaucgccgugugcaaggugcugcaccuggagggcgaggugaacaagaucaagaacgcccugcugagcaccaacaaggccguggugagccugagcaacggcgugagcgugcugaccuucaaggugcuggaccugaagaacuacaucgacaagcagcugcugcccauccugaacaagcagagcugcagcauccccaacaucgagaccgugaucgaguuccagcagaagaacaacagacugcuggagaucaccagagaguucagcgugaacgccggcgugaccacccccgugagcaccuacaugcugaccaacagcgagcugcugagccugaucaacgacaugcccaucaccaacgaccagaagaagcugaugagcaacaacgugcagaucgugagacagcagagcuacagcaucaugugcaucaucaaggaggaggugcuggccuacguggugcagcugccccuguacggcgugaucgacacccccugcuggaagcugcacaccagcccccugugcaccaccaacaccaaggagggcagcaacaucugccugaccagaaccgacagaggcugguacugcgacaacgccggcagcgugagcuucuucccccaggccgagaccugcaaggugcagagcaacagaguguucugcgacaccaugaacagccugacccugcccagcgaggugaaccugugcaacaucgacaucuucaaccccaaguacgacugcaagaucaugaccagcaagaccgacgugagcagcagcgugaucaccagccugggcgccaucgugagcugcuacggcaagaccaagugcaccgccagcaacaagaacagaggcaucaucaagaccuucagcaacggcugcgacuacgugagcaacaagggcguggacaccgugagcgugggcaacacccuguacugcgugaacaagcaggagggccagagccuguacgugaagggcgagcccaucaucaacuucuacgacccccugguguuccccagcgacgaguucgacgccagcaucagccaggugaacgagaagaucaaccagagccuggccuucaucagaaagagcgacgagcugcugcacaacgugaacgugggcaagagcaccaccaacaucaugaucaccaccaucaucaucgugaucaucgugauccugcugcugcugaucgccgugggccuguuccuguacugcaaggccagauga

SEQ ID NO: 15791 - RNA, 1545 nt, Artificial Sequence
  derived and/or modified CDS sequence (opt5) from HRSV(Memphis-37)__AIY60640.1__F-del_DSCav1_mut3
auggagcugcccauccucaagaccaacgccauuacaacgauccuggcugccgugacccuuugcuucgcgagcucccagaauauuacagaagaguuuuaccaaucuaccuguagcgcugucuccaaaggcuaucugggggcccucagaacaggaugguacaccucuguuaucacaauugaacugagcaacaucaaggagaucaaaugcaauggcaccgacgccaaggugaaacuuauuaagcaggaacuggauaaguauaaaaacgcugugacggaccuccagcugcugaugcaguccaccccugccgcugggucuggaagcgccaucuguuccggcauugcggucugcaaggugcuccaccuggagggggagguuaauaaaaucaagaacgcccuucugagcacaaauaaagcuguggucucucucuccaacggagugagcguucugaccuucaaggugcuugaucugaagaauuacauugacaaacaacuccugccgauccugaacaagcagucuuguuccauucccaauaucgaaacagucaucgaguuucagcagaaaaacaaucggcuccuggaaauuacccgcgaguucagcgugaacgccggcgugacgacaccugucucuaccuauaugcuuacaaauuccgagcugcucagccugaucaacgauaugcccauuaccaacgaccaaaagaaacuuauguccaauaacguucagaucgugagacagcagucuuacagcauuaugugcaucaucaaggaagaggugcuggcuuaugucgugcaacucccucuguacggcguuauugauacccccuguuggaaacugcauacauccccucucugcacgaccaauacaaaggaagggagcaacaucugucugacccggacagaccgcggaugguacugcgauaaugccggcucuguguccuuuuucccgcaggcggagaccuguaagguccagagcaacagaguguuuugcgacacgaugaacucucuuacacugcccagcgaaguuaaucucugcaauauugauaucuucaacccuaaauaugacuguaagauuaugaccuccaaaaccgaugugucuagcuccgucaucacaagccugggggccaucgugucuugcuacggaaagaccaaauguacagcuuccaauaagaaccggggcauuaucaagacguuuagcaaugggugcgacuaugucucuaacaaaggaguggacaccguuuccgugggcaauacacuuuacugugucaacaagcaagagggccagagccuguaugugaaaggggagcccauuaucaacuucuacgauccucucguuuuucccuccgacgaguucgaugccucuauuagccaggugaaugaaaagaucaaccagucccuggcuuuuauucgcaaaucugacgaacugcuccacaaugucaacgugggaaagagcaccacaaauaucaugaucaccacgauuaucauugugaucauuguuauccugcuucugcucaucgccgucggccuguuccuguauugcaaggccagauga

SEQ ID NO: 15792 - RNA, 1545 nt, Artificial Sequence
  derived and/or modified CDS sequence (opt6) from HRSV(Memphis-37)__AIY60640.1__F-del_DSCav1_mut3
auggaacuacccauccuaaaaacaaaugccauaaccacaauacucgccgcuguaacacuauguuucgcuaguucacaaaacauuacagaagaauuuuaccaauccacaugcucagcaguaucaaaaggauaccuaggugcacuaagaacaggaugguacacaagcguaauuacaauagaauuauccaauauuaaagaaauaaaauguaacggcacugacgcuaaaguaaaauuaaucaaacaagaacuagacaaauacaaaaacgcaguaacagaccuacaauuacucaugcaauccacacccgcagcaggaucaggcucagccauaugcucagguauagcaguaugcaaaguacuccaccuugaaggagaaguaaacaaaauaaaaaacgcauuacuaucaacaaacaaagcaguaguaucacuaucaaacggagucucugucuuaaccuuuaaaguauuagauuuaaaaaacuacauagacaaacaacuauuaccaauucuaaauaaacaaucauguucuauaccaaauauagaaacaguaauagaauuucaacaaaaaaacaaccgauuacuagaaaucacaagagaauuuucugucaacgccggcguaaccaccccagucucaacauauaugcuaacaaauagugaacucuuauccuuaauaaacgacaugccaauaacaaaugaccaaaaaaaauuaauguccaauaacguacaaauagucagacaacagucauacucaauaauguguaucaucaaagaagaaguauuagcauacguaguucaacuaccccuauacggcguaauagacacaccauguuggaaacuacacacaucacccuuaugcacaaccaauaccaaagaaggaucuaacauaugccuaaccagaacagacagaggcugguacugcgacaacgcagguucagucucauucuucccacaagccgaaacaugcaaaguccaauccaacagaguauuuugcgacacuaugaacucacuaacucuaccuucagaagucaaccuuuguaacauagacauauuuaacccaaaauacgauuguaaaauaaugaccagcaaaacagacgucucaucaagcguaauaacaucacuuggcgcaauagucuccugcuacggaaaaacaaaaugcacagcauccaacaaaaacagaggcaucauaaaaaccuucuccaacggcugcgacuauguaagcaacaaaggugucgauacaguaucaguaggaaacacacuauacugcguaaacaaacaagaaggacaaucacucuacguaaaaggugaaccaaucauaaacuucuacgacccauuaguuuucccaucagacgaauuugaugccuccauaucacaaguaaaugaaaaaauaaaucaaucccuagcauucauacgaaaaucugaugaauuacuucacaaugucaacgucggaaaaucaaccacuaacauaaugauaacaacaauuauaauaguaauaauaguaauacuccuacuauuaauagccgucggucuuuuccuauacugcaaagcacgauaa

SEQ ID NO: 15793 - RNA, 1545 nt, Artificial Sequence
  derived and/or modified CDS sequence (opt11) from HRSV(Memphis-37)__AIY60640.1__F-del_DSCav1_mut3
auggaacuacccauccucaaaaccaacgccaucaccacaauccuagcugccgucacccuaugcuucgcaagcagccaaaacaucacagaagaauuuuaccaaucaaccugcuccgccgucuccaaaggguaccuaggugcccuccgcaccggcugguacacgucugucauaaccaucgaacucuccaacaucaaagaaaucaaauguaacggaacagacgcaaaagucaaacuaaucaaacaagaacuagacaaauacaaaaacgccguaaccgaccuccaacugcucaugcaauccacccccgcugccggcuccgggagcgcaaucugcucuggaaucgccguaugcaaaguccuccaccucgaaggagaaguaaacaaaaucaaaaacgcgcuccucaguaccaacaaagccgucgucucucuaucaaacggcguaucgguccucaccuucaaaguccucgaccuaaagaacuacauagacaaacaacuccuccccauccuaaacaaacaauccugcucaaucccaaacaucgaaaccgugaucgaguuccaacagaaaaacaaccgccuacucgaaaucacccgagaguucucagucaacgcaggagucaccacccccgucucaacauacaugcuuaccaacagcgaacuccuaucccucaucaacgacaugccaaucacaaacgaccaaaagaaacucaugagcaacaacguccagaucguaagacaacaaagcuacagcaucaugugcaucaucaaagaagaaguacuagcauacgucguccaacucccccucuacggcgucaucgacacccccugcuggaaacuccacaccucaccccucugcacaaccaacaccaaagaaggcuccaauaucugccucacacgcaccgaccgcggcugguacugcgacaacgccggcuccgucuccuucuucccucaagccgaaaccugcaaaguccaguccaacagagucuucugcgacaccaugaacucccuaacacuuccaucagaagucaaccuuuguaacaucgacaucuucaaucccaaauacgacuguaaaauaaugaccucaaaaacugacgugucaagcucaguuaucaccucccuaggggccaucgucuccugcuacggcaaaacaaaaugcaccgcauccaacaaaaaucgcggaaucaucaaaacauucuccaacggaugcgacuacgucucaaacaagggaguagauaccguaagcguuggcaacacccucuacugcguaaacaaacaagaaggccaaucacucuacgucaaaggcgaacccauaaucaacuucuacgacccccucgucuucccuuccgaugaguucgacgccagcaucucccaagucaacgagaaaauaaaccagucacucgcauucauccgcaaaagcgacgaacuccuccacaacguaaacguaggcaaauccacaaccaauaucaugauaaccacaaucaucaucgugaucaucgucauccuccuccuccucauagcugucggacucuuccucuacuguaaagcacgcuga

SEQ ID NO: 15794 - RNA, 1821 nt, Artificial Sequence
  mRNA product Design a-1 comprising derived and/or modified sequence from HRSV(Memphis-37)__AIY60640.1__F-del_DSCav1_mut3 (opt1)
gggagagucccgcagucggcguccagcggcucugcuuguucgugugugugucguugcaggccuuauucaagcuuaccauggagcugcccauccucaagaccaacgccaucaccacgauccuggccgcggugacccugugcuucgccagcucccagaacaucaccgaggaguucuaccagagcacgugcuccgccgucagcaagggcuaccucggcgcccugcgcaccgggugguacaccagcgugaucaccaucgagcuguccaacaucaaggagaucaagugcaacggcaccgacgccaaggugaagcucaucaagcaggagcuggacaaguacaagaacgcggucacggaccugcagcuccugaugcagagcaccccggccgccggcuccgggagcgcgaucugcuccggcaucgccgucugcaaggugcugcaccucgagggcgaggugaacaagaucaagaacgcccugcuguccaccaacaaggccgucgugagccucuccaacggggugagcguccugaccuucaaggugcuggaccucaagaacuacaucgacaagcagcugcugcccauccugaacaagcagagcugcuccauccccaacaucgagaccgucaucgaguuccagcagaagaacaaccgccuccuggagaucacgcgggaguucagcgugaacgcgggcgugaccacccccgucuccaccuacaugcugacgaacagcgagcuccugucccugaucaacgacaugccgaucaccaacgaccagaagaagcucaugagcaacaacgugcagaucgugcgccagcaguccuacagcaucaugugcaucaucaaggaggagguccuggccuacguggugcagcugccccucuacggggucaucgacacccccugcuggaagcugcacaccagcccccugugcacgaccaacaccaaggagggcuccaacaucugccucacccggacggaccgcgggugguacugcgacaacgccggcagcguguccuucuucccgcaggccgagaccugcaagguccagagcaaccggguguucugcgacaccaugaacucccugacccugcccagcgaggugaaccucugcaacaucgacaucuucaaccccaaguacgacugcaagaucaugacguccaagaccgacgucagcuccagcgugaucaccucccugggcgccaucgugagcugcuacgggaagaccaagugcacggcgagcaacaagaaccgcggcaucaucaagaccuucuccaacgggugcgacuacgucagcaacaagggcguggacaccguguccgucggcaacacccuguacugcgugaacaagcaggagggccagagccucuacgugaagggggagcccaucaucaacuucuacgacccgcuggucuuccccuccgacgaguucgacgccagcaucucccaggugaacgagaagaucaaccagagccuggccuucauccggaaguccgacgagcuccugcacaacgugaacgucggcaagagcaccacgaacaucaugaucaccaccaucaucaucgugaucaucgugauccugcugcuccugaucgccgucgggcuguuccucuacugcaaggcccgcugaggacuagucccuguucccagagcccacuuuuuuuucuuuuuuugaaauaaaauagccugucuuucagaucuaaaaaaaaaaaaaaaaaaaaaaaaaaaaaaaaaaaaaaaaaaaaaaaaaaaaaaaaaaaaaaaaugcaucccccccccccccccccccccccccccccccaaaggcucuuuucagagccaccagaauu

SEQ ID NO: 15795 - RNA, 1821 nt, Artificial Sequence
  mRNA product Design a-1 comprising derived and/or modified sequence from HRSV(Memphis-37)__AIY60640.1__F-del_DSCav1_mut3 (opt1)
gggagagucccgcagucggcguccagcggcucugcuuguucgugugugugucguugcaggccuuauucaagcuuaccauggagcugcccauccucaagaccaacgccaucaccacgauccuggccgcggugacccugugcuucgccagcucccagaacaucaccgaggaguucuaccagagcacgugcuccgccgucagcaagggcuaccucggggcccugcgcaccggcugguacaccuccgugaucaccaucgagcugagcaacaucaaggagaucaagugcaacgggaccgacgccaaggugaagcucaucaagcaggagcuggacaaguacaagaacgcggucacggaccugcagcuccugaugcaguccaccccggccgccggcagcggguccgccaucugcagcggcaucgcggugugcaaggugcugcaccucgagggcgaggucaacaagaucaagaacgcccugcuguccaccaacaaggccguggugagccucuccaacggggucagcgugcugaccuucaaggugcuggaccucaagaacuacaucgacaagcagcugcugcccauccucaacaagcaguccugcagcauccccaacaucgagacggucaucgaguuccagcagaagaacaaccggcugcuggagaucacccgcgaguucuccgugaacgccggcgugaccacccccgucagcacguacaugcucaccaacuccgagcugcugagccucaucaacgacaugccgaucaccaacgaccagaagaagcugaugagcaacaacgugcagaucgugcggcagcaguccuacagcaucaugugcaucaucaaggaggagguccuggccuacguggugcagcucccccuguacggggucaucgacacccccugcuggaagcugcacacgagcccccucugcaccaccaacaccaaggagggcuccaacaucugccugacgcgcaccgaccgggggugguacugcgacaacgcgggcuccgugagcuucuucccgcaggccgagaccugcaaggugcaguccaaccgcgucuucugcgacaccaugaacagccugacgcuccccuccgaggugaaccugugcaacaucgacaucuucaaccccaaguacgacugcaagaucaugaccagcaagaccgacgucuccagcuccgugaucaccagccugggcgccaucguguccugcuacgggaagacgaagugcaccgccagcaacaagaaccggggcaucaucaagaccuucuccaacgggugcgacuacgucagcaacaagggcguggacaccguguccgucggcaacacgcucuacugcgugaacaagcaggaggggcagagccuguacgugaagggcgagcccaucaucaacuucuacgacccgcuggucuuccccagcgacgaguucgacgccuccaucagccaggugaacgagaagaucaaccagucccucgcguucauccgcaagagcgacgagcugcugcacaacgugaacgucgggaaguccaccaccaacaucaugaucaccaccaucaucaucgugaucaucgugauccuccugcugcucaucgccgucggccuguuccuguacugcaaggcccggugaggacuagucccuguucccagagcccacuuuuuuuucuuuuuuugaaauaaaauagccugucuuucagaucuaaaaaaaaaaaaaaaaaaaaaaaaaaaaaaaaaaaaaaaaaaaaaaaaaaaaaaaaaaaaaaaaugcaucccccccccccccccccccccccccccccccaaaggcucuuuucagagccaccagaauu

SEQ ID NO: 15796 - RNA, 1821 nt, Artificial Sequence
  mRNA product Design a-1 comprising derived and/or modified sequence from HRSV(Memphis-37)__AIY60640.1__F-del_DSCav1_mut3 (opt2)
gggagagucccgcagucggcguccagcggcucugcuuguucgugugugugucguugcaggccuuauucaagcuuaccauggagcuccccauccucaagaccaacgccaucaccaccauccucgccgccgucacccucugcuucgccuccucccagaacaucaccgaggaguucuaccaguccaccugcuccgccgucuccaagggcuaccucggcgcccuccgcaccggcugguacaccuccgucaucaccaucgagcucuccaacaucaaggagaucaagugcaacggcaccgacgccaaggucaagcucaucaagcaggagcucgacaaguacaagaacgccgucaccgaccuccagcuccucaugcaguccacccccgccgccggcuccggcuccgccaucugcuccggcaucgccgucugcaagguccuccaccucgagggcgaggucaacaagaucaagaacgcccuccucuccaccaacaaggccgucgucucccucuccaacggcgucuccguccucaccuucaagguccucgaccucaagaacuacaucgacaagcagcuccuccccauccucaacaagcaguccugcuccauccccaacaucgagaccgucaucgaguuccagcagaagaacaaccgccuccucgagaucacccgcgaguucuccgucaacgccggcgucaccacccccgucuccaccuacaugcucaccaacuccgagcuccucucccucaucaacgacaugcccaucaccaacgaccagaagaagcucauguccaacaacguccagaucguccgccagcaguccuacuccaucaugugcaucaucaaggaggagguccucgccuacgucguccagcucccccucuacggcgucaucgacacccccugcuggaagcuccacaccuccccccucugcaccaccaacaccaaggagggcuccaacaucugccucacccgcaccgaccgcggcugguacugcgacaacgccggcuccgucuccuucuucccccaggccgagaccugcaagguccaguccaaccgcgucuucugcgacaccaugaacucccucacccuccccuccgaggucaaccucugcaacaucgacaucuucaaccccaaguacgacugcaagaucaugaccuccaagaccgacgucuccuccuccgucaucaccucccucggcgccaucgucuccugcuacggcaagaccaagugcaccgccuccaacaagaaccgcggcaucaucaagaccuucuccaacggcugcgacuacgucuccaacaagggcgucgacaccgucuccgucggcaacacccucuacugcgucaacaagcaggagggccagucccucuacgucaagggcgagcccaucaucaacuucuacgacccccucgucuuccccuccgacgaguucgacgccuccaucucccaggucaacgagaagaucaaccagucccucgccuucauccgcaaguccgacgagcuccuccacaacgucaacgucggcaaguccaccaccaacaucaugaucaccaccaucaucaucgucaucaucgucauccuccuccuccucaucgccgucggccucuuccucuacugcaaggcccgcugaggacuagucccuguucccagagcccacuuuuuuuucuuuuuuugaaauaaaauagccugucuuucagaucuaaaaaaaaaaaaaaaaaaaaaaaaaaaaaaaaaaaaaaaaaaaaaaaaaaaaaaaaaaaaaaaaugcaucccccccccccccccccccccccccccccccaaaggcucuuuucagagccaccagaauu

SEQ ID NO: 15797 - RNA, 1821 nt, Artificial Sequence
  mRNA product Design a-1 comprising derived and/or modified sequence from HRSV(Memphis-37)__AIY60640.1__F-del_DSCav1_mut3 (opt3)
gggagagucccgcagucggcguccagcggcucugcuuguucgugugugugucguugcaggccuuauucaagcuuaccauggagcugcccauccucaagaccaacgccauuacaacuauacuugcugcagugacgcugugcuucgccagcucccagaauaucaccgaagaguuuuaccaaucuacauguucagcggucaguaaaggcuauuugggggcuuuaagaacuggaugguacaccagcguuauuacaaucgaacuguccaacauuaaggagaucaaaugcaaugguaccgacgccaaggugaaacuaauaaagcaggaacucgauaaguauaaaaacgcaguaacugaccugcagcuucugaugcagucuacuccugccgcuggcucggggucagcaaucuguagcggaauugccgugugcaaggucuugcaccucgagggcgaggugaauaaaaucaagaacgcucugcugaguaccaauaaagccguugugucccucucuaacggugucagcguguuaacguucaagguacuggaucuuaagaauuacauugacaaacaauugcugccaauccuaaacaagcaguccuguucaauaccgaauauugaaacuguuaucgaguuucagcagaaaaacaauaggcuccuggaaauuacccgggaguucagugugaacgcgggggucacaacucccgugagcaccuauaugcuuacaaauucugagcuguugucccucaucaacgauaugccuaucaccaacgaccaaaagaaacugaugucaaauaacgugcagauuguccgccagcagagcuacaguauaaugugcaucauuaaggaagagguuuuagcauaugugguacaacugccacucuacggagugaucgauacgcccuguuggaaacuucauacuucuccucugugcacaaccaauacuaaggaaggcuccaacauauguuugacacgaaccgaccguggcugguacugcgauaaugccgggagcgucucguuuuucccacaggcugagacguguaaggugcagucuaacagaguuuucugcgacaccaugaacucccuaacacugcccucagaagugaaucucugcaauauugauaucuucaacccuaaauaugacuguaagaucaugacaaguaaaaccgaugucagcuccucugugauuacaagccugggagccaucguaucaugcuacgguaagacuaaauguaccgcaaguaauaagaacaggggcauuauaaagacauuuuccaaugggugcgacuauguuagcaacaaaggaguggacaccgucucugugggcaauacucuuuacugugucaacaagcaagagggucagucacuguaugugaaaggggagccaaucauuaacuucuacgauccguugguuuuucccagugacgaauuugaugcuagcaucucccaggugaaugagaagaucaaccagucucucgccuuuauucggaaaucggacgaacuguuacacaauguaaacgucggaaagagcacgacaaauauaaugaucaccacuauuaucauugugaucauaguuauccugcuacuccugauugcggugggccuuuucuuguauugcaaggcccgcugaggacuagucccuguucccagagcccacuuuuuuuucuuuuuuugaaauaaaauagccugucuuucagaucuaaaaaaaaaaaaaaaaaaaaaaaaaaaaaaaaaaaaaaaaaaaaaaaaaaaaaaaaaaaaaaaaugcaucccccccccccccccccccccccccccccccaaaggcucuuuucagagccaccagaauu

SEQ ID NO: 15798 - RNA, 1821 nt, Artificial Sequence
  mRNA product Design a-1 comprising derived and/or modified sequence from HRSV(Memphis-37)__AIY60640.1__F-del_DSCav1_mut3 (opt4)
gggagagucccgcagucggcguccagcggcucugcuuguucgugugugugucguugcaggccuuauucaagcuuaccauggagcugcccauccugaagaccaacgccaucaccaccauccuggccgccgugacccugugcuucgccagcagccagaacaucaccgaggaguucuaccagagcaccugcagcgccgugagcaagggcuaccugggcgcccugagaaccggcugguacaccagcgugaucaccaucgagcugagcaacaucaaggagaucaagugcaacggcaccgacgccaaggugaagcugaucaagcaggagcuggacaaguacaagaacgccgugaccgaccugcagcugcugaugcagagcacccccgccgccggcagcggcagcgccaucugcagcggcaucgccgugugcaaggugcugcaccuggagggcgaggugaacaagaucaagaacgcccugcugagcaccaacaaggccguggugagccugagcaacggcgugagcgugcugaccuucaaggugcuggaccugaagaacuacaucgacaagcagcugcugcccauccugaacaagcagagcugcagcauccccaacaucgagaccgugaucgaguuccagcagaagaacaacagacugcuggagaucaccagagaguucagcgugaacgccggcgugaccacccccgugagcaccuacaugcugaccaacagcgagcugcugagccugaucaacgacaugcccaucaccaacgaccagaagaagcugaugagcaacaacgugcagaucgugagacagcagagcuacagcaucaugugcaucaucaaggaggaggugcuggccuacguggugcagcugccccuguacggcgugaucgacacccccugcuggaagcugcacaccagcccccugugcaccaccaacaccaaggagggcagcaacaucugccugaccagaaccgacagaggcugguacugcgacaacgccggcagcgugagcuucuucccccaggccgagaccugcaaggugcagagcaacagaguguucugcgacaccaugaacagccugacccugcccagcgaggugaaccugugcaacaucgacaucuucaaccccaaguacgacugcaagaucaugaccagcaagaccgacgugagcagcagcgugaucaccagccugggcgccaucgugagcugcuacggcaagaccaagugcaccgccagcaacaagaacagaggcaucaucaagaccuucagcaacggcugcgacuacgugagcaacaagggcguggacaccgugagcgugggcaacacccuguacugcgugaacaagcaggagggccagagccuguacgugaagggcgagcccaucaucaacuucuacgacccccugguguuccccagcgacgaguucgacgccagcaucagccaggugaacgagaagaucaaccagagccuggccuucaucagaaagagcgacgagcugcugcacaacgugaacgugggcaagagcaccaccaacaucaugaucaccaccaucaucaucgugaucaucgugauccugcugcugcugaucgccgugggccuguuccuguacugcaaggccagaugaggacuagucccuguucccagagcccacuuuuuuuucuuuuuuugaaauaaaauagccugucuuucagaucuaaaaaaaaaaaaaaaaaaaaaaaaaaaaaaaaaaaaaaaaaaaaaaaaaaaaaaaaaaaaaaaaugcaucccccccccccccccccccccccccccccccaaaggcucuuuucagagccaccagaauu

SEQ ID NO: 15799 - RNA, 1821 nt, Artificial Sequence
  mRNA product Design a-1 comprising derived and/or modified sequence from HRSV(Memphis-37)__AIY60640.1__F-del_DSCav1_mut3 (opt5)
gggagagucccgcagucggcguccagcggcucugcuuguucgugugugugucguugcaggccuuauucaagcuuaccauggagcugcccauccucaagaccaacgccauuacaacgauccuggcugccgugacccuuugcuucgcgagcucccagaauauuacagaagaguuuuaccaaucuaccuguagcgcugucuccaaaggcuaucugggggcccucagaacaggaugguacaccucuguuaucacaauugaacugagcaacaucaaggagaucaaaugcaauggcaccgacgccaaggugaaacuuauuaagcaggaacuggauaaguauaaaaacgcugugacggaccuccagcugcugaugcaguccaccccugccgcugggucuggaagcgccaucuguuccggcauugcggucugcaaggugcuccaccuggagggggagguuaauaaaaucaagaacgcccuucugagcacaaauaaagcuguggucucucucuccaacggagugagcguucugaccuucaaggugcuugaucugaagaauuacauugacaaacaacuccugccgauccugaacaagcagucuuguuccauucccaauaucgaaacagucaucgaguuucagcagaaaaacaaucggcuccuggaaauuacccgcgaguucagcgugaacgccggcgugacgacaccugucucuaccuauaugcuuacaaauuccgagcugcucagccugaucaacgauaugcccauuaccaacgaccaaaagaaacuuauguccaauaacguucagaucgugagacagcagucuuacagcauuaugugcaucaucaaggaagaggugcuggcuuaugucgugcaacucccucuguacggcguuauugauacccccuguuggaaacugcauacauccccucucugcacgaccaauacaaaggaagggagcaacaucugucugacccggacagaccgcggaugguacugcgauaaugccggcucuguguccuuuuucccgcaggcggagaccuguaagguccagagcaacagaguguuuugcgacacgaugaacucucuuacacugcccagcgaaguuaaucucugcaauauugauaucuucaacccuaaauaugacuguaagauuaugaccuccaaaaccgaugugucuagcuccgucaucacaagccugggggccaucgugucuugcuacggaaagaccaaauguacagcuuccaauaagaaccggggcauuaucaagacguuuagcaaugggugcgacuaugucucuaacaaaggaguggacaccguuuccgugggcaauacacuuuacugugucaacaagcaagagggccagagccuguaugugaaaggggagcccauuaucaacuucuacgauccucucguuuuucccuccgacgaguucgaugccucuauuagccaggugaaugaaaagaucaaccagucccuggcuuuuauucgcaaaucugacgaacugcuccacaaugucaacgugggaaagagcaccacaaauaucaugaucaccacgauuaucauugugaucauuguuauccugcuucugcucaucgccgucggccuguuccuguauugcaaggccagaugaggacuagucccuguucccagagcccacuuuuuuuucuuuuuuugaaauaaaauagccugucuuucagaucuaaaaaaaaaaaaaaaaaaaaaaaaaaaaaaaaaaaaaaaaaaaaaaaaaaaaaaaaaaaaaaaaugcaucccccccccccccccccccccccccccccccaaaggcucuuuucagagccaccagaauu

SEQ ID NO: 15800 - RNA, 1821 nt, Artificial Sequence
  mRNA product Design a-1 comprising derived and/or modified sequence from HRSV(Memphis-37)__AIY60640.1__F-del_DSCav1_mut3 (opt6)
gggagagucccgcagucggcguccagcggcucugcuuguucgugugugugucguugcaggccuuauucaagcuuaccauggaacuacccauccuaaaaacaaaugccauaaccacaauacucgccgcuguaacacuauguuucgcuaguucacaaaacauuacagaagaauuuuaccaauccacaugcucagcaguaucaaaaggauaccuaggugcacuaagaacaggaugguacacaagcguaauuacaauagaauuauccaauauuaaagaaauaaaauguaacggcacugacgcuaaaguaaaauuaaucaaacaagaacuagacaaauacaaaaacgcaguaacagaccuacaauuacucaugcaauccacacccgcagcaggaucaggcucagccauaugcucagguauagcaguaugcaaaguacuccaccuugaaggagaaguaaacaaaauaaaaaacgcauuacuaucaacaaacaaagcaguaguaucacuaucaaacggagucucugucuuaaccuuuaaaguauuagauuuaaaaaacuacauagacaaacaacuauuaccaauucuaaauaaacaaucauguucuauaccaaauauagaaacaguaauagaauuucaacaaaaaaacaaccgauuacuagaaaucacaagagaauuuucugucaacgccggcguaaccaccccagucucaacauauaugcuaacaaauagugaacucuuauccuuaauaaacgacaugccaauaacaaaugaccaaaaaaaauuaauguccaauaacguacaaauagucagacaacagucauacucaauaauguguaucaucaaagaagaaguauuagcauacguaguucaacuaccccuauacggcguaauagacacaccauguuggaaacuacacacaucacccuuaugcacaaccaauaccaaagaaggaucuaacauaugccuaaccagaacagacagaggcugguacugcgacaacgcagguucagucucauucuucccacaagccgaaacaugcaaaguccaauccaacagaguauuuugcgacacuaugaacucacuaacucuaccuucagaagucaaccuuuguaacauagacauauuuaacccaaaauacgauuguaaaauaaugaccagcaaaacagacgucucaucaagcguaauaacaucacuuggcgcaauagucuccugcuacggaaaaacaaaaugcacagcauccaacaaaaacagaggcaucauaaaaaccuucuccaacggcugcgacuauguaagcaacaaaggugucgauacaguaucaguaggaaacacacuauacugcguaaacaaacaagaaggacaaucacucuacguaaaaggugaaccaaucauaaacuucuacgacccauuaguuuucccaucagacgaauuugaugccuccauaucacaaguaaaugaaaaaauaaaucaaucccuagcauucauacgaaaaucugaugaauuacuucacaaugucaacgucggaaaaucaaccacuaacauaaugauaacaacaauuauaauaguaauaauaguaauacuccuacuauuaauagccgucggucuuuuccuauacugcaaagcacgauaaggacuagucccuguucccagagcccacuuuuuuuucuuuuuuugaaauaaaauagccugucuuucagaucuaaaaaaaaaaaaaaaaaaaaaaaaaaaaaaaaaaaaaaaaaaaaaaaaaaaaaaaaaaaaaaaaugcaucccccccccccccccccccccccccccccccaaaggcucuuuucagagccaccagaauu

SEQ ID NO: 15801 - RNA, 1821 nt, Artificial Sequence
  mRNA product Design a-1 comprising derived and/or modified sequence from HRSV(Memphis-37)__AIY60640.1__F-del_DSCav1_mut3 (opt11)
gggagagucccgcagucggcguccagcggcucugcuuguucgugugugugucguugcaggccuuauucaagcuuaccauggaacuacccauccucaaaaccaacgccaucaccacaauccuagcugccgucacccuaugcuucgcaagcagccaaaacaucacagaagaauuuuaccaaucaaccugcuccgccgucuccaaaggguaccuaggugcccuccgcaccggcugguacacgucugucauaaccaucgaacucuccaacaucaaagaaaucaaauguaacggaacagacgcaaaagucaaacuaaucaaacaagaacuagacaaauacaaaaacgccguaaccgaccuccaacugcucaugcaauccacccccgcugccggcuccgggagcgcaaucugcucuggaaucgccguaugcaaaguccuccaccucgaaggagaaguaaacaaaaucaaaaacgcgcuccucaguaccaacaaagccgucgucucucuaucaaacggcguaucgguccucaccuucaaaguccucgaccuaaagaacuacauagacaaacaacuccuccccauccuaaacaaacaauccugcucaaucccaaacaucgaaaccgugaucgaguuccaacagaaaaacaaccgccuacucgaaaucacccgagaguucucagucaacgcaggagucaccacccccgucucaacauacaugcuuaccaacagcgaacuccuaucccucaucaacgacaugccaaucacaaacgaccaaaagaaacucaugagcaacaacguccagaucguaagacaacaaagcuacagcaucaugugcaucaucaaagaagaaguacuagcauacgucguccaacucccccucuacggcgucaucgacacccccugcuggaaacuccacaccucaccccucugcacaaccaacaccaaagaaggcuccaauaucugccucacacgcaccgaccgcggcugguacugcgacaacgccggcuccgucuccuucuucccucaagccgaaaccugcaaaguccaguccaacagagucuucugcgacaccaugaacucccuaacacuuccaucagaagucaaccuuuguaacaucgacaucuucaaucccaaauacgacuguaaaauaaugaccucaaaaacugacgugucaagcucaguuaucaccucccuaggggccaucgucuccugcuacggcaaaacaaaaugcaccgcauccaacaaaaaucgcggaaucaucaaaacauucuccaacggaugcgacuacgucucaaacaagggaguagauaccguaagcguuggcaacacccucuacugcguaaacaaacaagaaggccaaucacucuacgucaaaggcgaacccauaaucaacuucuacgacccccucgucuucccuuccgaugaguucgacgccagcaucucccaagucaacgagaaaauaaaccagucacucgcauucauccgcaaaagcgacgaacuccuccacaacguaaacguaggcaaauccacaaccaauaucaugauaaccacaaucaucaucgugaucaucgucauccuccuccuccucauagcugucggacucuuccucuacuguaaagcacgcugaggacuagucccuguucccagagcccacuuuuuuuucuuuuuuugaaauaaaauagccugucuuucagaucuaaaaaaaaaaaaaaaaaaaaaaaaaaaaaaaaaaaaaaaaaaaaaaaaaaaaaaaaaaaaaaaaugcaucccccccccccccccccccccccccccccccaaaggcucuuuucagagccaccagaauu

SEQ ID NO: 15802 - RNA, 1840 nt, Artificial Sequence
  mRNA product Design a-2 comprising derived and/or modified sequence from HRSV(Memphis-37)__AIY60640.1__F-del_DSCav1_mut3 (opt1)
gggagaguccgcucagccagguugcagaagcggcuuagcguguguccuaaucuucucucugcguguagguaggccugugccgcaaacaagcuuaccauggagcugcccauccucaagaccaacgccaucaccacgauccuggccgcggugacccugugcuucgccagcucccagaacaucaccgaggaguucuaccagagcacgugcuccgccgucagcaagggcuaccucggcgcccugcgcaccgggugguacaccagcgugaucaccaucgagcuguccaacaucaaggagaucaagugcaacggcaccgacgccaaggugaagcucaucaagcaggagcuggacaaguacaagaacgcggucacggaccugcagcuccugaugcagagcaccccggccgccggcuccgggagcgcgaucugcuccggcaucgccgucugcaaggugcugcaccucgagggcgaggugaacaagaucaagaacgcccugcuguccaccaacaaggccgucgugagccucuccaacggggugagcguccugaccuucaaggugcuggaccucaagaacuacaucgacaagcagcugcugcccauccugaacaagcagagcugcuccauccccaacaucgagaccgucaucgaguuccagcagaagaacaaccgccuccuggagaucacgcgggaguucagcgugaacgcgggcgugaccacccccgucuccaccuacaugcugacgaacagcgagcuccugucccugaucaacgacaugccgaucaccaacgaccagaagaagcucaugagcaacaacgugcagaucgugcgccagcaguccuacagcaucaugugcaucaucaaggaggagguccuggccuacguggugcagcugccccucuacggggucaucgacacccccugcuggaagcugcacaccagcccccugugcacgaccaacaccaaggagggcuccaacaucugccucacccggacggaccgcgggugguacugcgacaacgccggcagcguguccuucuucccgcaggccgagaccugcaagguccagagcaaccggguguucugcgacaccaugaacucccugacccugcccagcgaggugaaccucugcaacaucgacaucuucaaccccaaguacgacugcaagaucaugacguccaagaccgacgucagcuccagcgugaucaccucccugggcgccaucgugagcugcuacgggaagaccaagugcacggcgagcaacaagaaccgcggcaucaucaagaccuucuccaacgggugcgacuacgucagcaacaagggcguggacaccguguccgucggcaacacccuguacugcgugaacaagcaggagggccagagccucuacgugaagggggagcccaucaucaacuucuacgacccgcuggucuuccccuccgacgaguucgacgccagcaucucccaggugaacgagaagaucaaccagagccuggccuucauccggaaguccgacgagcuccugcacaacgugaacgucggcaagagcaccacgaacaucaugaucaccaccaucaucaucgugaucaucgugauccugcugcuccugaucgccgucgggcuguuccucuacugcaaggcccgcugaggacuagucccuguucccagagcccacuuuuuuuucuuuuuuugaaauaaaauagccugucuuucagaucuaaaaaaaaaaaaaaaaaaaaaaaaaaaaaaaaaaaaaaaaaaaaaaaaaaaaaaaaaaaaaaaaugcaucccccccccccccccccccccccccccccccaaaggcucuuuucagagccaccagaauu

SEQ ID NO: 15803 - RNA, 1840 nt, Artificial Sequence
  mRNA product Design a-2 comprising derived and/or modified sequence from HRSV(Memphis-37)__AIY60640.1__F-del_DSCav1_mut3 (opt1)
gggagaguccgcucagccagguugcagaagcggcuuagcguguguccuaaucuucucucugcguguagguaggccugugccgcaaacaagcuuaccauggagcugcccauccucaagaccaacgccaucaccacgauccuggccgcggugacccugugcuucgccagcucccagaacaucaccgaggaguucuaccagagcacgugcuccgccgucagcaagggcuaccucggggcccugcgcaccggcugguacaccuccgugaucaccaucgagcugagcaacaucaaggagaucaagugcaacgggaccgacgccaaggugaagcucaucaagcaggagcuggacaaguacaagaacgcggucacggaccugcagcuccugaugcaguccaccccggccgccggcagcggguccgccaucugcagcggcaucgcggugugcaaggugcugcaccucgagggcgaggucaacaagaucaagaacgcccugcuguccaccaacaaggccguggugagccucuccaacggggucagcgugcugaccuucaaggugcuggaccucaagaacuacaucgacaagcagcugcugcccauccucaacaagcaguccugcagcauccccaacaucgagacggucaucgaguuccagcagaagaacaaccggcugcuggagaucacccgcgaguucuccgugaacgccggcgugaccacccccgucagcacguacaugcucaccaacuccgagcugcugagccucaucaacgacaugccgaucaccaacgaccagaagaagcugaugagcaacaacgugcagaucgugcggcagcaguccuacagcaucaugugcaucaucaaggaggagguccuggccuacguggugcagcucccccuguacggggucaucgacacccccugcuggaagcugcacacgagcccccucugcaccaccaacaccaaggagggcuccaacaucugccugacgcgcaccgaccgggggugguacugcgacaacgcgggcuccgugagcuucuucccgcaggccgagaccugcaaggugcaguccaaccgcgucuucugcgacaccaugaacagccugacgcuccccuccgaggugaaccugugcaacaucgacaucuucaaccccaaguacgacugcaagaucaugaccagcaagaccgacgucuccagcuccgugaucaccagccugggcgccaucguguccugcuacgggaagacgaagugcaccgccagcaacaagaaccggggcaucaucaagaccuucuccaacgggugcgacuacgucagcaacaagggcguggacaccguguccgucggcaacacgcucuacugcgugaacaagcaggaggggcagagccuguacgugaagggcgagcccaucaucaacuucuacgacccgcuggucuuccccagcgacgaguucgacgccuccaucagccaggugaacgagaagaucaaccagucccucgcguucauccgcaagagcgacgagcugcugcacaacgugaacgucgggaaguccaccaccaacaucaugaucaccaccaucaucaucgugaucaucgugauccuccugcugcucaucgccgucggccuguuccuguacugcaaggcccggugaggacuagucccuguucccagagcccacuuuuuuuucuuuuuuugaaauaaaauagccugucuuucagaucuaaaaaaaaaaaaaaaaaaaaaaaaaaaaaaaaaaaaaaaaaaaaaaaaaaaaaaaaaaaaaaaaugcaucccccccccccccccccccccccccccccccaaaggcucuuuucagagccaccagaauu

SEQ ID NO: 15804 - RNA, 1840 nt, Artificial Sequence
  mRNA product Design a-2 comprising derived and/or modified sequence from HRSV(Memphis-37)__AIY60640.1__F-del_DSCav1_mut3 (opt2)
gggagaguccgcucagccagguugcagaagcggcuuagcguguguccuaaucuucucucugcguguagguaggccugugccgcaaacaagcuuaccauggagcuccccauccucaagaccaacgccaucaccaccauccucgccgccgucacccucugcuucgccuccucccagaacaucaccgaggaguucuaccaguccaccugcuccgccgucuccaagggcuaccucggcgcccuccgcaccggcugguacaccuccgucaucaccaucgagcucuccaacaucaaggagaucaagugcaacggcaccgacgccaaggucaagcucaucaagcaggagcucgacaaguacaagaacgccgucaccgaccuccagcuccucaugcaguccacccccgccgccggcuccggcuccgccaucugcuccggcaucgccgucugcaagguccuccaccucgagggcgaggucaacaagaucaagaacgcccuccucuccaccaacaaggccgucgucucccucuccaacggcgucuccguccucaccuucaagguccucgaccucaagaacuacaucgacaagcagcuccuccccauccucaacaagcaguccugcuccauccccaacaucgagaccgucaucgaguuccagcagaagaacaaccgccuccucgagaucacccgcgaguucuccgucaacgccggcgucaccacccccgucuccaccuacaugcucaccaacuccgagcuccucucccucaucaacgacaugcccaucaccaacgaccagaagaagcucauguccaacaacguccagaucguccgccagcaguccuacuccaucaugugcaucaucaaggaggagguccucgccuacgucguccagcucccccucuacggcgucaucgacacccccugcuggaagcuccacaccuccccccucugcaccaccaacaccaaggagggcuccaacaucugccucacccgcaccgaccgcggcugguacugcgacaacgccggcuccgucuccuucuucccccaggccgagaccugcaagguccaguccaaccgcgucuucugcgacaccaugaacucccucacccuccccuccgaggucaaccucugcaacaucgacaucuucaaccccaaguacgacugcaagaucaugaccuccaagaccgacgucuccuccuccgucaucaccucccucggcgccaucgucuccugcuacggcaagaccaagugcaccgccuccaacaagaaccgcggcaucaucaagaccuucuccaacggcugcgacuacgucuccaacaagggcgucgacaccgucuccgucggcaacacccucuacugcgucaacaagcaggagggccagucccucuacgucaagggcgagcccaucaucaacuucuacgacccccucgucuuccccuccgacgaguucgacgccuccaucucccaggucaacgagaagaucaaccagucccucgccuucauccgcaaguccgacgagcuccuccacaacgucaacgucggcaaguccaccaccaacaucaugaucaccaccaucaucaucgucaucaucgucauccuccuccuccucaucgccgucggccucuuccucuacugcaaggcccgcugaggacuagucccuguucccagagcccacuuuuuuuucuuuuuuugaaauaaaauagccugucuuucagaucuaaaaaaaaaaaaaaaaaaaaaaaaaaaaaaaaaaaaaaaaaaaaaaaaaaaaaaaaaaaaaaaaugcaucccccccccccccccccccccccccccccccaaaggcucuuuucagagccaccagaauu

SEQ ID NO: 15805 - RNA, 1840 nt, Artificial Sequence
  mRNA product Design a-2 comprising derived and/or modified sequence from HRSV(Memphis-37)__AIY60640.1__F-del_DSCav1_mut3 (opt3)
gggagaguccgcucagccagguugcagaagcggcuuagcguguguccuaaucuucucucugcguguagguaggccugugccgcaaacaagcuuaccauggagcugcccauccucaagaccaacgccauuacaacuauacuugcugcagugacgcugugcuucgccagcucccagaauaucaccgaagaguuuuaccaaucuacauguucagcggucaguaaaggcuauuugggggcuuuaagaacuggaugguacaccagcguuauuacaaucgaacuguccaacauuaaggagaucaaaugcaaugguaccgacgccaaggugaaacuaauaaagcaggaacucgauaaguauaaaaacgcaguaacugaccugcagcuucugaugcagucuacuccugccgcuggcucggggucagcaaucuguagcggaauugccgugugcaaggucuugcaccucgagggcgaggugaauaaaaucaagaacgcucugcugaguaccaauaaagccguugugucccucucuaacggugucagcguguuaacguucaagguacuggaucuuaagaauuacauugacaaacaauugcugccaauccuaaacaagcaguccuguucaauaccgaauauugaaacuguuaucgaguuucagcagaaaaacaauaggcuccuggaaauuacccgggaguucagugugaacgcgggggucacaacucccgugagcaccuauaugcuuacaaauucugagcuguugucccucaucaacgauaugccuaucaccaacgaccaaaagaaacugaugucaaauaacgugcagauuguccgccagcagagcuacaguauaaugugcaucauuaaggaagagguuuuagcauaugugguacaacugccacucuacggagugaucgauacgcccuguuggaaacuucauacuucuccucugugcacaaccaauacuaaggaaggcuccaacauauguuugacacgaaccgaccguggcugguacugcgauaaugccgggagcgucucguuuuucccacaggcugagacguguaaggugcagucuaacagaguuuucugcgacaccaugaacucccuaacacugcccucagaagugaaucucugcaauauugauaucuucaacccuaaauaugacuguaagaucaugacaaguaaaaccgaugucagcuccucugugauuacaagccugggagccaucguaucaugcuacgguaagacuaaauguaccgcaaguaauaagaacaggggcauuauaaagacauuuuccaaugggugcgacuauguuagcaacaaaggaguggacaccgucucugugggcaauacucuuuacugugucaacaagcaagagggucagucacuguaugugaaaggggagccaaucauuaacuucuacgauccguugguuuuucccagugacgaauuugaugcuagcaucucccaggugaaugagaagaucaaccagucucucgccuuuauucggaaaucggacgaacuguuacacaauguaaacgucggaaagagcacgacaaauauaaugaucaccacuauuaucauugugaucauaguuauccugcuacuccugauugcggugggccuuuucuuguauugcaaggcccgcugaggacuagucccuguucccagagcccacuuuuuuuucuuuuuuugaaauaaaauagccugucuuucagaucuaaaaaaaaaaaaaaaaaaaaaaaaaaaaaaaaaaaaaaaaaaaaaaaaaaaaaaaaaaaaaaaaugcaucccccccccccccccccccccccccccccccaaaggcucuuuucagagccaccagaauu

SEQ ID NO: 15806 - RNA, 1840 nt, Artificial Sequence
  mRNA product Design a-2 comprising derived and/or modified sequence from HRSV(Memphis-37)__AIY60640.1__F-del_DSCav1_mut3 (opt4)
gggagaguccgcucagccagguugcagaagcggcuuagcguguguccuaaucuucucucugcguguagguaggccugugccgcaaacaagcuuaccauggagcugcccauccugaagaccaacgccaucaccaccauccuggccgccgugacccugugcuucgccagcagccagaacaucaccgaggaguucuaccagagcaccugcagcgccgugagcaagggcuaccugggcgcccugagaaccggcugguacaccagcgugaucaccaucgagcugagcaacaucaaggagaucaagugcaacggcaccgacgccaaggugaagcugaucaagcaggagcuggacaaguacaagaacgccgugaccgaccugcagcugcugaugcagagcacccccgccgccggcagcggcagcgccaucugcagcggcaucgccgugugcaaggugcugcaccuggagggcgaggugaacaagaucaagaacgcccugcugagcaccaacaaggccguggugagccugagcaacggcgugagcgugcugaccuucaaggugcuggaccugaagaacuacaucgacaagcagcugcugcccauccugaacaagcagagcugcagcauccccaacaucgagaccgugaucgaguuccagcagaagaacaacagacugcuggagaucaccagagaguucagcgugaacgccggcgugaccacccccgugagcaccuacaugcugaccaacagcgagcugcugagccugaucaacgacaugcccaucaccaacgaccagaagaagcugaugagcaacaacgugcagaucgugagacagcagagcuacagcaucaugugcaucaucaaggaggaggugcuggccuacguggugcagcugccccuguacggcgugaucgacacccccugcuggaagcugcacaccagcccccugugcaccaccaacaccaaggagggcagcaacaucugccugaccagaaccgacagaggcugguacugcgacaacgccggcagcgugagcuucuucccccaggccgagaccugcaaggugcagagcaacagaguguucugcgacaccaugaacagccugacccugcccagcgaggugaaccugugcaacaucgacaucuucaaccccaaguacgacugcaagaucaugaccagcaagaccgacgugagcagcagcgugaucaccagccugggcgccaucgugagcugcuacggcaagaccaagugcaccgccagcaacaagaacagaggcaucaucaagaccuucagcaacggcugcgacuacgugagcaacaagggcguggacaccgugagcgugggcaacacccuguacugcgugaacaagcaggagggccagagccuguacgugaagggcgagcccaucaucaacuucuacgacccccugguguuccccagcgacgaguucgacgccagcaucagccaggugaacgagaagaucaaccagagccuggccuucaucagaaagagcgacgagcugcugcacaacgugaacgugggcaagagcaccaccaacaucaugaucaccaccaucaucaucgugaucaucgugauccugcugcugcugaucgccgugggccuguuccuguacugcaaggccagaugaggacuagucccuguucccagagcccacuuuuuuuucuuuuuuugaaauaaaauagccugucuuucagaucuaaaaaaaaaaaaaaaaaaaaaaaaaaaaaaaaaaaaaaaaaaaaaaaaaaaaaaaaaaaaaaaaugcaucccccccccccccccccccccccccccccccaaaggcucuuuucagagccaccagaauu

SEQ ID NO: 15807 - RNA, 1840 nt, Artificial Sequence
  mRNA product Design a-2 comprising derived and/or modified sequence from HRSV(Memphis-37)__AIY60640.1__F-del_DSCav1_mut3 (opt5)
gggagaguccgcucagccagguugcagaagcggcuuagcguguguccuaaucuucucucugcguguagguaggccugugccgcaaacaagcuuaccauggagcugcccauccucaagaccaacgccauuacaacgauccuggcugccgugacccuuugcuucgcgagcucccagaauauuacagaagaguuuuaccaaucuaccuguagcgcugucuccaaaggcuaucugggggcccucagaacaggaugguacaccucuguuaucacaauugaacugagcaacaucaaggagaucaaaugcaauggcaccgacgccaaggugaaacuuauuaagcaggaacuggauaaguauaaaaacgcugugacggaccuccagcugcugaugcaguccaccccugccgcugggucuggaagcgccaucuguuccggcauugcggucugcaaggugcuccaccuggagggggagguuaauaaaaucaagaacgcccuucugagcacaaauaaagcuguggucucucucuccaacggagugagcguucugaccuucaaggugcuugaucugaagaauuacauugacaaacaacuccugccgauccugaacaagcagucuuguuccauucccaauaucgaaacagucaucgaguuucagcagaaaaacaaucggcuccuggaaauuacccgcgaguucagcgugaacgccggcgugacgacaccugucucuaccuauaugcuuacaaauuccgagcugcucagccugaucaacgauaugcccauuaccaacgaccaaaagaaacuuauguccaauaacguucagaucgugagacagcagucuuacagcauuaugugcaucaucaaggaagaggugcuggcuuaugucgugcaacucccucuguacggcguuauugauacccccuguuggaaacugcauacauccccucucugcacgaccaauacaaaggaagggagcaacaucugucugacccggacagaccgcggaugguacugcgauaaugccggcucuguguccuuuuucccgcaggcggagaccuguaagguccagagcaacagaguguuuugcgacacgaugaacucucuuacacugcccagcgaaguuaaucucugcaauauugauaucuucaacccuaaauaugacuguaagauuaugaccuccaaaaccgaugugucuagcuccgucaucacaagccugggggccaucgugucuugcuacggaaagaccaaauguacagcuuccaauaagaaccggggcauuaucaagacguuuagcaaugggugcgacuaugucucuaacaaaggaguggacaccguuuccgugggcaauacacuuuacugugucaacaagcaagagggccagagccuguaugugaaaggggagcccauuaucaacuucuacgauccucucguuuuucccuccgacgaguucgaugccucuauuagccaggugaaugaaaagaucaaccagucccuggcuuuuauucgcaaaucugacgaacugcuccacaaugucaacgugggaaagagcaccacaaauaucaugaucaccacgauuaucauugugaucauuguuauccugcuucugcucaucgccgucggccuguuccuguauugcaaggccagaugaggacuagucccuguucccagagcccacuuuuuuuucuuuuuuugaaauaaaauagccugucuuucagaucuaaaaaaaaaaaaaaaaaaaaaaaaaaaaaaaaaaaaaaaaaaaaaaaaaaaaaaaaaaaaaaaaugcaucccccccccccccccccccccccccccccccaaaggcucuuuucagagccaccagaauu

SEQ ID NO: 15808 - RNA, 1840 nt, Artificial Sequence
  mRNA product Design a-2 comprising derived and/or modified sequence from HRSV(Memphis-37)__AIY60640.1__F-del_DSCav1_mut3 (opt6)
gggagaguccgcucagccagguugcagaagcggcuuagcguguguccuaaucuucucucugcguguagguaggccugugccgcaaacaagcuuaccauggaacuacccauccuaaaaacaaaugccauaaccacaauacucgccgcuguaacacuauguuucgcuaguucacaaaacauuacagaagaauuuuaccaauccacaugcucagcaguaucaaaaggauaccuaggugcacuaagaacaggaugguacacaagcguaauuacaauagaauuauccaauauuaaagaaauaaaauguaacggcacugacgcuaaaguaaaauuaaucaaacaagaacuagacaaauacaaaaacgcaguaacagaccuacaauuacucaugcaauccacacccgcagcaggaucaggcucagccauaugcucagguauagcaguaugcaaaguacuccaccuugaaggagaaguaaacaaaauaaaaaacgcauuacuaucaacaaacaaagcaguaguaucacuaucaaacggagucucugucuuaaccuuuaaaguauuagauuuaaaaaacuacauagacaaacaacuauuaccaauucuaaauaaacaaucauguucuauaccaaauauagaaacaguaauagaauuucaacaaaaaaacaaccgauuacuagaaaucacaagagaauuuucugucaacgccggcguaaccaccccagucucaacauauaugcuaacaaauagugaacucuuauccuuaauaaacgacaugccaauaacaaaugaccaaaaaaaauuaauguccaauaacguacaaauagucagacaacagucauacucaauaauguguaucaucaaagaagaaguauuagcauacguaguucaacuaccccuauacggcguaauagacacaccauguuggaaacuacacacaucacccuuaugcacaaccaauaccaaagaaggaucuaacauaugccuaaccagaacagacagaggcugguacugcgacaacgcagguucagucucauucuucccacaagccgaaacaugcaaaguccaauccaacagaguauuuugcgacacuaugaacucacuaacucuaccuucagaagucaaccuuuguaacauagacauauuuaacccaaaauacgauuguaaaauaaugaccagcaaaacagacgucucaucaagcguaauaacaucacuuggcgcaauagucuccugcuacggaaaaacaaaaugcacagcauccaacaaaaacagaggcaucauaaaaaccuucuccaacggcugcgacuauguaagcaacaaaggugucgauacaguaucaguaggaaacacacuauacugcguaaacaaacaagaaggacaaucacucuacguaaaaggugaaccaaucauaaacuucuacgacccauuaguuuucccaucagacgaauuugaugccuccauaucacaaguaaaugaaaaaauaaaucaaucccuagcauucauacgaaaaucugaugaauuacuucacaaugucaacgucggaaaaucaaccacuaacauaaugauaacaacaauuauaauaguaauaauaguaauacuccuacuauuaauagccgucggucuuuuccuauacugcaaagcacgauaaggacuagucccuguucccagagcccacuuuuuuuucuuuuuuugaaauaaaauagccugucuuucagaucuaaaaaaaaaaaaaaaaaaaaaaaaaaaaaaaaaaaaaaaaaaaaaaaaaaaaaaaaaaaaaaaaugcaucccccccccccccccccccccccccccccccaaaggcucuuuucagagccaccagaauu

SEQ ID NO: 15809 - RNA, 1840 nt, Artificial Sequence
  mRNA product Design a-2 comprising derived and/or modified sequence from HRSV(Memphis-37)__AIY60640.1__F-del_DSCav1_mut3 (opt11)
gggagaguccgcucagccagguugcagaagcggcuuagcguguguccuaaucuucucucugcguguagguaggccugugccgcaaacaagcuuaccauggaacuacccauccucaaaaccaacgccaucaccacaauccuagcugccgucacccuaugcuucgcaagcagccaaaacaucacagaagaauuuuaccaaucaaccugcuccgccgucuccaaaggguaccuaggugcccuccgcaccggcugguacacgucugucauaaccaucgaacucuccaacaucaaagaaaucaaauguaacggaacagacgcaaaagucaaacuaaucaaacaagaacuagacaaauacaaaaacgccguaaccgaccuccaacugcucaugcaauccacccccgcugccggcuccgggagcgcaaucugcucuggaaucgccguaugcaaaguccuccaccucgaaggagaaguaaacaaaaucaaaaacgcgcuccucaguaccaacaaagccgucgucucucuaucaaacggcguaucgguccucaccuucaaaguccucgaccuaaagaacuacauagacaaacaacuccuccccauccuaaacaaacaauccugcucaaucccaaacaucgaaaccgugaucgaguuccaacagaaaaacaaccgccuacucgaaaucacccgagaguucucagucaacgcaggagucaccacccccgucucaacauacaugcuuaccaacagcgaacuccuaucccucaucaacgacaugccaaucacaaacgaccaaaagaaacucaugagcaacaacguccagaucguaagacaacaaagcuacagcaucaugugcaucaucaaagaagaaguacuagcauacgucguccaacucccccucuacggcgucaucgacacccccugcuggaaacuccacaccucaccccucugcacaaccaacaccaaagaaggcuccaauaucugccucacacgcaccgaccgcggcugguacugcgacaacgccggcuccgucuccuucuucccucaagccgaaaccugcaaaguccaguccaacagagucuucugcgacaccaugaacucccuaacacuuccaucagaagucaaccuuuguaacaucgacaucuucaaucccaaauacgacuguaaaauaaugaccucaaaaacugacgugucaagcucaguuaucaccucccuaggggccaucgucuccugcuacggcaaaacaaaaugcaccgcauccaacaaaaaucgcggaaucaucaaaacauucuccaacggaugcgacuacgucucaaacaagggaguagauaccguaagcguuggcaacacccucuacugcguaaacaaacaagaaggccaaucacucuacgucaaaggcgaacccauaaucaacuucuacgacccccucgucuucccuuccgaugaguucgacgccagcaucucccaagucaacgagaaaauaaaccagucacucgcauucauccgcaaaagcgacgaacuccuccacaacguaaacguaggcaaauccacaaccaauaucaugauaaccacaaucaucaucgugaucaucgucauccuccuccuccucauagcugucggacucuuccucuacuguaaagcacgcugaggacuagucccuguucccagagcccacuuuuuuuucuuuuuuugaaauaaaauagccugucuuucagaucuaaaaaaaaaaaaaaaaaaaaaaaaaaaaaaaaaaaaaaaaaaaaaaaaaaaaaaaaaaaaaaaaugcaucccccccccccccccccccccccccccccccaaaggcucuuuucagagccaccagaauu

SEQ ID NO: 15810 - RNA, 1918 nt, Artificial Sequence
  mRNA product Design a-3 comprising derived and/or modified sequence from HRSV(Memphis-37)__AIY60640.1__F-del_DSCav1_mut3 (opt1)
gggagagggcgcuuggcuugcaaggacccugagcugcggcauugaagcacacccaacccaacucgacugaagucagccucacugaaccggaucugagaaucuucucucucugggcuugccagggcucuccgaaccuagcuagcauccucuucaauuccaacuagaaagcuuaccauggagcugcccauccucaagaccaacgccaucaccacgauccuggccgcggugacccugugcuucgccagcucccagaacaucaccgaggaguucuaccagagcacgugcuccgccgucagcaagggcuaccucggcgcccugcgcaccgggugguacaccagcgugaucaccaucgagcuguccaacaucaaggagaucaagugcaacggcaccgacgccaaggugaagcucaucaagcaggagcuggacaaguacaagaacgcggucacggaccugcagcuccugaugcagagcaccccggccgccggcuccgggagcgcgaucugcuccggcaucgccgucugcaaggugcugcaccucgagggcgaggugaacaagaucaagaacgcccugcuguccaccaacaaggccgucgugagccucuccaacggggugagcguccugaccuucaaggugcuggaccucaagaacuacaucgacaagcagcugcugcccauccugaacaagcagagcugcuccauccccaacaucgagaccgucaucgaguuccagcagaagaacaaccgccuccuggagaucacgcgggaguucagcgugaacgcgggcgugaccacccccgucuccaccuacaugcugacgaacagcgagcuccugucccugaucaacgacaugccgaucaccaacgaccagaagaagcucaugagcaacaacgugcagaucgugcgccagcaguccuacagcaucaugugcaucaucaaggaggagguccuggccuacguggugcagcugccccucuacggggucaucgacacccccugcuggaagcugcacaccagcccccugugcacgaccaacaccaaggagggcuccaacaucugccucacccggacggaccgcgggugguacugcgacaacgccggcagcguguccuucuucccgcaggccgagaccugcaagguccagagcaaccggguguucugcgacaccaugaacucccugacccugcccagcgaggugaaccucugcaacaucgacaucuucaaccccaaguacgacugcaagaucaugacguccaagaccgacgucagcuccagcgugaucaccucccugggcgccaucgugagcugcuacgggaagaccaagugcacggcgagcaacaagaaccgcggcaucaucaagaccuucuccaacgggugcgacuacgucagcaacaagggcguggacaccguguccgucggcaacacccuguacugcgugaacaagcaggagggccagagccucuacgugaagggggagcccaucaucaacuucuacgacccgcuggucuuccccuccgacgaguucgacgccagcaucucccaggugaacgagaagaucaaccagagccuggccuucauccggaaguccgacgagcuccugcacaacgugaacgucggcaagagcaccacgaacaucaugaucaccaccaucaucaucgugaucaucgugauccugcugcuccugaucgccgucgggcuguuccucuacugcaaggcccgcugaggacuagucccuguucccagagcccacuuuuuuuucuuuuuuugaaauaaaauagccugucuuucagaucuaaaaaaaaaaaaaaaaaaaaaaaaaaaaaaaaaaaaaaaaaaaaaaaaaaaaaaaaaaaaaaaaugcaucccccccccccccccccccccccccccccccaaaggcucuuuucagagccaccagaauu

SEQ ID NO: 15811 - RNA, 1918 nt, Artificial Sequence
  mRNA product Design a-3 comprising derived and/or modified sequence from HRSV(Memphis-37)__AIY60640.1__F-del_DSCav1_mut3 (opt1)
gggagagggcgcuuggcuugcaaggacccugagcugcggcauugaagcacacccaacccaacucgacugaagucagccucacugaaccggaucugagaaucuucucucucugggcuugccagggcucuccgaaccuagcuagcauccucuucaauuccaacuagaaagcuuaccauggagcugcccauccucaagaccaacgccaucaccacgauccuggccgcggugacccugugcuucgccagcucccagaacaucaccgaggaguucuaccagagcacgugcuccgccgucagcaagggcuaccucggggcccugcgcaccggcugguacaccuccgugaucaccaucgagcugagcaacaucaaggagaucaagugcaacgggaccgacgccaaggugaagcucaucaagcaggagcuggacaaguacaagaacgcggucacggaccugcagcuccugaugcaguccaccccggccgccggcagcggguccgccaucugcagcggcaucgcggugugcaaggugcugcaccucgagggcgaggucaacaagaucaagaacgcccugcuguccaccaacaaggccguggugagccucuccaacggggucagcgugcugaccuucaaggugcuggaccucaagaacuacaucgacaagcagcugcugcccauccucaacaagcaguccugcagcauccccaacaucgagacggucaucgaguuccagcagaagaacaaccggcugcuggagaucacccgcgaguucuccgugaacgccggcgugaccacccccgucagcacguacaugcucaccaacuccgagcugcugagccucaucaacgacaugccgaucaccaacgaccagaagaagcugaugagcaacaacgugcagaucgugcggcagcaguccuacagcaucaugugcaucaucaaggaggagguccuggccuacguggugcagcucccccuguacggggucaucgacacccccugcuggaagcugcacacgagcccccucugcaccaccaacaccaaggagggcuccaacaucugccugacgcgcaccgaccgggggugguacugcgacaacgcgggcuccgugagcuucuucccgcaggccgagaccugcaaggugcaguccaaccgcgucuucugcgacaccaugaacagccugacgcuccccuccgaggugaaccugugcaacaucgacaucuucaaccccaaguacgacugcaagaucaugaccagcaagaccgacgucuccagcuccgugaucaccagccugggcgccaucguguccugcuacgggaagacgaagugcaccgccagcaacaagaaccggggcaucaucaagaccuucuccaacgggugcgacuacgucagcaacaagggcguggacaccguguccgucggcaacacgcucuacugcgugaacaagcaggaggggcagagccuguacgugaagggcgagcccaucaucaacuucuacgacccgcuggucuuccccagcgacgaguucgacgccuccaucagccaggugaacgagaagaucaaccagucccucgcguucauccgcaagagcgacgagcugcugcacaacgugaacgucgggaaguccaccaccaacaucaugaucaccaccaucaucaucgugaucaucgugauccuccugcugcucaucgccgucggccuguuccuguacugcaaggcccggugaggacuagucccuguucccagagcccacuuuuuuuucuuuuuuugaaauaaaauagccugucuuucagaucuaaaaaaaaaaaaaaaaaaaaaaaaaaaaaaaaaaaaaaaaaaaaaaaaaaaaaaaaaaaaaaaaugcaucccccccccccccccccccccccccccccccaaaggcucuuuucagagccaccagaauu

SEQ ID NO: 15812 - RNA, 1918 nt, Artificial Sequence
  mRNA product Design a-3 comprising derived and/or modified sequence from HRSV(Memphis-37)__AIY60640.1__F-del_DSCav1_mut3 (opt2)
gggagagggcgcuuggcuugcaaggacccugagcugcggcauugaagcacacccaacccaacucgacugaagucagccucacugaaccggaucugagaaucuucucucucugggcuugccagggcucuccgaaccuagcuagcauccucuucaauuccaacuagaaagcuuaccauggagcuccccauccucaagaccaacgccaucaccaccauccucgccgccgucacccucugcuucgccuccucccagaacaucaccgaggaguucuaccaguccaccugcuccgccgucuccaagggcuaccucggcgcccuccgcaccggcugguacaccuccgucaucaccaucgagcucuccaacaucaaggagaucaagugcaacggcaccgacgccaaggucaagcucaucaagcaggagcucgacaaguacaagaacgccgucaccgaccuccagcuccucaugcaguccacccccgccgccggcuccggcuccgccaucugcuccggcaucgccgucugcaagguccuccaccucgagggcgaggucaacaagaucaagaacgcccuccucuccaccaacaaggccgucgucucccucuccaacggcgucuccguccucaccuucaagguccucgaccucaagaacuacaucgacaagcagcuccuccccauccucaacaagcaguccugcuccauccccaacaucgagaccgucaucgaguuccagcagaagaacaaccgccuccucgagaucacccgcgaguucuccgucaacgccggcgucaccacccccgucuccaccuacaugcucaccaacuccgagcuccucucccucaucaacgacaugcccaucaccaacgaccagaagaagcucauguccaacaacguccagaucguccgccagcaguccuacuccaucaugugcaucaucaaggaggagguccucgccuacgucguccagcucccccucuacggcgucaucgacacccccugcuggaagcuccacaccuccccccucugcaccaccaacaccaaggagggcuccaacaucugccucacccgcaccgaccgcggcugguacugcgacaacgccggcuccgucuccuucuucccccaggccgagaccugcaagguccaguccaaccgcgucuucugcgacaccaugaacucccucacccuccccuccgaggucaaccucugcaacaucgacaucuucaaccccaaguacgacugcaagaucaugaccuccaagaccgacgucuccuccuccgucaucaccucccucggcgccaucgucuccugcuacggcaagaccaagugcaccgccuccaacaagaaccgcggcaucaucaagaccuucuccaacggcugcgacuacgucuccaacaagggcgucgacaccgucuccgucggcaacacccucuacugcgucaacaagcaggagggccagucccucuacgucaagggcgagcccaucaucaacuucuacgacccccucgucuuccccuccgacgaguucgacgccuccaucucccaggucaacgagaagaucaaccagucccucgccuucauccgcaaguccgacgagcuccuccacaacgucaacgucggcaaguccaccaccaacaucaugaucaccaccaucaucaucgucaucaucgucauccuccuccuccucaucgccgucggccucuuccucuacugcaaggcccgcugaggacuagucccuguucccagagcccacuuuuuuuucuuuuuuugaaauaaaauagccugucuuucagaucuaaaaaaaaaaaaaaaaaaaaaaaaaaaaaaaaaaaaaaaaaaaaaaaaaaaaaaaaaaaaaaaaugcaucccccccccccccccccccccccccccccccaaaggcucuuuucagagccaccagaauu

SEQ ID NO: 15813 - RNA, 1918 nt, Artificial Sequence
  mRNA product Design a-3 comprising derived and/or modified sequence from HRSV(Memphis-37)__AIY60640.1__F-del_DSCav1_mut3 (opt3)
gggagagggcgcuuggcuugcaaggacccugagcugcggcauugaagcacacccaacccaacucgacugaagucagccucacugaaccggaucugagaaucuucucucucugggcuugccagggcucuccgaaccuagcuagcauccucuucaauuccaacuagaaagcuuaccauggagcugcccauccucaagaccaacgccauuacaacuauacuugcugcagugacgcugugcuucgccagcucccagaauaucaccgaagaguuuuaccaaucuacauguucagcggucaguaaaggcuauuugggggcuuuaagaacuggaugguacaccagcguuauuacaaucgaacuguccaacauuaaggagaucaaaugcaaugguaccgacgccaaggugaaacuaauaaagcaggaacucgauaaguauaaaaacgcaguaacugaccugcagcuucugaugcagucuacuccugccgcuggcucggggucagcaaucuguagcggaauugccgugugcaaggucuugcaccucgagggcgaggugaauaaaaucaagaacgcucugcugaguaccaauaaagccguugugucccucucuaacggugucagcguguuaacguucaagguacuggaucuuaagaauuacauugacaaacaauugcugccaauccuaaacaagcaguccuguucaauaccgaauauugaaacuguuaucgaguuucagcagaaaaacaauaggcuccuggaaauuacccgggaguucagugugaacgcgggggucacaacucccgugagcaccuauaugcuuacaaauucugagcuguugucccucaucaacgauaugccuaucaccaacgaccaaaagaaacugaugucaaauaacgugcagauuguccgccagcagagcuacaguauaaugugcaucauuaaggaagagguuuuagcauaugugguacaacugccacucuacggagugaucgauacgcccuguuggaaacuucauacuucuccucugugcacaaccaauacuaaggaaggcuccaacauauguuugacacgaaccgaccguggcugguacugcgauaaugccgggagcgucucguuuuucccacaggcugagacguguaaggugcagucuaacagaguuuucugcgacaccaugaacucccuaacacugcccucagaagugaaucucugcaauauugauaucuucaacccuaaauaugacuguaagaucaugacaaguaaaaccgaugucagcuccucugugauuacaagccugggagccaucguaucaugcuacgguaagacuaaauguaccgcaaguaauaagaacaggggcauuauaaagacauuuuccaaugggugcgacuauguuagcaacaaaggaguggacaccgucucugugggcaauacucuuuacugugucaacaagcaagagggucagucacuguaugugaaaggggagccaaucauuaacuucuacgauccguugguuuuucccagugacgaauuugaugcuagcaucucccaggugaaugagaagaucaaccagucucucgccuuuauucggaaaucggacgaacuguuacacaauguaaacgucggaaagagcacgacaaauauaaugaucaccacuauuaucauugugaucauaguuauccugcuacuccugauugcggugggccuuuucuuguauugcaaggcccgcugaggacuagucccuguucccagagcccacuuuuuuuucuuuuuuugaaauaaaauagccugucuuucagaucuaaaaaaaaaaaaaaaaaaaaaaaaaaaaaaaaaaaaaaaaaaaaaaaaaaaaaaaaaaaaaaaaugcaucccccccccccccccccccccccccccccccaaaggcucuuuucagagccaccagaauu

SEQ ID NO: 15814 - RNA, 1918 nt, Artificial Sequence
  mRNA product Design a-3 comprising derived and/or modified sequence from HRSV(Memphis-37)__AIY60640.1__F-del_DSCav1_mut3 (opt4)
gggagagggcgcuuggcuugcaaggacccugagcugcggcauugaagcacacccaacccaacucgacugaagucagccucacugaaccggaucugagaaucuucucucucugggcuugccagggcucuccgaaccuagcuagcauccucuucaauuccaacuagaaagcuuaccauggagcugcccauccugaagaccaacgccaucaccaccauccuggccgccgugacccugugcuucgccagcagccagaacaucaccgaggaguucuaccagagcaccugcagcgccgugagcaagggcuaccugggcgcccugagaaccggcugguacaccagcgugaucaccaucgagcugagcaacaucaaggagaucaagugcaacggcaccgacgccaaggugaagcugaucaagcaggagcuggacaaguacaagaacgccgugaccgaccugcagcugcugaugcagagcacccccgccgccggcagcggcagcgccaucugcagcggcaucgccgugugcaaggugcugcaccuggagggcgaggugaacaagaucaagaacgcccugcugagcaccaacaaggccguggugagccugagcaacggcgugagcgugcugaccuucaaggugcuggaccugaagaacuacaucgacaagcagcugcugcccauccugaacaagcagagcugcagcauccccaacaucgagaccgugaucgaguuccagcagaagaacaacagacugcuggagaucaccagagaguucagcgugaacgccggcgugaccacccccgugagcaccuacaugcugaccaacagcgagcugcugagccugaucaacgacaugcccaucaccaacgaccagaagaagcugaugagcaacaacgugcagaucgugagacagcagagcuacagcaucaugugcaucaucaaggaggaggugcuggccuacguggugcagcugccccuguacggcgugaucgacacccccugcuggaagcugcacaccagcccccugugcaccaccaacaccaaggagggcagcaacaucugccugaccagaaccgacagaggcugguacugcgacaacgccggcagcgugagcuucuucccccaggccgagaccugcaaggugcagagcaacagaguguucugcgacaccaugaacagccugacccugcccagcgaggugaaccugugcaacaucgacaucuucaaccccaaguacgacugcaagaucaugaccagcaagaccgacgugagcagcagcgugaucaccagccugggcgccaucgugagcugcuacggcaagaccaagugcaccgccagcaacaagaacagaggcaucaucaagaccuucagcaacggcugcgacuacgugagcaacaagggcguggacaccgugagcgugggcaacacccuguacugcgugaacaagcaggagggccagagccuguacgugaagggcgagcccaucaucaacuucuacgacccccugguguuccccagcgacgaguucgacgccagcaucagccaggugaacgagaagaucaaccagagccuggccuucaucagaaagagcgacgagcugcugcacaacgugaacgugggcaagagcaccaccaacaucaugaucaccaccaucaucaucgugaucaucgugauccugcugcugcugaucgccgugggccuguuccuguacugcaaggccagaugaggacuagucccuguucccagagcccacuuuuuuuucuuuuuuugaaauaaaauagccugucuuucagaucuaaaaaaaaaaaaaaaaaaaaaaaaaaaaaaaaaaaaaaaaaaaaaaaaaaaaaaaaaaaaaaaaugcaucccccccccccccccccccccccccccccccaaaggcucuuuucagagccaccagaauu

SEQ ID NO: 15815 - RNA, 1918 nt, Artificial Sequence
  mRNA product Design a-3 comprising derived and/or modified sequence from HRSV(Memphis-37)__AIY60640.1__F-del_DSCav1_mut3 (opt5)
gggagagggcgcuuggcuugcaaggacccugagcugcggcauugaagcacacccaacccaacucgacugaagucagccucacugaaccggaucugagaaucuucucucucugggcuugccagggcucuccgaaccuagcuagcauccucuucaauuccaacuagaaagcuuaccauggagcugcccauccucaagaccaacgccauuacaacgauccuggcugccgugacccuuugcuucgcgagcucccagaauauuacagaagaguuuuaccaaucuaccuguagcgcugucuccaaaggcuaucugggggcccucagaacaggaugguacaccucuguuaucacaauugaacugagcaacaucaaggagaucaaaugcaauggcaccgacgccaaggugaaacuuauuaagcaggaacuggauaaguauaaaaacgcugugacggaccuccagcugcugaugcaguccaccccugccgcugggucuggaagcgccaucuguuccggcauugcggucugcaaggugcuccaccuggagggggagguuaauaaaaucaagaacgcccuucugagcacaaauaaagcuguggucucucucuccaacggagugagcguucugaccuucaaggugcuugaucugaagaauuacauugacaaacaacuccugccgauccugaacaagcagucuuguuccauucccaauaucgaaacagucaucgaguuucagcagaaaaacaaucggcuccuggaaauuacccgcgaguucagcgugaacgccggcgugacgacaccugucucuaccuauaugcuuacaaauuccgagcugcucagccugaucaacgauaugcccauuaccaacgaccaaaagaaacuuauguccaauaacguucagaucgugagacagcagucuuacagcauuaugugcaucaucaaggaagaggugcuggcuuaugucgugcaacucccucuguacggcguuauugauacccccuguuggaaacugcauacauccccucucugcacgaccaauacaaaggaagggagcaacaucugucugacccggacagaccgcggaugguacugcgauaaugccggcucuguguccuuuuucccgcaggcggagaccuguaagguccagagcaacagaguguuuugcgacacgaugaacucucuuacacugcccagcgaaguuaaucucugcaauauugauaucuucaacccuaaauaugacuguaagauuaugaccuccaaaaccgaugugucuagcuccgucaucacaagccugggggccaucgugucuugcuacggaaagaccaaauguacagcuuccaauaagaaccggggcauuaucaagacguuuagcaaugggugcgacuaugucucuaacaaaggaguggacaccguuuccgugggcaauacacuuuacugugucaacaagcaagagggccagagccuguaugugaaaggggagcccauuaucaacuucuacgauccucucguuuuucccuccgacgaguucgaugccucuauuagccaggugaaugaaaagaucaaccagucccuggcuuuuauucgcaaaucugacgaacugcuccacaaugucaacgugggaaagagcaccacaaauaucaugaucaccacgauuaucauugugaucauuguuauccugcuucugcucaucgccgucggccuguuccuguauugcaaggccagaugaggacuagucccuguucccagagcccacuuuuuuuucuuuuuuugaaauaaaauagccugucuuucagaucuaaaaaaaaaaaaaaaaaaaaaaaaaaaaaaaaaaaaaaaaaaaaaaaaaaaaaaaaaaaaaaaaugcaucccccccccccccccccccccccccccccccaaaggcucuuuucagagccaccagaauu

SEQ ID NO: 15816 - RNA, 1918 nt, Artificial Sequence
  mRNA product Design a-3 comprising derived and/or modified sequence from HRSV(Memphis-37)__AIY60640.1__F-del_DSCav1_mut3 (opt6)
gggagagggcgcuuggcuugcaaggacccugagcugcggcauugaagcacacccaacccaacucgacugaagucagccucacugaaccggaucugagaaucuucucucucugggcuugccagggcucuccgaaccuagcuagcauccucuucaauuccaacuagaaagcuuaccauggaacuacccauccuaaaaacaaaugccauaaccacaauacucgccgcuguaacacuauguuucgcuaguucacaaaacauuacagaagaauuuuaccaauccacaugcucagcaguaucaaaaggauaccuaggugcacuaagaacaggaugguacacaagcguaauuacaauagaauuauccaauauuaaagaaauaaaauguaacggcacugacgcuaaaguaaaauuaaucaaacaagaacuagacaaauacaaaaacgcaguaacagaccuacaauuacucaugcaauccacacccgcagcaggaucaggcucagccauaugcucagguauagcaguaugcaaaguacuccaccuugaaggagaaguaaacaaaauaaaaaacgcauuacuaucaacaaacaaagcaguaguaucacuaucaaacggagucucugucuuaaccuuuaaaguauuagauuuaaaaaacuacauagacaaacaacuauuaccaauucuaaauaaacaaucauguucuauaccaaauauagaaacaguaauagaauuucaacaaaaaaacaaccgauuacuagaaaucacaagagaauuuucugucaacgccggcguaaccaccccagucucaacauauaugcuaacaaauagugaacucuuauccuuaauaaacgacaugccaauaacaaaugaccaaaaaaaauuaauguccaauaacguacaaauagucagacaacagucauacucaauaauguguaucaucaaagaagaaguauuagcauacguaguucaacuaccccuauacggcguaauagacacaccauguuggaaacuacacacaucacccuuaugcacaaccaauaccaaagaaggaucuaacauaugccuaaccagaacagacagaggcugguacugcgacaacgcagguucagucucauucuucccacaagccgaaacaugcaaaguccaauccaacagaguauuuugcgacacuaugaacucacuaacucuaccuucagaagucaaccuuuguaacauagacauauuuaacccaaaauacgauuguaaaauaaugaccagcaaaacagacgucucaucaagcguaauaacaucacuuggcgcaauagucuccugcuacggaaaaacaaaaugcacagcauccaacaaaaacagaggcaucauaaaaaccuucuccaacggcugcgacuauguaagcaacaaaggugucgauacaguaucaguaggaaacacacuauacugcguaaacaaacaagaaggacaaucacucuacguaaaaggugaaccaaucauaaacuucuacgacccauuaguuuucccaucagacgaauuugaugccuccauaucacaaguaaaugaaaaaauaaaucaaucccuagcauucauacgaaaaucugaugaauuacuucacaaugucaacgucggaaaaucaaccacuaacauaaugauaacaacaauuauaauaguaauaauaguaauacuccuacuauuaauagccgucggucuuuuccuauacugcaaagcacgauaaggacuagucccuguucccagagcccacuuuuuuuucuuuuuuugaaauaaaauagccugucuuucagaucuaaaaaaaaaaaaaaaaaaaaaaaaaaaaaaaaaaaaaaaaaaaaaaaaaaaaaaaaaaaaaaaaugcaucccccccccccccccccccccccccccccccaaaggcucuuuucagagccaccagaauu

SEQ ID NO: 15817 - RNA, 1918 nt, Artificial Sequence
  mRNA product Design a-3 comprising derived and/or modified sequence from HRSV(Memphis-37)__AIY60640.1__F-del_DSCav1_mut3 (opt11)
gggagagggcgcuuggcuugcaaggacccugagcugcggcauugaagcacacccaacccaacucgacugaagucagccucacugaaccggaucugagaaucuucucucucugggcuugccagggcucuccgaaccuagcuagcauccucuucaauuccaacuagaaagcuuaccauggaacuacccauccucaaaaccaacgccaucaccacaauccuagcugccgucacccuaugcuucgcaagcagccaaaacaucacagaagaauuuuaccaaucaaccugcuccgccgucuccaaaggguaccuaggugcccuccgcaccggcugguacacgucugucauaaccaucgaacucuccaacaucaaagaaaucaaauguaacggaacagacgcaaaagucaaacuaaucaaacaagaacuagacaaauacaaaaacgccguaaccgaccuccaacugcucaugcaauccacccccgcugccggcuccgggagcgcaaucugcucuggaaucgccguaugcaaaguccuccaccucgaaggagaaguaaacaaaaucaaaaacgcgcuccucaguaccaacaaagccgucgucucucuaucaaacggcguaucgguccucaccuucaaaguccucgaccuaaagaacuacauagacaaacaacuccuccccauccuaaacaaacaauccugcucaaucccaaacaucgaaaccgugaucgaguuccaacagaaaaacaaccgccuacucgaaaucacccgagaguucucagucaacgcaggagucaccacccccgucucaacauacaugcuuaccaacagcgaacuccuaucccucaucaacgacaugccaaucacaaacgaccaaaagaaacucaugagcaacaacguccagaucguaagacaacaaagcuacagcaucaugugcaucaucaaagaagaaguacuagcauacgucguccaacucccccucuacggcgucaucgacacccccugcuggaaacuccacaccucaccccucugcacaaccaacaccaaagaaggcuccaauaucugccucacacgcaccgaccgcggcugguacugcgacaacgccggcuccgucuccuucuucccucaagccgaaaccugcaaaguccaguccaacagagucuucugcgacaccaugaacucccuaacacuuccaucagaagucaaccuuuguaacaucgacaucuucaaucccaaauacgacuguaaaauaaugaccucaaaaacugacgugucaagcucaguuaucaccucccuaggggccaucgucuccugcuacggcaaaacaaaaugcaccgcauccaacaaaaaucgcggaaucaucaaaacauucuccaacggaugcgacuacgucucaaacaagggaguagauaccguaagcguuggcaacacccucuacugcguaaacaaacaagaaggccaaucacucuacgucaaaggcgaacccauaaucaacuucuacgacccccucgucuucccuuccgaugaguucgacgccagcaucucccaagucaacgagaaaauaaaccagucacucgcauucauccgcaaaagcgacgaacuccuccacaacguaaacguaggcaaauccacaaccaauaucaugauaaccacaaucaucaucgugaucaucgucauccuccuccuccucauagcugucggacucuuccucuacuguaaagcacgcugaggacuagucccuguucccagagcccacuuuuuuuucuuuuuuugaaauaaaauagccugucuuucagaucuaaaaaaaaaaaaaaaaaaaaaaaaaaaaaaaaaaaaaaaaaaaaaaaaaaaaaaaaaaaaaaaaugcaucccccccccccccccccccccccccccccccaaaggcucuuuucagagccaccagaauu

SEQ ID NO: 15818 - RNA, 1867 nt, Artificial Sequence
  mRNA product Design a-4 comprising derived and/or modified sequence from HRSV(Memphis-37)__AIY60640.1__F-del_DSCav1_mut3 (opt1)
gggagacuccugucgggcggaaguaggaggaguagaguuuaaaaacaguacucuuuuuccgguucgggacguaguugaagcaacgacaagccggauaaccgcucuugagacaggaagcuuaccauggagcugcccauccucaagaccaacgccaucaccacgauccuggccgcggugacccugugcuucgccagcucccagaacaucaccgaggaguucuaccagagcacgugcuccgccgucagcaagggcuaccucggcgcccugcgcaccgggugguacaccagcgugaucaccaucgagcuguccaacaucaaggagaucaagugcaacggcaccgacgccaaggugaagcucaucaagcaggagcuggacaaguacaagaacgcggucacggaccugcagcuccugaugcagagcaccccggccgccggcuccgggagcgcgaucugcuccggcaucgccgucugcaaggugcugcaccucgagggcgaggugaacaagaucaagaacgcccugcuguccaccaacaaggccgucgugagccucuccaacggggugagcguccugaccuucaaggugcuggaccucaagaacuacaucgacaagcagcugcugcccauccugaacaagcagagcugcuccauccccaacaucgagaccgucaucgaguuccagcagaagaacaaccgccuccuggagaucacgcgggaguucagcgugaacgcgggcgugaccacccccgucuccaccuacaugcugacgaacagcgagcuccugucccugaucaacgacaugccgaucaccaacgaccagaagaagcucaugagcaacaacgugcagaucgugcgccagcaguccuacagcaucaugugcaucaucaaggaggagguccuggccuacguggugcagcugccccucuacggggucaucgacacccccugcuggaagcugcacaccagcccccugugcacgaccaacaccaaggagggcuccaacaucugccucacccggacggaccgcgggugguacugcgacaacgccggcagcguguccuucuucccgcaggccgagaccugcaagguccagagcaaccggguguucugcgacaccaugaacucccugacccugcccagcgaggugaaccucugcaacaucgacaucuucaaccccaaguacgacugcaagaucaugacguccaagaccgacgucagcuccagcgugaucaccucccugggcgccaucgugagcugcuacgggaagaccaagugcacggcgagcaacaagaaccgcggcaucaucaagaccuucuccaacgggugcgacuacgucagcaacaagggcguggacaccguguccgucggcaacacccuguacugcgugaacaagcaggagggccagagccucuacgugaagggggagcccaucaucaacuucuacgacccgcuggucuuccccuccgacgaguucgacgccagcaucucccaggugaacgagaagaucaaccagagccuggccuucauccggaaguccgacgagcuccugcacaacgugaacgucggcaagagcaccacgaacaucaugaucaccaccaucaucaucgugaucaucgugauccugcugcuccugaucgccgucgggcuguuccucuacugcaaggcccgcugaggacuagucccuguucccagagcccacuuuuuuuucuuuuuuugaaauaaaauagccugucuuucagaucuaaaaaaaaaaaaaaaaaaaaaaaaaaaaaaaaaaaaaaaaaaaaaaaaaaaaaaaaaaaaaaaaugcaucccccccccccccccccccccccccccccccaaaggcucuuuucagagccaccagaauu

SEQ ID NO: 15819 - RNA, 1867 nt, Artificial Sequence
  mRNA product Design a-4 comprising derived and/or modified sequence from HRSV(Memphis-37)__AIY60640.1__F-del_DSCav1_mut3 (opt1)
gggagacuccugucgggcggaaguaggaggaguagaguuuaaaaacaguacucuuuuuccgguucgggacguaguugaagcaacgacaagccggauaaccgcucuugagacaggaagcuuaccauggagcugcccauccucaagaccaacgccaucaccacgauccuggccgcggugacccugugcuucgccagcucccagaacaucaccgaggaguucuaccagagcacgugcuccgccgucagcaagggcuaccucggggcccugcgcaccggcugguacaccuccgugaucaccaucgagcugagcaacaucaaggagaucaagugcaacgggaccgacgccaaggugaagcucaucaagcaggagcuggacaaguacaagaacgcggucacggaccugcagcuccugaugcaguccaccccggccgccggcagcggguccgccaucugcagcggcaucgcggugugcaaggugcugcaccucgagggcgaggucaacaagaucaagaacgcccugcuguccaccaacaaggccguggugagccucuccaacggggucagcgugcugaccuucaaggugcuggaccucaagaacuacaucgacaagcagcugcugcccauccucaacaagcaguccugcagcauccccaacaucgagacggucaucgaguuccagcagaagaacaaccggcugcuggagaucacccgcgaguucuccgugaacgccggcgugaccacccccgucagcacguacaugcucaccaacuccgagcugcugagccucaucaacgacaugccgaucaccaacgaccagaagaagcugaugagcaacaacgugcagaucgugcggcagcaguccuacagcaucaugugcaucaucaaggaggagguccuggccuacguggugcagcucccccuguacggggucaucgacacccccugcuggaagcugcacacgagcccccucugcaccaccaacaccaaggagggcuccaacaucugccugacgcgcaccgaccgggggugguacugcgacaacgcgggcuccgugagcuucuucccgcaggccgagaccugcaaggugcaguccaaccgcgucuucugcgacaccaugaacagccugacgcuccccuccgaggugaaccugugcaacaucgacaucuucaaccccaaguacgacugcaagaucaugaccagcaagaccgacgucuccagcuccgugaucaccagccugggcgccaucguguccugcuacgggaagacgaagugcaccgccagcaacaagaaccggggcaucaucaagaccuucuccaacgggugcgacuacgucagcaacaagggcguggacaccguguccgucggcaacacgcucuacugcgugaacaagcaggaggggcagagccuguacgugaagggcgagcccaucaucaacuucuacgacccgcuggucuuccccagcgacgaguucgacgccuccaucagccaggugaacgagaagaucaaccagucccucgcguucauccgcaagagcgacgagcugcugcacaacgugaacgucgggaaguccaccaccaacaucaugaucaccaccaucaucaucgugaucaucgugauccuccugcugcucaucgccgucggccuguuccuguacugcaaggcccggugaggacuagucccuguucccagagcccacuuuuuuuucuuuuuuugaaauaaaauagccugucuuucagaucuaaaaaaaaaaaaaaaaaaaaaaaaaaaaaaaaaaaaaaaaaaaaaaaaaaaaaaaaaaaaaaaaugcaucccccccccccccccccccccccccccccccaaaggcucuuuucagagccaccagaauu

SEQ ID NO: 15820 - RNA, 1867 nt, Artificial Sequence
  mRNA product Design a-4 comprising derived and/or modified sequence from HRSV(Memphis-37)__AIY60640.1__F-del_DSCav1_mut3 (opt2)
gggagacuccugucgggcggaaguaggaggaguagaguuuaaaaacaguacucuuuuuccgguucgggacguaguugaagcaacgacaagccggauaaccgcucuugagacaggaagcuuaccauggagcuccccauccucaagaccaacgccaucaccaccauccucgccgccgucacccucugcuucgccuccucccagaacaucaccgaggaguucuaccaguccaccugcuccgccgucuccaagggcuaccucggcgcccuccgcaccggcugguacaccuccgucaucaccaucgagcucuccaacaucaaggagaucaagugcaacggcaccgacgccaaggucaagcucaucaagcaggagcucgacaaguacaagaacgccgucaccgaccuccagcuccucaugcaguccacccccgccgccggcuccggcuccgccaucugcuccggcaucgccgucugcaagguccuccaccucgagggcgaggucaacaagaucaagaacgcccuccucuccaccaacaaggccgucgucucccucuccaacggcgucuccguccucaccuucaagguccucgaccucaagaacuacaucgacaagcagcuccuccccauccucaacaagcaguccugcuccauccccaacaucgagaccgucaucgaguuccagcagaagaacaaccgccuccucgagaucacccgcgaguucuccgucaacgccggcgucaccacccccgucuccaccuacaugcucaccaacuccgagcuccucucccucaucaacgacaugcccaucaccaacgaccagaagaagcucauguccaacaacguccagaucguccgccagcaguccuacuccaucaugugcaucaucaaggaggagguccucgccuacgucguccagcucccccucuacggcgucaucgacacccccugcuggaagcuccacaccuccccccucugcaccaccaacaccaaggagggcuccaacaucugccucacccgcaccgaccgcggcugguacugcgacaacgccggcuccgucuccuucuucccccaggccgagaccugcaagguccaguccaaccgcgucuucugcgacaccaugaacucccucacccuccccuccgaggucaaccucugcaacaucgacaucuucaaccccaaguacgacugcaagaucaugaccuccaagaccgacgucuccuccuccgucaucaccucccucggcgccaucgucuccugcuacggcaagaccaagugcaccgccuccaacaagaaccgcggcaucaucaagaccuucuccaacggcugcgacuacgucuccaacaagggcgucgacaccgucuccgucggcaacacccucuacugcgucaacaagcaggagggccagucccucuacgucaagggcgagcccaucaucaacuucuacgacccccucgucuuccccuccgacgaguucgacgccuccaucucccaggucaacgagaagaucaaccagucccucgccuucauccgcaaguccgacgagcuccuccacaacgucaacgucggcaaguccaccaccaacaucaugaucaccaccaucaucaucgucaucaucgucauccuccuccuccucaucgccgucggccucuuccucuacugcaaggcccgcugaggacuagucccuguucccagagcccacuuuuuuuucuuuuuuugaaauaaaauagccugucuuucagaucuaaaaaaaaaaaaaaaaaaaaaaaaaaaaaaaaaaaaaaaaaaaaaaaaaaaaaaaaaaaaaaaaugcaucccccccccccccccccccccccccccccccaaaggcucuuuucagagccaccagaauu

SEQ ID NO: 15821 - RNA, 1867 nt, Artificial Sequence
  mRNA product Design a-4 comprising derived and/or modified sequence from HRSV(Memphis-37)__AIY60640.1__F-del_DSCav1_mut3 (opt3)
gggagacuccugucgggcggaaguaggaggaguagaguuuaaaaacaguacucuuuuuccgguucgggacguaguugaagcaacgacaagccggauaaccgcucuugagacaggaagcuuaccauggagcugcccauccucaagaccaacgccauuacaacuauacuugcugcagugacgcugugcuucgccagcucccagaauaucaccgaagaguuuuaccaaucuacauguucagcggucaguaaaggcuauuugggggcuuuaagaacuggaugguacaccagcguuauuacaaucgaacuguccaacauuaaggagaucaaaugcaaugguaccgacgccaaggugaaacuaauaaagcaggaacucgauaaguauaaaaacgcaguaacugaccugcagcuucugaugcagucuacuccugccgcuggcucggggucagcaaucuguagcggaauugccgugugcaaggucuugcaccucgagggcgaggugaauaaaaucaagaacgcucugcugaguaccaauaaagccguugugucccucucuaacggugucagcguguuaacguucaagguacuggaucuuaagaauuacauugacaaacaauugcugccaauccuaaacaagcaguccuguucaauaccgaauauugaaacuguuaucgaguuucagcagaaaaacaauaggcuccuggaaauuacccgggaguucagugugaacgcgggggucacaacucccgugagcaccuauaugcuuacaaauucugagcuguugucccucaucaacgauaugccuaucaccaacgaccaaaagaaacugaugucaaauaacgugcagauuguccgccagcagagcuacaguauaaugugcaucauuaaggaagagguuuuagcauaugugguacaacugccacucuacggagugaucgauacgcccuguuggaaacuucauacuucuccucugugcacaaccaauacuaaggaaggcuccaacauauguuugacacgaaccgaccguggcugguacugcgauaaugccgggagcgucucguuuuucccacaggcugagacguguaaggugcagucuaacagaguuuucugcgacaccaugaacucccuaacacugcccucagaagugaaucucugcaauauugauaucuucaacccuaaauaugacuguaagaucaugacaaguaaaaccgaugucagcuccucugugauuacaagccugggagccaucguaucaugcuacgguaagacuaaauguaccgcaaguaauaagaacaggggcauuauaaagacauuuuccaaugggugcgacuauguuagcaacaaaggaguggacaccgucucugugggcaauacucuuuacugugucaacaagcaagagggucagucacuguaugugaaaggggagccaaucauuaacuucuacgauccguugguuuuucccagugacgaauuugaugcuagcaucucccaggugaaugagaagaucaaccagucucucgccuuuauucggaaaucggacgaacuguuacacaauguaaacgucggaaagagcacgacaaauauaaugaucaccacuauuaucauugugaucauaguuauccugcuacuccugauugcggugggccuuuucuuguauugcaaggcccgcugaggacuagucccuguucccagagcccacuuuuuuuucuuuuuuugaaauaaaauagccugucuuucagaucuaaaaaaaaaaaaaaaaaaaaaaaaaaaaaaaaaaaaaaaaaaaaaaaaaaaaaaaaaaaaaaaaugcaucccccccccccccccccccccccccccccccaaaggcucuuuucagagccaccagaauu

SEQ ID NO: 15822 - RNA, 1867 nt, Artificial Sequence
  mRNA product Design a-4 comprising derived and/or modified sequence from HRSV(Memphis-37)__AIY60640.1__F-del_DSCav1_mut3 (opt4)
gggagacuccugucgggcggaaguaggaggaguagaguuuaaaaacaguacucuuuuuccgguucgggacguaguugaagcaacgacaagccggauaaccgcucuugagacaggaagcuuaccauggagcugcccauccugaagaccaacgccaucaccaccauccuggccgccgugacccugugcuucgccagcagccagaacaucaccgaggaguucuaccagagcaccugcagcgccgugagcaagggcuaccugggcgcccugagaaccggcugguacaccagcgugaucaccaucgagcugagcaacaucaaggagaucaagugcaacggcaccgacgccaaggugaagcugaucaagcaggagcuggacaaguacaagaacgccgugaccgaccugcagcugcugaugcagagcacccccgccgccggcagcggcagcgccaucugcagcggcaucgccgugugcaaggugcugcaccuggagggcgaggugaacaagaucaagaacgcccugcugagcaccaacaaggccguggugagccugagcaacggcgugagcgugcugaccuucaaggugcuggaccugaagaacuacaucgacaagcagcugcugcccauccugaacaagcagagcugcagcauccccaacaucgagaccgugaucgaguuccagcagaagaacaacagacugcuggagaucaccagagaguucagcgugaacgccggcgugaccacccccgugagcaccuacaugcugaccaacagcgagcugcugagccugaucaacgacaugcccaucaccaacgaccagaagaagcugaugagcaacaacgugcagaucgugagacagcagagcuacagcaucaugugcaucaucaaggaggaggugcuggccuacguggugcagcugccccuguacggcgugaucgacacccccugcuggaagcugcacaccagcccccugugcaccaccaacaccaaggagggcagcaacaucugccugaccagaaccgacagaggcugguacugcgacaacgccggcagcgugagcuucuucccccaggccgagaccugcaaggugcagagcaacagaguguucugcgacaccaugaacagccugacccugcccagcgaggugaaccugugcaacaucgacaucuucaaccccaaguacgacugcaagaucaugaccagcaagaccgacgugagcagcagcgugaucaccagccugggcgccaucgugagcugcuacggcaagaccaagugcaccgccagcaacaagaacagaggcaucaucaagaccuucagcaacggcugcgacuacgugagcaacaagggcguggacaccgugagcgugggcaacacccuguacugcgugaacaagcaggagggccagagccuguacgugaagggcgagcccaucaucaacuucuacgacccccugguguuccccagcgacgaguucgacgccagcaucagccaggugaacgagaagaucaaccagagccuggccuucaucagaaagagcgacgagcugcugcacaacgugaacgugggcaagagcaccaccaacaucaugaucaccaccaucaucaucgugaucaucgugauccugcugcugcugaucgccgugggccuguuccuguacugcaaggccagaugaggacuagucccuguucccagagcccacuuuuuuuucuuuuuuugaaauaaaauagccugucuuucagaucuaaaaaaaaaaaaaaaaaaaaaaaaaaaaaaaaaaaaaaaaaaaaaaaaaaaaaaaaaaaaaaaaugcaucccccccccccccccccccccccccccccccaaaggcucuuuucagagccaccagaauu

SEQ ID NO: 15823 - RNA, 1867 nt, Artificial Sequence
  mRNA product Design a-4 comprising derived and/or modified sequence from HRSV(Memphis-37)__AIY60640.1__F-del_DSCav1_mut3 (opt5)
gggagacuccugucgggcggaaguaggaggaguagaguuuaaaaacaguacucuuuuuccgguucgggacguaguugaagcaacgacaagccggauaaccgcucuugagacaggaagcuuaccauggagcugcccauccucaagaccaacgccauuacaacgauccuggcugccgugacccuuugcuucgcgagcucccagaauauuacagaagaguuuuaccaaucuaccuguagcgcugucuccaaaggcuaucugggggcccucagaacaggaugguacaccucuguuaucacaauugaacugagcaacaucaaggagaucaaaugcaauggcaccgacgccaaggugaaacuuauuaagcaggaacuggauaaguauaaaaacgcugugacggaccuccagcugcugaugcaguccaccccugccgcugggucuggaagcgccaucuguuccggcauugcggucugcaaggugcuccaccuggagggggagguuaauaaaaucaagaacgcccuucugagcacaaauaaagcuguggucucucucuccaacggagugagcguucugaccuucaaggugcuugaucugaagaauuacauugacaaacaacuccugccgauccugaacaagcagucuuguuccauucccaauaucgaaacagucaucgaguuucagcagaaaaacaaucggcuccuggaaauuacccgcgaguucagcgugaacgccggcgugacgacaccugucucuaccuauaugcuuacaaauuccgagcugcucagccugaucaacgauaugcccauuaccaacgaccaaaagaaacuuauguccaauaacguucagaucgugagacagcagucuuacagcauuaugugcaucaucaaggaagaggugcuggcuuaugucgugcaacucccucuguacggcguuauugauacccccuguuggaaacugcauacauccccucucugcacgaccaauacaaaggaagggagcaacaucugucugacccggacagaccgcggaugguacugcgauaaugccggcucuguguccuuuuucccgcaggcggagaccuguaagguccagagcaacagaguguuuugcgacacgaugaacucucuuacacugcccagcgaaguuaaucucugcaauauugauaucuucaacccuaaauaugacuguaagauuaugaccuccaaaaccgaugugucuagcuccgucaucacaagccugggggccaucgugucuugcuacggaaagaccaaauguacagcuuccaauaagaaccggggcauuaucaagacguuuagcaaugggugcgacuaugucucuaacaaaggaguggacaccguuuccgugggcaauacacuuuacugugucaacaagcaagagggccagagccuguaugugaaaggggagcccauuaucaacuucuacgauccucucguuuuucccuccgacgaguucgaugccucuauuagccaggugaaugaaaagaucaaccagucccuggcuuuuauucgcaaaucugacgaacugcuccacaaugucaacgugggaaagagcaccacaaauaucaugaucaccacgauuaucauugugaucauuguuauccugcuucugcucaucgccgucggccuguuccuguauugcaaggccagaugaggacuagucccuguucccagagcccacuuuuuuuucuuuuuuugaaauaaaauagccugucuuucagaucuaaaaaaaaaaaaaaaaaaaaaaaaaaaaaaaaaaaaaaaaaaaaaaaaaaaaaaaaaaaaaaaaugcaucccccccccccccccccccccccccccccccaaaggcucuuuucagagccaccagaauu

SEQ ID NO: 15824 - RNA, 1867 nt, Artificial Sequence
  mRNA product Design a-4 comprising derived and/or modified sequence from HRSV(Memphis-37)__AIY60640.1__F-del_DSCav1_mut3 (opt6)
gggagacuccugucgggcggaaguaggaggaguagaguuuaaaaacaguacucuuuuuccgguucgggacguaguugaagcaacgacaagccggauaaccgcucuugagacaggaagcuuaccauggaacuacccauccuaaaaacaaaugccauaaccacaauacucgccgcuguaacacuauguuucgcuaguucacaaaacauuacagaagaauuuuaccaauccacaugcucagcaguaucaaaaggauaccuaggugcacuaagaacaggaugguacacaagcguaauuacaauagaauuauccaauauuaaagaaauaaaauguaacggcacugacgcuaaaguaaaauuaaucaaacaagaacuagacaaauacaaaaacgcaguaacagaccuacaauuacucaugcaauccacacccgcagcaggaucaggcucagccauaugcucagguauagcaguaugcaaaguacuccaccuugaaggagaaguaaacaaaauaaaaaacgcauuacuaucaacaaacaaagcaguaguaucacuaucaaacggagucucugucuuaaccuuuaaaguauuagauuuaaaaaacuacauagacaaacaacuauuaccaauucuaaauaaacaaucauguucuauaccaaauauagaaacaguaauagaauuucaacaaaaaaacaaccgauuacuagaaaucacaagagaauuuucugucaacgccggcguaaccaccccagucucaacauauaugcuaacaaauagugaacucuuauccuuaauaaacgacaugccaauaacaaaugaccaaaaaaaauuaauguccaauaacguacaaauagucagacaacagucauacucaauaauguguaucaucaaagaagaaguauuagcauacguaguucaacuaccccuauacggcguaauagacacaccauguuggaaacuacacacaucacccuuaugcacaaccaauaccaaagaaggaucuaacauaugccuaaccagaacagacagaggcugguacugcgacaacgcagguucagucucauucuucccacaagccgaaacaugcaaaguccaauccaacagaguauuuugcgacacuaugaacucacuaacucuaccuucagaagucaaccuuuguaacauagacauauuuaacccaaaauacgauuguaaaauaaugaccagcaaaacagacgucucaucaagcguaauaacaucacuuggcgcaauagucuccugcuacggaaaaacaaaaugcacagcauccaacaaaaacagaggcaucauaaaaaccuucuccaacggcugcgacuauguaagcaacaaaggugucgauacaguaucaguaggaaacacacuauacugcguaaacaaacaagaaggacaaucacucuacguaaaaggugaaccaaucauaaacuucuacgacccauuaguuuucccaucagacgaauuugaugccuccauaucacaaguaaaugaaaaaauaaaucaaucccuagcauucauacgaaaaucugaugaauuacuucacaaugucaacgucggaaaaucaaccacuaacauaaugauaacaacaauuauaauaguaauaauaguaauacuccuacuauuaauagccgucggucuuuuccuauacugcaaagcacgauaaggacuagucccuguucccagagcccacuuuuuuuucuuuuuuugaaauaaaauagccugucuuucagaucuaaaaaaaaaaaaaaaaaaaaaaaaaaaaaaaaaaaaaaaaaaaaaaaaaaaaaaaaaaaaaaaaugcaucccccccccccccccccccccccccccccccaaaggcucuuuucagagccaccagaauu

SEQ ID NO: 15825 - RNA, 1867 nt, Artificial Sequence
  mRNA product Design a-4 comprising derived and/or modified sequence from HRSV(Memphis-37)__AIY60640.1__F-del_DSCav1_mut3 (opt11)
gggagacuccugucgggcggaaguaggaggaguagaguuuaaaaacaguacucuuuuuccgguucgggacguaguugaagcaacgacaagccggauaaccgcucuugagacaggaagcuuaccauggaacuacccauccucaaaaccaacgccaucaccacaauccuagcugccgucacccuaugcuucgcaagcagccaaaacaucacagaagaauuuuaccaaucaaccugcuccgccgucuccaaaggguaccuaggugcccuccgcaccggcugguacacgucugucauaaccaucgaacucuccaacaucaaagaaaucaaauguaacggaacagacgcaaaagucaaacuaaucaaacaagaacuagacaaauacaaaaacgccguaaccgaccuccaacugcucaugcaauccacccccgcugccggcuccgggagcgcaaucugcucuggaaucgccguaugcaaaguccuccaccucgaaggagaaguaaacaaaaucaaaaacgcgcuccucaguaccaacaaagccgucgucucucuaucaaacggcguaucgguccucaccuucaaaguccucgaccuaaagaacuacauagacaaacaacuccuccccauccuaaacaaacaauccugcucaaucccaaacaucgaaaccgugaucgaguuccaacagaaaaacaaccgccuacucgaaaucacccgagaguucucagucaacgcaggagucaccacccccgucucaacauacaugcuuaccaacagcgaacuccuaucccucaucaacgacaugccaaucacaaacgaccaaaagaaacucaugagcaacaacguccagaucguaagacaacaaagcuacagcaucaugugcaucaucaaagaagaaguacuagcauacgucguccaacucccccucuacggcgucaucgacacccccugcuggaaacuccacaccucaccccucugcacaaccaacaccaaagaaggcuccaauaucugccucacacgcaccgaccgcggcugguacugcgacaacgccggcuccgucuccuucuucccucaagccgaaaccugcaaaguccaguccaacagagucuucugcgacaccaugaacucccuaacacuuccaucagaagucaaccuuuguaacaucgacaucuucaaucccaaauacgacuguaaaauaaugaccucaaaaacugacgugucaagcucaguuaucaccucccuaggggccaucgucuccugcuacggcaaaacaaaaugcaccgcauccaacaaaaaucgcggaaucaucaaaacauucuccaacggaugcgacuacgucucaaacaagggaguagauaccguaagcguuggcaacacccucuacugcguaaacaaacaagaaggccaaucacucuacgucaaaggcgaacccauaaucaacuucuacgacccccucgucuucccuuccgaugaguucgacgccagcaucucccaagucaacgagaaaauaaaccagucacucgcauucauccgcaaaagcgacgaacuccuccacaacguaaacguaggcaaauccacaaccaauaucaugauaaccacaaucaucaucgugaucaucgucauccuccuccuccucauagcugucggacucuuccucuacuguaaagcacgcugaggacuagucccuguucccagagcccacuuuuuuuucuuuuuuugaaauaaaauagccugucuuucagaucuaaaaaaaaaaaaaaaaaaaaaaaaaaaaaaaaaaaaaaaaaaaaaaaaaaaaaaaaaaaaaaaaugcaucccccccccccccccccccccccccccccccaaaggcucuuuucagagccaccagaauu

SEQ ID NO: 15826 - RNA, 1813 nt, Artificial Sequence
  mRNA product Design a-5 comprising derived and/or modified sequence from HRSV(Memphis-37)__AIY60640.1__F-del_DSCav1_mut3 (opt1)
gggagacuuucccauucuguagcagaauuugguguugccuguggucuuggucccgcggagaagcuuaccauggagcugcccauccucaagaccaacgccaucaccacgauccuggccgcggugacccugugcuucgccagcucccagaacaucaccgaggaguucuaccagagcacgugcuccgccgucagcaagggcuaccucggcgcccugcgcaccgggugguacaccagcgugaucaccaucgagcuguccaacaucaaggagaucaagugcaacggcaccgacgccaaggugaagcucaucaagcaggagcuggacaaguacaagaacgcggucacggaccugcagcuccugaugcagagcaccccggccgccggcuccgggagcgcgaucugcuccggcaucgccgucugcaaggugcugcaccucgagggcgaggugaacaagaucaagaacgcccugcuguccaccaacaaggccgucgugagccucuccaacggggugagcguccugaccuucaaggugcuggaccucaagaacuacaucgacaagcagcugcugcccauccugaacaagcagagcugcuccauccccaacaucgagaccgucaucgaguuccagcagaagaacaaccgccuccuggagaucacgcgggaguucagcgugaacgcgggcgugaccacccccgucuccaccuacaugcugacgaacagcgagcuccugucccugaucaacgacaugccgaucaccaacgaccagaagaagcucaugagcaacaacgugcagaucgugcgccagcaguccuacagcaucaugugcaucaucaaggaggagguccuggccuacguggugcagcugccccucuacggggucaucgacacccccugcuggaagcugcacaccagcccccugugcacgaccaacaccaaggagggcuccaacaucugccucacccggacggaccgcgggugguacugcgacaacgccggcagcguguccuucuucccgcaggccgagaccugcaagguccagagcaaccggguguucugcgacaccaugaacucccugacccugcccagcgaggugaaccucugcaacaucgacaucuucaaccccaaguacgacugcaagaucaugacguccaagaccgacgucagcuccagcgugaucaccucccugggcgccaucgugagcugcuacgggaagaccaagugcacggcgagcaacaagaaccgcggcaucaucaagaccuucuccaacgggugcgacuacgucagcaacaagggcguggacaccguguccgucggcaacacccuguacugcgugaacaagcaggagggccagagccucuacgugaagggggagcccaucaucaacuucuacgacccgcuggucuuccccuccgacgaguucgacgccagcaucucccaggugaacgagaagaucaaccagagccuggccuucauccggaaguccgacgagcuccugcacaacgugaacgucggcaagagcaccacgaacaucaugaucaccaccaucaucaucgugaucaucgugauccugcugcuccugaucgccgucgggcuguuccucuacugcaaggcccgcugaggacuagucccuguucccagagcccacuuuuuuuucuuuuuuugaaauaaaauagccugucuuucagaucuaaaaaaaaaaaaaaaaaaaaaaaaaaaaaaaaaaaaaaaaaaaaaaaaaaaaaaaaaaaaaaaaugcaucccccccccccccccccccccccccccccccaaaggcucuuuucagagccaccagaauu

SEQ ID NO: 15827 - RNA, 1813 nt, Artificial Sequence
  mRNA product Design a-5 comprising derived and/or modified sequence from HRSV(Memphis-37)__AIY60640.1__F-del_DSCav1_mut3 (opt1)
gggagacuuucccauucuguagcagaauuugguguugccuguggucuuggucccgcggagaagcuuaccauggagcugcccauccucaagaccaacgccaucaccacgauccuggccgcggugacccugugcuucgccagcucccagaacaucaccgaggaguucuaccagagcacgugcuccgccgucagcaagggcuaccucggggcccugcgcaccggcugguacaccuccgugaucaccaucgagcugagcaacaucaaggagaucaagugcaacgggaccgacgccaaggugaagcucaucaagcaggagcuggacaaguacaagaacgcggucacggaccugcagcuccugaugcaguccaccccggccgccggcagcggguccgccaucugcagcggcaucgcggugugcaaggugcugcaccucgagggcgaggucaacaagaucaagaacgcccugcuguccaccaacaaggccguggugagccucuccaacggggucagcgugcugaccuucaaggugcuggaccucaagaacuacaucgacaagcagcugcugcccauccucaacaagcaguccugcagcauccccaacaucgagacggucaucgaguuccagcagaagaacaaccggcugcuggagaucacccgcgaguucuccgugaacgccggcgugaccacccccgucagcacguacaugcucaccaacuccgagcugcugagccucaucaacgacaugccgaucaccaacgaccagaagaagcugaugagcaacaacgugcagaucgugcggcagcaguccuacagcaucaugugcaucaucaaggaggagguccuggccuacguggugcagcucccccuguacggggucaucgacacccccugcuggaagcugcacacgagcccccucugcaccaccaacaccaaggagggcuccaacaucugccugacgcgcaccgaccgggggugguacugcgacaacgcgggcuccgugagcuucuucccgcaggccgagaccugcaaggugcaguccaaccgcgucuucugcgacaccaugaacagccugacgcuccccuccgaggugaaccugugcaacaucgacaucuucaaccccaaguacgacugcaagaucaugaccagcaagaccgacgucuccagcuccgugaucaccagccugggcgccaucguguccugcuacgggaagacgaagugcaccgccagcaacaagaaccggggcaucaucaagaccuucuccaacgggugcgacuacgucagcaacaagggcguggacaccguguccgucggcaacacgcucuacugcgugaacaagcaggaggggcagagccuguacgugaagggcgagcccaucaucaacuucuacgacccgcuggucuuccccagcgacgaguucgacgccuccaucagccaggugaacgagaagaucaaccagucccucgcguucauccgcaagagcgacgagcugcugcacaacgugaacgucgggaaguccaccaccaacaucaugaucaccaccaucaucaucgugaucaucgugauccuccugcugcucaucgccgucggccuguuccuguacugcaaggcccggugaggacuagucccuguucccagagcccacuuuuuuuucuuuuuuugaaauaaaauagccugucuuucagaucuaaaaaaaaaaaaaaaaaaaaaaaaaaaaaaaaaaaaaaaaaaaaaaaaaaaaaaaaaaaaaaaaugcaucccccccccccccccccccccccccccccccaaaggcucuuuucagagccaccagaauu

SEQ ID NO: 15828 - RNA, 1813 nt, Artificial Sequence
  mRNA product Design a-5 comprising derived and/or modified sequence from HRSV(Memphis-37)__AIY60640.1__F-del_DSCav1_mut3 (opt2)
gggagacuuucccauucuguagcagaauuugguguugccuguggucuuggucccgcggagaagcuuaccauggagcuccccauccucaagaccaacgccaucaccaccauccucgccgccgucacccucugcuucgccuccucccagaacaucaccgaggaguucuaccaguccaccugcuccgccgucuccaagggcuaccucggcgcccuccgcaccggcugguacaccuccgucaucaccaucgagcucuccaacaucaaggagaucaagugcaacggcaccgacgccaaggucaagcucaucaagcaggagcucgacaaguacaagaacgccgucaccgaccuccagcuccucaugcaguccacccccgccgccggcuccggcuccgccaucugcuccggcaucgccgucugcaagguccuccaccucgagggcgaggucaacaagaucaagaacgcccuccucuccaccaacaaggccgucgucucccucuccaacggcgucuccguccucaccuucaagguccucgaccucaagaacuacaucgacaagcagcuccuccccauccucaacaagcaguccugcuccauccccaacaucgagaccgucaucgaguuccagcagaagaacaaccgccuccucgagaucacccgcgaguucuccgucaacgccggcgucaccacccccgucuccaccuacaugcucaccaacuccgagcuccucucccucaucaacgacaugcccaucaccaacgaccagaagaagcucauguccaacaacguccagaucguccgccagcaguccuacuccaucaugugcaucaucaaggaggagguccucgccuacgucguccagcucccccucuacggcgucaucgacacccccugcuggaagcuccacaccuccccccucugcaccaccaacaccaaggagggcuccaacaucugccucacccgcaccgaccgcggcugguacugcgacaacgccggcuccgucuccuucuucccccaggccgagaccugcaagguccaguccaaccgcgucuucugcgacaccaugaacucccucacccuccccuccgaggucaaccucugcaacaucgacaucuucaaccccaaguacgacugcaagaucaugaccuccaagaccgacgucuccuccuccgucaucaccucccucggcgccaucgucuccugcuacggcaagaccaagugcaccgccuccaacaagaaccgcggcaucaucaagaccuucuccaacggcugcgacuacgucuccaacaagggcgucgacaccgucuccgucggcaacacccucuacugcgucaacaagcaggagggccagucccucuacgucaagggcgagcccaucaucaacuucuacgacccccucgucuuccccuccgacgaguucgacgccuccaucucccaggucaacgagaagaucaaccagucccucgccuucauccgcaaguccgacgagcuccuccacaacgucaacgucggcaaguccaccaccaacaucaugaucaccaccaucaucaucgucaucaucgucauccuccuccuccucaucgccgucggccucuuccucuacugcaaggcccgcugaggacuagucccuguucccagagcccacuuuuuuuucuuuuuuugaaauaaaauagccugucuuucagaucuaaaaaaaaaaaaaaaaaaaaaaaaaaaaaaaaaaaaaaaaaaaaaaaaaaaaaaaaaaaaaaaaugcaucccccccccccccccccccccccccccccccaaaggcucuuuucagagccaccagaauu

SEQ ID NO: 15829 - RNA, 1813 nt, Artificial Sequence
  mRNA product Design a-5 comprising derived and/or modified sequence from HRSV(Memphis-37)__AIY60640.1__F-del_DSCav1_mut3 (opt3)
gggagacuuucccauucuguagcagaauuugguguugccuguggucuuggucccgcggagaagcuuaccauggagcugcccauccucaagaccaacgccauuacaacuauacuugcugcagugacgcugugcuucgccagcucccagaauaucaccgaagaguuuuaccaaucuacauguucagcggucaguaaaggcuauuugggggcuuuaagaacuggaugguacaccagcguuauuacaaucgaacuguccaacauuaaggagaucaaaugcaaugguaccgacgccaaggugaaacuaauaaagcaggaacucgauaaguauaaaaacgcaguaacugaccugcagcuucugaugcagucuacuccugccgcuggcucggggucagcaaucuguagcggaauugccgugugcaaggucuugcaccucgagggcgaggugaauaaaaucaagaacgcucugcugaguaccaauaaagccguugugucccucucuaacggugucagcguguuaacguucaagguacuggaucuuaagaauuacauugacaaacaauugcugccaauccuaaacaagcaguccuguucaauaccgaauauugaaacuguuaucgaguuucagcagaaaaacaauaggcuccuggaaauuacccgggaguucagugugaacgcgggggucacaacucccgugagcaccuauaugcuuacaaauucugagcuguugucccucaucaacgauaugccuaucaccaacgaccaaaagaaacugaugucaaauaacgugcagauuguccgccagcagagcuacaguauaaugugcaucauuaaggaagagguuuuagcauaugugguacaacugccacucuacggagugaucgauacgcccuguuggaaacuucauacuucuccucugugcacaaccaauacuaaggaaggcuccaacauauguuugacacgaaccgaccguggcugguacugcgauaaugccgggagcgucucguuuuucccacaggcugagacguguaaggugcagucuaacagaguuuucugcgacaccaugaacucccuaacacugcccucagaagugaaucucugcaauauugauaucuucaacccuaaauaugacuguaagaucaugacaaguaaaaccgaugucagcuccucugugauuacaagccugggagccaucguaucaugcuacgguaagacuaaauguaccgcaaguaauaagaacaggggcauuauaaagacauuuuccaaugggugcgacuauguuagcaacaaaggaguggacaccgucucugugggcaauacucuuuacugugucaacaagcaagagggucagucacuguaugugaaaggggagccaaucauuaacuucuacgauccguugguuuuucccagugacgaauuugaugcuagcaucucccaggugaaugagaagaucaaccagucucucgccuuuauucggaaaucggacgaacuguuacacaauguaaacgucggaaagagcacgacaaauauaaugaucaccacuauuaucauugugaucauaguuauccugcuacuccugauugcggugggccuuuucuuguauugcaaggcccgcugaggacuagucccuguucccagagcccacuuuuuuuucuuuuuuugaaauaaaauagccugucuuucagaucuaaaaaaaaaaaaaaaaaaaaaaaaaaaaaaaaaaaaaaaaaaaaaaaaaaaaaaaaaaaaaaaaugcaucccccccccccccccccccccccccccccccaaaggcucuuuucagagccaccagaauu

SEQ ID NO: 15830 - RNA, 1813 nt, Artificial Sequence
  mRNA product Design a-5 comprising derived and/or modified sequence from HRSV(Memphis-37)__AIY60640.1__F-del_DSCav1_mut3 (opt4)
gggagacuuucccauucuguagcagaauuugguguugccuguggucuuggucccgcggagaagcuuaccauggagcugcccauccugaagaccaacgccaucaccaccauccuggccgccgugacccugugcuucgccagcagccagaacaucaccgaggaguucuaccagagcaccugcagcgccgugagcaagggcuaccugggcgcccugagaaccggcugguacaccagcgugaucaccaucgagcugagcaacaucaaggagaucaagugcaacggcaccgacgccaaggugaagcugaucaagcaggagcuggacaaguacaagaacgccgugaccgaccugcagcugcugaugcagagcacccccgccgccggcagcggcagcgccaucugcagcggcaucgccgugugcaaggugcugcaccuggagggcgaggugaacaagaucaagaacgcccugcugagcaccaacaaggccguggugagccugagcaacggcgugagcgugcugaccuucaaggugcuggaccugaagaacuacaucgacaagcagcugcugcccauccugaacaagcagagcugcagcauccccaacaucgagaccgugaucgaguuccagcagaagaacaacagacugcuggagaucaccagagaguucagcgugaacgccggcgugaccacccccgugagcaccuacaugcugaccaacagcgagcugcugagccugaucaacgacaugcccaucaccaacgaccagaagaagcugaugagcaacaacgugcagaucgugagacagcagagcuacagcaucaugugcaucaucaaggaggaggugcuggccuacguggugcagcugccccuguacggcgugaucgacacccccugcuggaagcugcacaccagcccccugugcaccaccaacaccaaggagggcagcaacaucugccugaccagaaccgacagaggcugguacugcgacaacgccggcagcgugagcuucuucccccaggccgagaccugcaaggugcagagcaacagaguguucugcgacaccaugaacagccugacccugcccagcgaggugaaccugugcaacaucgacaucuucaaccccaaguacgacugcaagaucaugaccagcaagaccgacgugagcagcagcgugaucaccagccugggcgccaucgugagcugcuacggcaagaccaagugcaccgccagcaacaagaacagaggcaucaucaagaccuucagcaacggcugcgacuacgugagcaacaagggcguggacaccgugagcgugggcaacacccuguacugcgugaacaagcaggagggccagagccuguacgugaagggcgagcccaucaucaacuucuacgacccccugguguuccccagcgacgaguucgacgccagcaucagccaggugaacgagaagaucaaccagagccuggccuucaucagaaagagcgacgagcugcugcacaacgugaacgugggcaagagcaccaccaacaucaugaucaccaccaucaucaucgugaucaucgugauccugcugcugcugaucgccgugggccuguuccuguacugcaaggccagaugaggacuagucccuguucccagagcccacuuuuuuuucuuuuuuugaaauaaaauagccugucuuucagaucuaaaaaaaaaaaaaaaaaaaaaaaaaaaaaaaaaaaaaaaaaaaaaaaaaaaaaaaaaaaaaaaaugcaucccccccccccccccccccccccccccccccaaaggcucuuuucagagccaccagaauu

SEQ ID NO: 15831 - RNA, 1813 nt, Artificial Sequence
  mRNA product Design a-5 comprising derived and/or modified sequence from HRSV(Memphis-37)__AIY60640.1__F-del_DSCav1_mut3 (opt5)
gggagacuuucccauucuguagcagaauuugguguugccuguggucuuggucccgcggagaagcuuaccauggagcugcccauccucaagaccaacgccauuacaacgauccuggcugccgugacccuuugcuucgcgagcucccagaauauuacagaagaguuuuaccaaucuaccuguagcgcugucuccaaaggcuaucugggggcccucagaacaggaugguacaccucuguuaucacaauugaacugagcaacaucaaggagaucaaaugcaauggcaccgacgccaaggugaaacuuauuaagcaggaacuggauaaguauaaaaacgcugugacggaccuccagcugcugaugcaguccaccccugccgcugggucuggaagcgccaucuguuccggcauugcggucugcaaggugcuccaccuggagggggagguuaauaaaaucaagaacgcccuucugagcacaaauaaagcuguggucucucucuccaacggagugagcguucugaccuucaaggugcuugaucugaagaauuacauugacaaacaacuccugccgauccugaacaagcagucuuguuccauucccaauaucgaaacagucaucgaguuucagcagaaaaacaaucggcuccuggaaauuacccgcgaguucagcgugaacgccggcgugacgacaccugucucuaccuauaugcuuacaaauuccgagcugcucagccugaucaacgauaugcccauuaccaacgaccaaaagaaacuuauguccaauaacguucagaucgugagacagcagucuuacagcauuaugugcaucaucaaggaagaggugcuggcuuaugucgugcaacucccucuguacggcguuauugauacccccuguuggaaacugcauacauccccucucugcacgaccaauacaaaggaagggagcaacaucugucugacccggacagaccgcggaugguacugcgauaaugccggcucuguguccuuuuucccgcaggcggagaccuguaagguccagagcaacagaguguuuugcgacacgaugaacucucuuacacugcccagcgaaguuaaucucugcaauauugauaucuucaacccuaaauaugacuguaagauuaugaccuccaaaaccgaugugucuagcuccgucaucacaagccugggggccaucgugucuugcuacggaaagaccaaauguacagcuuccaauaagaaccggggcauuaucaagacguuuagcaaugggugcgacuaugucucuaacaaaggaguggacaccguuuccgugggcaauacacuuuacugugucaacaagcaagagggccagagccuguaugugaaaggggagcccauuaucaacuucuacgauccucucguuuuucccuccgacgaguucgaugccucuauuagccaggugaaugaaaagaucaaccagucccuggcuuuuauucgcaaaucugacgaacugcuccacaaugucaacgugggaaagagcaccacaaauaucaugaucaccacgauuaucauugugaucauuguuauccugcuucugcucaucgccgucggccuguuccuguauugcaaggccagaugaggacuagucccuguucccagagcccacuuuuuuuucuuuuuuugaaauaaaauagccugucuuucagaucuaaaaaaaaaaaaaaaaaaaaaaaaaaaaaaaaaaaaaaaaaaaaaaaaaaaaaaaaaaaaaaaaugcaucccccccccccccccccccccccccccccccaaaggcucuuuucagagccaccagaauu

SEQ ID NO: 15832 - RNA, 1813 nt, Artificial Sequence
  mRNA product Design a-5 comprising derived and/or modified sequence from HRSV(Memphis-37)__AIY60640.1__F-del_DSCav1_mut3 (opt6)
gggagacuuucccauucuguagcagaauuugguguugccuguggucuuggucccgcggagaagcuuaccauggaacuacccauccuaaaaacaaaugccauaaccacaauacucgccgcuguaacacuauguuucgcuaguucacaaaacauuacagaagaauuuuaccaauccacaugcucagcaguaucaaaaggauaccuaggugcacuaagaacaggaugguacacaagcguaauuacaauagaauuauccaauauuaaagaaauaaaauguaacggcacugacgcuaaaguaaaauuaaucaaacaagaacuagacaaauacaaaaacgcaguaacagaccuacaauuacucaugcaauccacacccgcagcaggaucaggcucagccauaugcucagguauagcaguaugcaaaguacuccaccuugaaggagaaguaaacaaaauaaaaaacgcauuacuaucaacaaacaaagcaguaguaucacuaucaaacggagucucugucuuaaccuuuaaaguauuagauuuaaaaaacuacauagacaaacaacuauuaccaauucuaaauaaacaaucauguucuauaccaaauauagaaacaguaauagaauuucaacaaaaaaacaaccgauuacuagaaaucacaagagaauuuucugucaacgccggcguaaccaccccagucucaacauauaugcuaacaaauagugaacucuuauccuuaauaaacgacaugccaauaacaaaugaccaaaaaaaauuaauguccaauaacguacaaauagucagacaacagucauacucaauaauguguaucaucaaagaagaaguauuagcauacguaguucaacuaccccuauacggcguaauagacacaccauguuggaaacuacacacaucacccuuaugcacaaccaauaccaaagaaggaucuaacauaugccuaaccagaacagacagaggcugguacugcgacaacgcagguucagucucauucuucccacaagccgaaacaugcaaaguccaauccaacagaguauuuugcgacacuaugaacucacuaacucuaccuucagaagucaaccuuuguaacauagacauauuuaacccaaaauacgauuguaaaauaaugaccagcaaaacagacgucucaucaagcguaauaacaucacuuggcgcaauagucuccugcuacggaaaaacaaaaugcacagcauccaacaaaaacagaggcaucauaaaaaccuucuccaacggcugcgacuauguaagcaacaaaggugucgauacaguaucaguaggaaacacacuauacugcguaaacaaacaagaaggacaaucacucuacguaaaaggugaaccaaucauaaacuucuacgacccauuaguuuucccaucagacgaauuugaugccuccauaucacaaguaaaugaaaaaauaaaucaaucccuagcauucauacgaaaaucugaugaauuacuucacaaugucaacgucggaaaaucaaccacuaacauaaugauaacaacaauuauaauaguaauaauaguaauacuccuacuauuaauagccgucggucuuuuccuauacugcaaagcacgauaaggacuagucccuguucccagagcccacuuuuuuuucuuuuuuugaaauaaaauagccugucuuucagaucuaaaaaaaaaaaaaaaaaaaaaaaaaaaaaaaaaaaaaaaaaaaaaaaaaaaaaaaaaaaaaaaaugcaucccccccccccccccccccccccccccccccaaaggcucuuuucagagccaccagaauu

SEQ ID NO: 15833 - RNA, 1813 nt, Artificial Sequence
  mRNA product Design a-5 comprising derived and/or modified sequence from HRSV(Memphis-37)__AIY60640.1__F-del_DSCav1_mut3 (opt11)
gggagacuuucccauucuguagcagaauuugguguugccuguggucuuggucccgcggagaagcuuaccauggaacuacccauccucaaaaccaacgccaucaccacaauccuagcugccgucacccuaugcuucgcaagcagccaaaacaucacagaagaauuuuaccaaucaaccugcuccgccgucuccaaaggguaccuaggugcccuccgcaccggcugguacacgucugucauaaccaucgaacucuccaacaucaaagaaaucaaauguaacggaacagacgcaaaagucaaacuaaucaaacaagaacuagacaaauacaaaaacgccguaaccgaccuccaacugcucaugcaauccacccccgcugccggcuccgggagcgcaaucugcucuggaaucgccguaugcaaaguccuccaccucgaaggagaaguaaacaaaaucaaaaacgcgcuccucaguaccaacaaagccgucgucucucuaucaaacggcguaucgguccucaccuucaaaguccucgaccuaaagaacuacauagacaaacaacuccuccccauccuaaacaaacaauccugcucaaucccaaacaucgaaaccgugaucgaguuccaacagaaaaacaaccgccuacucgaaaucacccgagaguucucagucaacgcaggagucaccacccccgucucaacauacaugcuuaccaacagcgaacuccuaucccucaucaacgacaugccaaucacaaacgaccaaaagaaacucaugagcaacaacguccagaucguaagacaacaaagcuacagcaucaugugcaucaucaaagaagaaguacuagcauacgucguccaacucccccucuacggcgucaucgacacccccugcuggaaacuccacaccucaccccucugcacaaccaacaccaaagaaggcuccaauaucugccucacacgcaccgaccgcggcugguacugcgacaacgccggcuccgucuccuucuucccucaagccgaaaccugcaaaguccaguccaacagagucuucugcgacaccaugaacucccuaacacuuccaucagaagucaaccuuuguaacaucgacaucuucaaucccaaauacgacuguaaaauaaugaccucaaaaacugacgugucaagcucaguuaucaccucccuaggggccaucgucuccugcuacggcaaaacaaaaugcaccgcauccaacaaaaaucgcggaaucaucaaaacauucuccaacggaugcgacuacgucucaaacaagggaguagauaccguaagcguuggcaacacccucuacugcguaaacaaacaagaaggccaaucacucuacgucaaaggcgaacccauaaucaacuucuacgacccccucgucuucccuuccgaugaguucgacgccagcaucucccaagucaacgagaaaauaaaccagucacucgcauucauccgcaaaagcgacgaacuccuccacaacguaaacguaggcaaauccacaaccaauaucaugauaaccacaaucaucaucgugaucaucgucauccuccuccuccucauagcugucggacucuuccucuacuguaaagcacgcugaggacuagucccuguucccagagcccacuuuuuuuucuuuuuuugaaauaaaauagccugucuuucagaucuaaaaaaaaaaaaaaaaaaaaaaaaaaaaaaaaaaaaaaaaaaaaaaaaaaaaaaaaaaaaaaaaugcaucccccccccccccccccccccccccccccccaaaggcucuuuucagagccaccagaauu

SEQ ID NO: 15834 - RNA, 1994 nt, Artificial Sequence
  mRNA product Design b-1 comprising derived and/or modified sequence from HRSV(Memphis-37)__AIY60640.1__F-del_DSCav1_mut3 (opt1)
gggagacggagacggccugcaggaccugcucucucagcccucagccgaggccuacgccgagccgagugcgcagccgacgaccgggaggagccgcagccuucaacucugagguacugugauccgcgcugcccgccgggccgccccaguccgcugcugcggcaccuccuucccucgcgcccucuucgcucgccagcgccuucccugugagccugcgucaccgcggccgccaagcuuaccauggagcugcccauccucaagaccaacgccaucaccacgauccuggccgcggugacccugugcuucgccagcucccagaacaucaccgaggaguucuaccagagcacgugcuccgccgucagcaagggcuaccucggcgcccugcgcaccgggugguacaccagcgugaucaccaucgagcuguccaacaucaaggagaucaagugcaacggcaccgacgccaaggugaagcucaucaagcaggagcuggacaaguacaagaacgcggucacggaccugcagcuccugaugcagagcaccccggccgccggcuccgggagcgcgaucugcuccggcaucgccgucugcaaggugcugcaccucgagggcgaggugaacaagaucaagaacgcccugcuguccaccaacaaggccgucgugagccucuccaacggggugagcguccugaccuucaaggugcuggaccucaagaacuacaucgacaagcagcugcugcccauccugaacaagcagagcugcuccauccccaacaucgagaccgucaucgaguuccagcagaagaacaaccgccuccuggagaucacgcgggaguucagcgugaacgcgggcgugaccacccccgucuccaccuacaugcugacgaacagcgagcuccugucccugaucaacgacaugccgaucaccaacgaccagaagaagcucaugagcaacaacgugcagaucgugcgccagcaguccuacagcaucaugugcaucaucaaggaggagguccuggccuacguggugcagcugccccucuacggggucaucgacacccccugcuggaagcugcacaccagcccccugugcacgaccaacaccaaggagggcuccaacaucugccucacccggacggaccgcgggugguacugcgacaacgccggcagcguguccuucuucccgcaggccgagaccugcaagguccagagcaaccggguguucugcgacaccaugaacucccugacccugcccagcgaggugaaccucugcaacaucgacaucuucaaccccaaguacgacugcaagaucaugacguccaagaccgacgucagcuccagcgugaucaccucccugggcgccaucgugagcugcuacgggaagaccaagugcacggcgagcaacaagaaccgcggcaucaucaagaccuucuccaacgggugcgacuacgucagcaacaagggcguggacaccguguccgucggcaacacccuguacugcgugaacaagcaggagggccagagccucuacgugaagggggagcccaucaucaacuucuacgacccgcuggucuuccccuccgacgaguucgacgccagcaucucccaggugaacgagaagaucaaccagagccuggccuucauccggaaguccgacgagcuccugcacaacgugaacgucggcaagagcaccacgaacaucaugaucaccaccaucaucaucgugaucaucgugauccugcugcuccugaucgccgucgggcuguuccucuacugcaaggcccgcugaggacuaguguccaccugucccuccugggcugcuggauugucucguuuuccugccaaauaaacaggaucagcgcuuuacagaucuaaaaaaaaaaaaaaaaaaaaaaaaaaaaaaaaaaaaaaaaaaaaaaaaaaaaaaaaaaaaaaaaugcaucccccccccccccccccccccccccccccccaaaggcucuuuucagagccaccagaauu

SEQ ID NO: 15835 - RNA, 1994 nt, Artificial Sequence
  mRNA product Design b-1 comprising derived and/or modified sequence from HRSV(Memphis-37)__AIY60640.1__F-del_DSCav1_mut3 (opt1)
gggagacggagacggccugcaggaccugcucucucagcccucagccgaggccuacgccgagccgagugcgcagccgacgaccgggaggagccgcagccuucaacucugagguacugugauccgcgcugcccgccgggccgccccaguccgcugcugcggcaccuccuucccucgcgcccucuucgcucgccagcgccuucccugugagccugcgucaccgcggccgccaagcuuaccauggagcugcccauccucaagaccaacgccaucaccacgauccuggccgcggugacccugugcuucgccagcucccagaacaucaccgaggaguucuaccagagcacgugcuccgccgucagcaagggcuaccucggggcccugcgcaccggcugguacaccuccgugaucaccaucgagcugagcaacaucaaggagaucaagugcaacgggaccgacgccaaggugaagcucaucaagcaggagcuggacaaguacaagaacgcggucacggaccugcagcuccugaugcaguccaccccggccgccggcagcggguccgccaucugcagcggcaucgcggugugcaaggugcugcaccucgagggcgaggucaacaagaucaagaacgcccugcuguccaccaacaaggccguggugagccucuccaacggggucagcgugcugaccuucaaggugcuggaccucaagaacuacaucgacaagcagcugcugcccauccucaacaagcaguccugcagcauccccaacaucgagacggucaucgaguuccagcagaagaacaaccggcugcuggagaucacccgcgaguucuccgugaacgccggcgugaccacccccgucagcacguacaugcucaccaacuccgagcugcugagccucaucaacgacaugccgaucaccaacgaccagaagaagcugaugagcaacaacgugcagaucgugcggcagcaguccuacagcaucaugugcaucaucaaggaggagguccuggccuacguggugcagcucccccuguacggggucaucgacacccccugcuggaagcugcacacgagcccccucugcaccaccaacaccaaggagggcuccaacaucugccugacgcgcaccgaccgggggugguacugcgacaacgcgggcuccgugagcuucuucccgcaggccgagaccugcaaggugcaguccaaccgcgucuucugcgacaccaugaacagccugacgcuccccuccgaggugaaccugugcaacaucgacaucuucaaccccaaguacgacugcaagaucaugaccagcaagaccgacgucuccagcuccgugaucaccagccugggcgccaucguguccugcuacgggaagacgaagugcaccgccagcaacaagaaccggggcaucaucaagaccuucuccaacgggugcgacuacgucagcaacaagggcguggacaccguguccgucggcaacacgcucuacugcgugaacaagcaggaggggcagagccuguacgugaagggcgagcccaucaucaacuucuacgacccgcuggucuuccccagcgacgaguucgacgccuccaucagccaggugaacgagaagaucaaccagucccucgcguucauccgcaagagcgacgagcugcugcacaacgugaacgucgggaaguccaccaccaacaucaugaucaccaccaucaucaucgugaucaucgugauccuccugcugcucaucgccgucggccuguuccuguacugcaaggcccggugaggacuaguguccaccugucccuccugggcugcuggauugucucguuuuccugccaaauaaacaggaucagcgcuuuacagaucuaaaaaaaaaaaaaaaaaaaaaaaaaaaaaaaaaaaaaaaaaaaaaaaaaaaaaaaaaaaaaaaaugcaucccccccccccccccccccccccccccccccaaaggcucuuuucagagccaccagaauu

SEQ ID NO: 15836 - RNA, 1994 nt, Artificial Sequence
  mRNA product Design b-1 comprising derived and/or modified sequence from HRSV(Memphis-37)__AIY60640.1__F-del_DSCav1_mut3 (opt2)
gggagacggagacggccugcaggaccugcucucucagcccucagccgaggccuacgccgagccgagugcgcagccgacgaccgggaggagccgcagccuucaacucugagguacugugauccgcgcugcccgccgggccgccccaguccgcugcugcggcaccuccuucccucgcgcccucuucgcucgccagcgccuucccugugagccugcgucaccgcggccgccaagcuuaccauggagcuccccauccucaagaccaacgccaucaccaccauccucgccgccgucacccucugcuucgccuccucccagaacaucaccgaggaguucuaccaguccaccugcuccgccgucuccaagggcuaccucggcgcccuccgcaccggcugguacaccuccgucaucaccaucgagcucuccaacaucaaggagaucaagugcaacggcaccgacgccaaggucaagcucaucaagcaggagcucgacaaguacaagaacgccgucaccgaccuccagcuccucaugcaguccacccccgccgccggcuccggcuccgccaucugcuccggcaucgccgucugcaagguccuccaccucgagggcgaggucaacaagaucaagaacgcccuccucuccaccaacaaggccgucgucucccucuccaacggcgucuccguccucaccuucaagguccucgaccucaagaacuacaucgacaagcagcuccuccccauccucaacaagcaguccugcuccauccccaacaucgagaccgucaucgaguuccagcagaagaacaaccgccuccucgagaucacccgcgaguucuccgucaacgccggcgucaccacccccgucuccaccuacaugcucaccaacuccgagcuccucucccucaucaacgacaugcccaucaccaacgaccagaagaagcucauguccaacaacguccagaucguccgccagcaguccuacuccaucaugugcaucaucaaggaggagguccucgccuacgucguccagcucccccucuacggcgucaucgacacccccugcuggaagcuccacaccuccccccucugcaccaccaacaccaaggagggcuccaacaucugccucacccgcaccgaccgcggcugguacugcgacaacgccggcuccgucuccuucuucccccaggccgagaccugcaagguccaguccaaccgcgucuucugcgacaccaugaacucccucacccuccccuccgaggucaaccucugcaacaucgacaucuucaaccccaaguacgacugcaagaucaugaccuccaagaccgacgucuccuccuccgucaucaccucccucggcgccaucgucuccugcuacggcaagaccaagugcaccgccuccaacaagaaccgcggcaucaucaagaccuucuccaacggcugcgacuacgucuccaacaagggcgucgacaccgucuccgucggcaacacccucuacugcgucaacaagcaggagggccagucccucuacgucaagggcgagcccaucaucaacuucuacgacccccucgucuuccccuccgacgaguucgacgccuccaucucccaggucaacgagaagaucaaccagucccucgccuucauccgcaaguccgacgagcuccuccacaacgucaacgucggcaaguccaccaccaacaucaugaucaccaccaucaucaucgucaucaucgucauccuccuccuccucaucgccgucggccucuuccucuacugcaaggcccgcugaggacuaguguccaccugucccuccugggcugcuggauugucucguuuuccugccaaauaaacaggaucagcgcuuuacagaucuaaaaaaaaaaaaaaaaaaaaaaaaaaaaaaaaaaaaaaaaaaaaaaaaaaaaaaaaaaaaaaaaugcaucccccccccccccccccccccccccccccccaaaggcucuuuucagagccaccagaauu

SEQ ID NO: 15837 - RNA, 1994 nt, Artificial Sequence
  mRNA product Design b-1 comprising derived and/or modified sequence from HRSV(Memphis-37)__AIY60640.1__F-del_DSCav1_mut3 (opt3)
gggagacggagacggccugcaggaccugcucucucagcccucagccgaggccuacgccgagccgagugcgcagccgacgaccgggaggagccgcagccuucaacucugagguacugugauccgcgcugcccgccgggccgccccaguccgcugcugcggcaccuccuucccucgcgcccucuucgcucgccagcgccuucccugugagccugcgucaccgcggccgccaagcuuaccauggagcugcccauccucaagaccaacgccauuacaacuauacuugcugcagugacgcugugcuucgccagcucccagaauaucaccgaagaguuuuaccaaucuacauguucagcggucaguaaaggcuauuugggggcuuuaagaacuggaugguacaccagcguuauuacaaucgaacuguccaacauuaaggagaucaaaugcaaugguaccgacgccaaggugaaacuaauaaagcaggaacucgauaaguauaaaaacgcaguaacugaccugcagcuucugaugcagucuacuccugccgcuggcucggggucagcaaucuguagcggaauugccgugugcaaggucuugcaccucgagggcgaggugaauaaaaucaagaacgcucugcugaguaccaauaaagccguugugucccucucuaacggugucagcguguuaacguucaagguacuggaucuuaagaauuacauugacaaacaauugcugccaauccuaaacaagcaguccuguucaauaccgaauauugaaacuguuaucgaguuucagcagaaaaacaauaggcuccuggaaauuacccgggaguucagugugaacgcgggggucacaacucccgugagcaccuauaugcuuacaaauucugagcuguugucccucaucaacgauaugccuaucaccaacgaccaaaagaaacugaugucaaauaacgugcagauuguccgccagcagagcuacaguauaaugugcaucauuaaggaagagguuuuagcauaugugguacaacugccacucuacggagugaucgauacgcccuguuggaaacuucauacuucuccucugugcacaaccaauacuaaggaaggcuccaacauauguuugacacgaaccgaccguggcugguacugcgauaaugccgggagcgucucguuuuucccacaggcugagacguguaaggugcagucuaacagaguuuucugcgacaccaugaacucccuaacacugcccucagaagugaaucucugcaauauugauaucuucaacccuaaauaugacuguaagaucaugacaaguaaaaccgaugucagcuccucugugauuacaagccugggagccaucguaucaugcuacgguaagacuaaauguaccgcaaguaauaagaacaggggcauuauaaagacauuuuccaaugggugcgacuauguuagcaacaaaggaguggacaccgucucugugggcaauacucuuuacugugucaacaagcaagagggucagucacuguaugugaaaggggagccaaucauuaacuucuacgauccguugguuuuucccagugacgaauuugaugcuagcaucucccaggugaaugagaagaucaaccagucucucgccuuuauucggaaaucggacgaacuguuacacaauguaaacgucggaaagagcacgacaaauauaaugaucaccacuauuaucauugugaucauaguuauccugcuacuccugauugcggugggccuuuucuuguauugcaaggcccgcugaggacuaguguccaccugucccuccugggcugcuggauugucucguuuuccugccaaauaaacaggaucagcgcuuuacagaucuaaaaaaaaaaaaaaaaaaaaaaaaaaaaaaaaaaaaaaaaaaaaaaaaaaaaaaaaaaaaaaaaugcaucccccccccccccccccccccccccccccccaaaggcucuuuucagagccaccagaauu

SEQ ID NO: 15838 - RNA, 1994 nt, Artificial Sequence
  mRNA product Design b-1 comprising derived and/or modified sequence from HRSV(Memphis-37)__AIY60640.1__F-del_DSCav1_mut3 (opt4)
gggagacggagacggccugcaggaccugcucucucagcccucagccgaggccuacgccgagccgagugcgcagccgacgaccgggaggagccgcagccuucaacucugagguacugugauccgcgcugcccgccgggccgccccaguccgcugcugcggcaccuccuucccucgcgcccucuucgcucgccagcgccuucccugugagccugcgucaccgcggccgccaagcuuaccauggagcugcccauccugaagaccaacgccaucaccaccauccuggccgccgugacccugugcuucgccagcagccagaacaucaccgaggaguucuaccagagcaccugcagcgccgugagcaagggcuaccugggcgcccugagaaccggcugguacaccagcgugaucaccaucgagcugagcaacaucaaggagaucaagugcaacggcaccgacgccaaggugaagcugaucaagcaggagcuggacaaguacaagaacgccgugaccgaccugcagcugcugaugcagagcacccccgccgccggcagcggcagcgccaucugcagcggcaucgccgugugcaaggugcugcaccuggagggcgaggugaacaagaucaagaacgcccugcugagcaccaacaaggccguggugagccugagcaacggcgugagcgugcugaccuucaaggugcuggaccugaagaacuacaucgacaagcagcugcugcccauccugaacaagcagagcugcagcauccccaacaucgagaccgugaucgaguuccagcagaagaacaacagacugcuggagaucaccagagaguucagcgugaacgccggcgugaccacccccgugagcaccuacaugcugaccaacagcgagcugcugagccugaucaacgacaugcccaucaccaacgaccagaagaagcugaugagcaacaacgugcagaucgugagacagcagagcuacagcaucaugugcaucaucaaggaggaggugcuggccuacguggugcagcugccccuguacggcgugaucgacacccccugcuggaagcugcacaccagcccccugugcaccaccaacaccaaggagggcagcaacaucugccugaccagaaccgacagaggcugguacugcgacaacgccggcagcgugagcuucuucccccaggccgagaccugcaaggugcagagcaacagaguguucugcgacaccaugaacagccugacccugcccagcgaggugaaccugugcaacaucgacaucuucaaccccaaguacgacugcaagaucaugaccagcaagaccgacgugagcagcagcgugaucaccagccugggcgccaucgugagcugcuacggcaagaccaagugcaccgccagcaacaagaacagaggcaucaucaagaccuucagcaacggcugcgacuacgugagcaacaagggcguggacaccgugagcgugggcaacacccuguacugcgugaacaagcaggagggccagagccuguacgugaagggcgagcccaucaucaacuucuacgacccccugguguuccccagcgacgaguucgacgccagcaucagccaggugaacgagaagaucaaccagagccuggccuucaucagaaagagcgacgagcugcugcacaacgugaacgugggcaagagcaccaccaacaucaugaucaccaccaucaucaucgugaucaucgugauccugcugcugcugaucgccgugggccuguuccuguacugcaaggccagaugaggacuaguguccaccugucccuccugggcugcuggauugucucguuuuccugccaaauaaacaggaucagcgcuuuacagaucuaaaaaaaaaaaaaaaaaaaaaaaaaaaaaaaaaaaaaaaaaaaaaaaaaaaaaaaaaaaaaaaaugcaucccccccccccccccccccccccccccccccaaaggcucuuuucagagccaccagaauu

SEQ ID NO: 15839 - RNA, 1994 nt, Artificial Sequence
  mRNA product Design b-1 comprising derived and/or modified sequence from HRSV(Memphis-37)__AIY60640.1__F-del_DSCav1_mut3 (opt5)
gggagacggagacggccugcaggaccugcucucucagcccucagccgaggccuacgccgagccgagugcgcagccgacgaccgggaggagccgcagccuucaacucugagguacugugauccgcgcugcccgccgggccgccccaguccgcugcugcggcaccuccuucccucgcgcccucuucgcucgccagcgccuucccugugagccugcgucaccgcggccgccaagcuuaccauggagcugcccauccucaagaccaacgccauuacaacgauccuggcugccgugacccuuugcuucgcgagcucccagaauauuacagaagaguuuuaccaaucuaccuguagcgcugucuccaaaggcuaucugggggcccucagaacaggaugguacaccucuguuaucacaauugaacugagcaacaucaaggagaucaaaugcaauggcaccgacgccaaggugaaacuuauuaagcaggaacuggauaaguauaaaaacgcugugacggaccuccagcugcugaugcaguccaccccugccgcugggucuggaagcgccaucuguuccggcauugcggucugcaaggugcuccaccuggagggggagguuaauaaaaucaagaacgcccuucugagcacaaauaaagcuguggucucucucuccaacggagugagcguucugaccuucaaggugcuugaucugaagaauuacauugacaaacaacuccugccgauccugaacaagcagucuuguuccauucccaauaucgaaacagucaucgaguuucagcagaaaaacaaucggcuccuggaaauuacccgcgaguucagcgugaacgccggcgugacgacaccugucucuaccuauaugcuuacaaauuccgagcugcucagccugaucaacgauaugcccauuaccaacgaccaaaagaaacuuauguccaauaacguucagaucgugagacagcagucuuacagcauuaugugcaucaucaaggaagaggugcuggcuuaugucgugcaacucccucuguacggcguuauugauacccccuguuggaaacugcauacauccccucucugcacgaccaauacaaaggaagggagcaacaucugucugacccggacagaccgcggaugguacugcgauaaugccggcucuguguccuuuuucccgcaggcggagaccuguaagguccagagcaacagaguguuuugcgacacgaugaacucucuuacacugcccagcgaaguuaaucucugcaauauugauaucuucaacccuaaauaugacuguaagauuaugaccuccaaaaccgaugugucuagcuccgucaucacaagccugggggccaucgugucuugcuacggaaagaccaaauguacagcuuccaauaagaaccggggcauuaucaagacguuuagcaaugggugcgacuaugucucuaacaaaggaguggacaccguuuccgugggcaauacacuuuacugugucaacaagcaagagggccagagccuguaugugaaaggggagcccauuaucaacuucuacgauccucucguuuuucccuccgacgaguucgaugccucuauuagccaggugaaugaaaagaucaaccagucccuggcuuuuauucgcaaaucugacgaacugcuccacaaugucaacgugggaaagagcaccacaaauaucaugaucaccacgauuaucauugugaucauuguuauccugcuucugcucaucgccgucggccuguuccuguauugcaaggccagaugaggacuaguguccaccugucccuccugggcugcuggauugucucguuuuccugccaaauaaacaggaucagcgcuuuacagaucuaaaaaaaaaaaaaaaaaaaaaaaaaaaaaaaaaaaaaaaaaaaaaaaaaaaaaaaaaaaaaaaaugcaucccccccccccccccccccccccccccccccaaaggcucuuuucagagccaccagaauu

SEQ ID NO: 15840 - RNA, 1994 nt, Artificial Sequence
  mRNA product Design b-1 comprising derived and/or modified sequence from HRSV(Memphis-37)__AIY60640.1__F-del_DSCav1_mut3 (opt6)
gggagacggagacggccugcaggaccugcucucucagcccucagccgaggccuacgccgagccgagugcgcagccgacgaccgggaggagccgcagccuucaacucugagguacugugauccgcgcugcccgccgggccgccccaguccgcugcugcggcaccuccuucccucgcgcccucuucgcucgccagcgccuucccugugagccugcgucaccgcggccgccaagcuuaccauggaacuacccauccuaaaaacaaaugccauaaccacaauacucgccgcuguaacacuauguuucgcuaguucacaaaacauuacagaagaauuuuaccaauccacaugcucagcaguaucaaaaggauaccuaggugcacuaagaacaggaugguacacaagcguaauuacaauagaauuauccaauauuaaagaaauaaaauguaacggcacugacgcuaaaguaaaauuaaucaaacaagaacuagacaaauacaaaaacgcaguaacagaccuacaauuacucaugcaauccacacccgcagcaggaucaggcucagccauaugcucagguauagcaguaugcaaaguacuccaccuugaaggagaaguaaacaaaauaaaaaacgcauuacuaucaacaaacaaagcaguaguaucacuaucaaacggagucucugucuuaaccuuuaaaguauuagauuuaaaaaacuacauagacaaacaacuauuaccaauucuaaauaaacaaucauguucuauaccaaauauagaaacaguaauagaauuucaacaaaaaaacaaccgauuacuagaaaucacaagagaauuuucugucaacgccggcguaaccaccccagucucaacauauaugcuaacaaauagugaacucuuauccuuaauaaacgacaugccaauaacaaaugaccaaaaaaaauuaauguccaauaacguacaaauagucagacaacagucauacucaauaauguguaucaucaaagaagaaguauuagcauacguaguucaacuaccccuauacggcguaauagacacaccauguuggaaacuacacacaucacccuuaugcacaaccaauaccaaagaaggaucuaacauaugccuaaccagaacagacagaggcugguacugcgacaacgcagguucagucucauucuucccacaagccgaaacaugcaaaguccaauccaacagaguauuuugcgacacuaugaacucacuaacucuaccuucagaagucaaccuuuguaacauagacauauuuaacccaaaauacgauuguaaaauaaugaccagcaaaacagacgucucaucaagcguaauaacaucacuuggcgcaauagucuccugcuacggaaaaacaaaaugcacagcauccaacaaaaacagaggcaucauaaaaaccuucuccaacggcugcgacuauguaagcaacaaaggugucgauacaguaucaguaggaaacacacuauacugcguaaacaaacaagaaggacaaucacucuacguaaaaggugaaccaaucauaaacuucuacgacccauuaguuuucccaucagacgaauuugaugccuccauaucacaaguaaaugaaaaaauaaaucaaucccuagcauucauacgaaaaucugaugaauuacuucacaaugucaacgucggaaaaucaaccacuaacauaaugauaacaacaauuauaauaguaauaauaguaauacuccuacuauuaauagccgucggucuuuuccuauacugcaaagcacgauaaggacuaguguccaccugucccuccugggcugcuggauugucucguuuuccugccaaauaaacaggaucagcgcuuuacagaucuaaaaaaaaaaaaaaaaaaaaaaaaaaaaaaaaaaaaaaaaaaaaaaaaaaaaaaaaaaaaaaaaugcaucccccccccccccccccccccccccccccccaaaggcucuuuucagagccaccagaauu

SEQ ID NO: 15841 - RNA, 1994 nt, Artificial Sequence
  mRNA product Design b-1 comprising derived and/or modified sequence from HRSV(Memphis-37)__AIY60640.1__F-del_DSCav1_mut3 (opt11)
gggagacggagacggccugcaggaccugcucucucagcccucagccgaggccuacgccgagccgagugcgcagccgacgaccgggaggagccgcagccuucaacucugagguacugugauccgcgcugcccgccgggccgccccaguccgcugcugcggcaccuccuucccucgcgcccucuucgcucgccagcgccuucccugugagccugcgucaccgcggccgccaagcuuaccauggaacuacccauccucaaaaccaacgccaucaccacaauccuagcugccgucacccuaugcuucgcaagcagccaaaacaucacagaagaauuuuaccaaucaaccugcuccgccgucuccaaaggguaccuaggugcccuccgcaccggcugguacacgucugucauaaccaucgaacucuccaacaucaaagaaaucaaauguaacggaacagacgcaaaagucaaacuaaucaaacaagaacuagacaaauacaaaaacgccguaaccgaccuccaacugcucaugcaauccacccccgcugccggcuccgggagcgcaaucugcucuggaaucgccguaugcaaaguccuccaccucgaaggagaaguaaacaaaaucaaaaacgcgcuccucaguaccaacaaagccgucgucucucuaucaaacggcguaucgguccucaccuucaaaguccucgaccuaaagaacuacauagacaaacaacuccuccccauccuaaacaaacaauccugcucaaucccaaacaucgaaaccgugaucgaguuccaacagaaaaacaaccgccuacucgaaaucacccgagaguucucagucaacgcaggagucaccacccccgucucaacauacaugcuuaccaacagcgaacuccuaucccucaucaacgacaugccaaucacaaacgaccaaaagaaacucaugagcaacaacguccagaucguaagacaacaaagcuacagcaucaugugcaucaucaaagaagaaguacuagcauacgucguccaacucccccucuacggcgucaucgacacccccugcuggaaacuccacaccucaccccucugcacaaccaacaccaaagaaggcuccaauaucugccucacacgcaccgaccgcggcugguacugcgacaacgccggcuccgucuccuucuucccucaagccgaaaccugcaaaguccaguccaacagagucuucugcgacaccaugaacucccuaacacuuccaucagaagucaaccuuuguaacaucgacaucuucaaucccaaauacgacuguaaaauaaugaccucaaaaacugacgugucaagcucaguuaucaccucccuaggggccaucgucuccugcuacggcaaaacaaaaugcaccgcauccaacaaaaaucgcggaaucaucaaaacauucuccaacggaugcgacuacgucucaaacaagggaguagauaccguaagcguuggcaacacccucuacugcguaaacaaacaagaaggccaaucacucuacgucaaaggcgaacccauaaucaacuucuacgacccccucgucuucccuuccgaugaguucgacgccagcaucucccaagucaacgagaaaauaaaccagucacucgcauucauccgcaaaagcgacgaacuccuccacaacguaaacguaggcaaauccacaaccaauaucaugauaaccacaaucaucaucgugaucaucgucauccuccuccuccucauagcugucggacucuuccucuacuguaaagcacgcugaggacuaguguccaccugucccuccugggcugcuggauugucucguuuuccugccaaauaaacaggaucagcgcuuuacagaucuaaaaaaaaaaaaaaaaaaaaaaaaaaaaaaaaaaaaaaaaaaaaaaaaaaaaaaaaaaaaaaaaugcaucccccccccccccccccccccccccccccccaaaggcucuuuucagagccaccagaauu

SEQ ID NO: 15842 - RNA, 1814 nt, Artificial Sequence
  mRNA product Design b-2 comprising derived and/or modified sequence from HRSV(Memphis-37)__AIY60640.1__F-del_DSCav1_mut3 (opt1)
gggagagccucugcuggaguccggggaguggcguuggcugcuagagcgaagcuuaccauggagcugcccauccucaagaccaacgccaucaccacgauccuggccgcggugacccugugcuucgccagcucccagaacaucaccgaggaguucuaccagagcacgugcuccgccgucagcaagggcuaccucggcgcccugcgcaccgggugguacaccagcgugaucaccaucgagcuguccaacaucaaggagaucaagugcaacggcaccgacgccaaggugaagcucaucaagcaggagcuggacaaguacaagaacgcggucacggaccugcagcuccugaugcagagcaccccggccgccggcuccgggagcgcgaucugcuccggcaucgccgucugcaaggugcugcaccucgagggcgaggugaacaagaucaagaacgcccugcuguccaccaacaaggccgucgugagccucuccaacggggugagcguccugaccuucaaggugcuggaccucaagaacuacaucgacaagcagcugcugcccauccugaacaagcagagcugcuccauccccaacaucgagaccgucaucgaguuccagcagaagaacaaccgccuccuggagaucacgcgggaguucagcgugaacgcgggcgugaccacccccgucuccaccuacaugcugacgaacagcgagcuccugucccugaucaacgacaugccgaucaccaacgaccagaagaagcucaugagcaacaacgugcagaucgugcgccagcaguccuacagcaucaugugcaucaucaaggaggagguccuggccuacguggugcagcugccccucuacggggucaucgacacccccugcuggaagcugcacaccagcccccugugcacgaccaacaccaaggagggcuccaacaucugccucacccggacggaccgcgggugguacugcgacaacgccggcagcguguccuucuucccgcaggccgagaccugcaagguccagagcaaccggguguucugcgacaccaugaacucccugacccugcccagcgaggugaaccucugcaacaucgacaucuucaaccccaaguacgacugcaagaucaugacguccaagaccgacgucagcuccagcgugaucaccucccugggcgccaucgugagcugcuacgggaagaccaagugcacggcgagcaacaagaaccgcggcaucaucaagaccuucuccaacgggugcgacuacgucagcaacaagggcguggacaccguguccgucggcaacacccuguacugcgugaacaagcaggagggccagagccucuacgugaagggggagcccaucaucaacuucuacgacccgcuggucuuccccuccgacgaguucgacgccagcaucucccaggugaacgagaagaucaaccagagccuggccuucauccggaaguccgacgagcuccugcacaacgugaacgucggcaagagcaccacgaacaucaugaucaccaccaucaucaucgugaucaucgugauccugcugcuccugaucgccgucgggcuguuccucuacugcaaggcccgcugaggacuaguguccaccugucccuccugggcugcuggauugucucguuuuccugccaaauaaacaggaucagcgcuuuacagaucuaaaaaaaaaaaaaaaaaaaaaaaaaaaaaaaaaaaaaaaaaaaaaaaaaaaaaaaaaaaaaaaaugcaucccccccccccccccccccccccccccccccaaaggcucuuuucagagccaccagaauu

SEQ ID NO: 15843 - RNA, 1814 nt, Artificial Sequence
  mRNA product Design b-2 comprising derived and/or modified sequence from HRSV(Memphis-37)__AIY60640.1__F-del_DSCav1_mut3 (opt1)
gggagagccucugcuggaguccggggaguggcguuggcugcuagagcgaagcuuaccauggagcugcccauccucaagaccaacgccaucaccacgauccuggccgcggugacccugugcuucgccagcucccagaacaucaccgaggaguucuaccagagcacgugcuccgccgucagcaagggcuaccucggggcccugcgcaccggcugguacaccuccgugaucaccaucgagcugagcaacaucaaggagaucaagugcaacgggaccgacgccaaggugaagcucaucaagcaggagcuggacaaguacaagaacgcggucacggaccugcagcuccugaugcaguccaccccggccgccggcagcggguccgccaucugcagcggcaucgcggugugcaaggugcugcaccucgagggcgaggucaacaagaucaagaacgcccugcuguccaccaacaaggccguggugagccucuccaacggggucagcgugcugaccuucaaggugcuggaccucaagaacuacaucgacaagcagcugcugcccauccucaacaagcaguccugcagcauccccaacaucgagacggucaucgaguuccagcagaagaacaaccggcugcuggagaucacccgcgaguucuccgugaacgccggcgugaccacccccgucagcacguacaugcucaccaacuccgagcugcugagccucaucaacgacaugccgaucaccaacgaccagaagaagcugaugagcaacaacgugcagaucgugcggcagcaguccuacagcaucaugugcaucaucaaggaggagguccuggccuacguggugcagcucccccuguacggggucaucgacacccccugcuggaagcugcacacgagcccccucugcaccaccaacaccaaggagggcuccaacaucugccugacgcgcaccgaccgggggugguacugcgacaacgcgggcuccgugagcuucuucccgcaggccgagaccugcaaggugcaguccaaccgcgucuucugcgacaccaugaacagccugacgcuccccuccgaggugaaccugugcaacaucgacaucuucaaccccaaguacgacugcaagaucaugaccagcaagaccgacgucuccagcuccgugaucaccagccugggcgccaucguguccugcuacgggaagacgaagugcaccgccagcaacaagaaccggggcaucaucaagaccuucuccaacgggugcgacuacgucagcaacaagggcguggacaccguguccgucggcaacacgcucuacugcgugaacaagcaggaggggcagagccuguacgugaagggcgagcccaucaucaacuucuacgacccgcuggucuuccccagcgacgaguucgacgccuccaucagccaggugaacgagaagaucaaccagucccucgcguucauccgcaagagcgacgagcugcugcacaacgugaacgucgggaaguccaccaccaacaucaugaucaccaccaucaucaucgugaucaucgugauccuccugcugcucaucgccgucggccuguuccuguacugcaaggcccggugaggacuaguguccaccugucccuccugggcugcuggauugucucguuuuccugccaaauaaacaggaucagcgcuuuacagaucuaaaaaaaaaaaaaaaaaaaaaaaaaaaaaaaaaaaaaaaaaaaaaaaaaaaaaaaaaaaaaaaaugcaucccccccccccccccccccccccccccccccaaaggcucuuuucagagccaccagaauu

SEQ ID NO: 15844 - RNA, 1814 nt, Artificial Sequence
  mRNA product Design b-2 comprising derived and/or modified sequence from HRSV(Memphis-37)__AIY60640.1__F-del_DSCav1_mut3 (opt2)
gggagagccucugcuggaguccggggaguggcguuggcugcuagagcgaagcuuaccauggagcuccccauccucaagaccaacgccaucaccaccauccucgccgccgucacccucugcuucgccuccucccagaacaucaccgaggaguucuaccaguccaccugcuccgccgucuccaagggcuaccucggcgcccuccgcaccggcugguacaccuccgucaucaccaucgagcucuccaacaucaaggagaucaagugcaacggcaccgacgccaaggucaagcucaucaagcaggagcucgacaaguacaagaacgccgucaccgaccuccagcuccucaugcaguccacccccgccgccggcuccggcuccgccaucugcuccggcaucgccgucugcaagguccuccaccucgagggcgaggucaacaagaucaagaacgcccuccucuccaccaacaaggccgucgucucccucuccaacggcgucuccguccucaccuucaagguccucgaccucaagaacuacaucgacaagcagcuccuccccauccucaacaagcaguccugcuccauccccaacaucgagaccgucaucgaguuccagcagaagaacaaccgccuccucgagaucacccgcgaguucuccgucaacgccggcgucaccacccccgucuccaccuacaugcucaccaacuccgagcuccucucccucaucaacgacaugcccaucaccaacgaccagaagaagcucauguccaacaacguccagaucguccgccagcaguccuacuccaucaugugcaucaucaaggaggagguccucgccuacgucguccagcucccccucuacggcgucaucgacacccccugcuggaagcuccacaccuccccccucugcaccaccaacaccaaggagggcuccaacaucugccucacccgcaccgaccgcggcugguacugcgacaacgccggcuccgucuccuucuucccccaggccgagaccugcaagguccaguccaaccgcgucuucugcgacaccaugaacucccucacccuccccuccgaggucaaccucugcaacaucgacaucuucaaccccaaguacgacugcaagaucaugaccuccaagaccgacgucuccuccuccgucaucaccucccucggcgccaucgucuccugcuacggcaagaccaagugcaccgccuccaacaagaaccgcggcaucaucaagaccuucuccaacggcugcgacuacgucuccaacaagggcgucgacaccgucuccgucggcaacacccucuacugcgucaacaagcaggagggccagucccucuacgucaagggcgagcccaucaucaacuucuacgacccccucgucuuccccuccgacgaguucgacgccuccaucucccaggucaacgagaagaucaaccagucccucgccuucauccgcaaguccgacgagcuccuccacaacgucaacgucggcaaguccaccaccaacaucaugaucaccaccaucaucaucgucaucaucgucauccuccuccuccucaucgccgucggccucuuccucuacugcaaggcccgcugaggacuaguguccaccugucccuccugggcugcuggauugucucguuuuccugccaaauaaacaggaucagcgcuuuacagaucuaaaaaaaaaaaaaaaaaaaaaaaaaaaaaaaaaaaaaaaaaaaaaaaaaaaaaaaaaaaaaaaaugcaucccccccccccccccccccccccccccccccaaaggcucuuuucagagccaccagaauu

SEQ ID NO: 15845 - RNA, 1814 nt, Artificial Sequence
  mRNA product Design b-2 comprising derived and/or modified sequence from HRSV(Memphis-37)__AIY60640.1__F-del_DSCav1_mut3 (opt3)
gggagagccucugcuggaguccggggaguggcguuggcugcuagagcgaagcuuaccauggagcugcccauccucaagaccaacgccauuacaacuauacuugcugcagugacgcugugcuucgccagcucccagaauaucaccgaagaguuuuaccaaucuacauguucagcggucaguaaaggcuauuugggggcuuuaagaacuggaugguacaccagcguuauuacaaucgaacuguccaacauuaaggagaucaaaugcaaugguaccgacgccaaggugaaacuaauaaagcaggaacucgauaaguauaaaaacgcaguaacugaccugcagcuucugaugcagucuacuccugccgcuggcucggggucagcaaucuguagcggaauugccgugugcaaggucuugcaccucgagggcgaggugaauaaaaucaagaacgcucugcugaguaccaauaaagccguugugucccucucuaacggugucagcguguuaacguucaagguacuggaucuuaagaauuacauugacaaacaauugcugccaauccuaaacaagcaguccuguucaauaccgaauauugaaacuguuaucgaguuucagcagaaaaacaauaggcuccuggaaauuacccgggaguucagugugaacgcgggggucacaacucccgugagcaccuauaugcuuacaaauucugagcuguugucccucaucaacgauaugccuaucaccaacgaccaaaagaaacugaugucaaauaacgugcagauuguccgccagcagagcuacaguauaaugugcaucauuaaggaagagguuuuagcauaugugguacaacugccacucuacggagugaucgauacgcccuguuggaaacuucauacuucuccucugugcacaaccaauacuaaggaaggcuccaacauauguuugacacgaaccgaccguggcugguacugcgauaaugccgggagcgucucguuuuucccacaggcugagacguguaaggugcagucuaacagaguuuucugcgacaccaugaacucccuaacacugcccucagaagugaaucucugcaauauugauaucuucaacccuaaauaugacuguaagaucaugacaaguaaaaccgaugucagcuccucugugauuacaagccugggagccaucguaucaugcuacgguaagacuaaauguaccgcaaguaauaagaacaggggcauuauaaagacauuuuccaaugggugcgacuauguuagcaacaaaggaguggacaccgucucugugggcaauacucuuuacugugucaacaagcaagagggucagucacuguaugugaaaggggagccaaucauuaacuucuacgauccguugguuuuucccagugacgaauuugaugcuagcaucucccaggugaaugagaagaucaaccagucucucgccuuuauucggaaaucggacgaacuguuacacaauguaaacgucggaaagagcacgacaaauauaaugaucaccacuauuaucauugugaucauaguuauccugcuacuccugauugcggugggccuuuucuuguauugcaaggcccgcugaggacuaguguccaccugucccuccugggcugcuggauugucucguuuuccugccaaauaaacaggaucagcgcuuuacagaucuaaaaaaaaaaaaaaaaaaaaaaaaaaaaaaaaaaaaaaaaaaaaaaaaaaaaaaaaaaaaaaaaugcaucccccccccccccccccccccccccccccccaaaggcucuuuucagagccaccagaauu

SEQ ID NO: 15846 - RNA, 1814 nt, Artificial Sequence
  mRNA product Design b-2 comprising derived and/or modified sequence from HRSV(Memphis-37)__AIY60640.1__F-del_DSCav1_mut3 (opt4)
gggagagccucugcuggaguccggggaguggcguuggcugcuagagcgaagcuuaccauggagcugcccauccugaagaccaacgccaucaccaccauccuggccgccgugacccugugcuucgccagcagccagaacaucaccgaggaguucuaccagagcaccugcagcgccgugagcaagggcuaccugggcgcccugagaaccggcugguacaccagcgugaucaccaucgagcugagcaacaucaaggagaucaagugcaacggcaccgacgccaaggugaagcugaucaagcaggagcuggacaaguacaagaacgccgugaccgaccugcagcugcugaugcagagcacccccgccgccggcagcggcagcgccaucugcagcggcaucgccgugugcaaggugcugcaccuggagggcgaggugaacaagaucaagaacgcccugcugagcaccaacaaggccguggugagccugagcaacggcgugagcgugcugaccuucaaggugcuggaccugaagaacuacaucgacaagcagcugcugcccauccugaacaagcagagcugcagcauccccaacaucgagaccgugaucgaguuccagcagaagaacaacagacugcuggagaucaccagagaguucagcgugaacgccggcgugaccacccccgugagcaccuacaugcugaccaacagcgagcugcugagccugaucaacgacaugcccaucaccaacgaccagaagaagcugaugagcaacaacgugcagaucgugagacagcagagcuacagcaucaugugcaucaucaaggaggaggugcuggccuacguggugcagcugccccuguacggcgugaucgacacccccugcuggaagcugcacaccagcccccugugcaccaccaacaccaaggagggcagcaacaucugccugaccagaaccgacagaggcugguacugcgacaacgccggcagcgugagcuucuucccccaggccgagaccugcaaggugcagagcaacagaguguucugcgacaccaugaacagccugacccugcccagcgaggugaaccugugcaacaucgacaucuucaaccccaaguacgacugcaagaucaugaccagcaagaccgacgugagcagcagcgugaucaccagccugggcgccaucgugagcugcuacggcaagaccaagugcaccgccagcaacaagaacagaggcaucaucaagaccuucagcaacggcugcgacuacgugagcaacaagggcguggacaccgugagcgugggcaacacccuguacugcgugaacaagcaggagggccagagccuguacgugaagggcgagcccaucaucaacuucuacgacccccugguguuccccagcgacgaguucgacgccagcaucagccaggugaacgagaagaucaaccagagccuggccuucaucagaaagagcgacgagcugcugcacaacgugaacgugggcaagagcaccaccaacaucaugaucaccaccaucaucaucgugaucaucgugauccugcugcugcugaucgccgugggccuguuccuguacugcaaggccagaugaggacuaguguccaccugucccuccugggcugcuggauugucucguuuuccugccaaauaaacaggaucagcgcuuuacagaucuaaaaaaaaaaaaaaaaaaaaaaaaaaaaaaaaaaaaaaaaaaaaaaaaaaaaaaaaaaaaaaaaugcaucccccccccccccccccccccccccccccccaaaggcucuuuucagagccaccagaauu

SEQ ID NO: 15847 - RNA, 1814 nt, Artificial Sequence
  mRNA product Design b-2 comprising derived and/or modified sequence from HRSV(Memphis-37)__AIY60640.1__F-del_DSCav1_mut3 (opt5)
gggagagccucugcuggaguccggggaguggcguuggcugcuagagcgaagcuuaccauggagcugcccauccucaagaccaacgccauuacaacgauccuggcugccgugacccuuugcuucgcgagcucccagaauauuacagaagaguuuuaccaaucuaccuguagcgcugucuccaaaggcuaucugggggcccucagaacaggaugguacaccucuguuaucacaauugaacugagcaacaucaaggagaucaaaugcaauggcaccgacgccaaggugaaacuuauuaagcaggaacuggauaaguauaaaaacgcugugacggaccuccagcugcugaugcaguccaccccugccgcugggucuggaagcgccaucuguuccggcauugcggucugcaaggugcuccaccuggagggggagguuaauaaaaucaagaacgcccuucugagcacaaauaaagcuguggucucucucuccaacggagugagcguucugaccuucaaggugcuugaucugaagaauuacauugacaaacaacuccugccgauccugaacaagcagucuuguuccauucccaauaucgaaacagucaucgaguuucagcagaaaaacaaucggcuccuggaaauuacccgcgaguucagcgugaacgccggcgugacgacaccugucucuaccuauaugcuuacaaauuccgagcugcucagccugaucaacgauaugcccauuaccaacgaccaaaagaaacuuauguccaauaacguucagaucgugagacagcagucuuacagcauuaugugcaucaucaaggaagaggugcuggcuuaugucgugcaacucccucuguacggcguuauugauacccccuguuggaaacugcauacauccccucucugcacgaccaauacaaaggaagggagcaacaucugucugacccggacagaccgcggaugguacugcgauaaugccggcucuguguccuuuuucccgcaggcggagaccuguaagguccagagcaacagaguguuuugcgacacgaugaacucucuuacacugcccagcgaaguuaaucucugcaauauugauaucuucaacccuaaauaugacuguaagauuaugaccuccaaaaccgaugugucuagcuccgucaucacaagccugggggccaucgugucuugcuacggaaagaccaaauguacagcuuccaauaagaaccggggcauuaucaagacguuuagcaaugggugcgacuaugucucuaacaaaggaguggacaccguuuccgugggcaauacacuuuacugugucaacaagcaagagggccagagccuguaugugaaaggggagcccauuaucaacuucuacgauccucucguuuuucccuccgacgaguucgaugccucuauuagccaggugaaugaaaagaucaaccagucccuggcuuuuauucgcaaaucugacgaacugcuccacaaugucaacgugggaaagagcaccacaaauaucaugaucaccacgauuaucauugugaucauuguuauccugcuucugcucaucgccgucggccuguuccuguauugcaaggccagaugaggacuaguguccaccugucccuccugggcugcuggauugucucguuuuccugccaaauaaacaggaucagcgcuuuacagaucuaaaaaaaaaaaaaaaaaaaaaaaaaaaaaaaaaaaaaaaaaaaaaaaaaaaaaaaaaaaaaaaaugcaucccccccccccccccccccccccccccccccaaaggcucuuuucagagccaccagaauu

SEQ ID NO: 15848 - RNA, 1814 nt, Artificial Sequence
  mRNA product Design b-2 comprising derived and/or modified sequence from HRSV(Memphis-37)__AIY60640.1__F-del_DSCav1_mut3 (opt6)
gggagagccucugcuggaguccggggaguggcguuggcugcuagagcgaagcuuaccauggaacuacccauccuaaaaacaaaugccauaaccacaauacucgccgcuguaacacuauguuucgcuaguucacaaaacauuacagaagaauuuuaccaauccacaugcucagcaguaucaaaaggauaccuaggugcacuaagaacaggaugguacacaagcguaauuacaauagaauuauccaauauuaaagaaauaaaauguaacggcacugacgcuaaaguaaaauuaaucaaacaagaacuagacaaauacaaaaacgcaguaacagaccuacaauuacucaugcaauccacacccgcagcaggaucaggcucagccauaugcucagguauagcaguaugcaaaguacuccaccuugaaggagaaguaaacaaaauaaaaaacgcauuacuaucaacaaacaaagcaguaguaucacuaucaaacggagucucugucuuaaccuuuaaaguauuagauuuaaaaaacuacauagacaaacaacuauuaccaauucuaaauaaacaaucauguucuauaccaaauauagaaacaguaauagaauuucaacaaaaaaacaaccgauuacuagaaaucacaagagaauuuucugucaacgccggcguaaccaccccagucucaacauauaugcuaacaaauagugaacucuuauccuuaauaaacgacaugccaauaacaaaugaccaaaaaaaauuaauguccaauaacguacaaauagucagacaacagucauacucaauaauguguaucaucaaagaagaaguauuagcauacguaguucaacuaccccuauacggcguaauagacacaccauguuggaaacuacacacaucacccuuaugcacaaccaauaccaaagaaggaucuaacauaugccuaaccagaacagacagaggcugguacugcgacaacgcagguucagucucauucuucccacaagccgaaacaugcaaaguccaauccaacagaguauuuugcgacacuaugaacucacuaacucuaccuucagaagucaaccuuuguaacauagacauauuuaacccaaaauacgauuguaaaauaaugaccagcaaaacagacgucucaucaagcguaauaacaucacuuggcgcaauagucuccugcuacggaaaaacaaaaugcacagcauccaacaaaaacagaggcaucauaaaaaccuucuccaacggcugcgacuauguaagcaacaaaggugucgauacaguaucaguaggaaacacacuauacugcguaaacaaacaagaaggacaaucacucuacguaaaaggugaaccaaucauaaacuucuacgacccauuaguuuucccaucagacgaauuugaugccuccauaucacaaguaaaugaaaaaauaaaucaaucccuagcauucauacgaaaaucugaugaauuacuucacaaugucaacgucggaaaaucaaccacuaacauaaugauaacaacaauuauaauaguaauaauaguaauacuccuacuauuaauagccgucggucuuuuccuauacugcaaagcacgauaaggacuaguguccaccugucccuccugggcugcuggauugucucguuuuccugccaaauaaacaggaucagcgcuuuacagaucuaaaaaaaaaaaaaaaaaaaaaaaaaaaaaaaaaaaaaaaaaaaaaaaaaaaaaaaaaaaaaaaaugcaucccccccccccccccccccccccccccccccaaaggcucuuuucagagccaccagaauu

SEQ ID NO: 15849 - RNA, 1814 nt, Artificial Sequence
  mRNA product Design b-2 comprising derived and/or modified sequence from HRSV(Memphis-37)__AIY60640.1__F-del_DSCav1_mut3 (opt11)
gggagagccucugcuggaguccggggaguggcguuggcugcuagagcgaagcuuaccauggaacuacccauccucaaaaccaacgccaucaccacaauccuagcugccgucacccuaugcuucgcaagcagccaaaacaucacagaagaauuuuaccaaucaaccugcuccgccgucuccaaaggguaccuaggugcccuccgcaccggcugguacacgucugucauaaccaucgaacucuccaacaucaaagaaaucaaauguaacggaacagacgcaaaagucaaacuaaucaaacaagaacuagacaaauacaaaaacgccguaaccgaccuccaacugcucaugcaauccacccccgcugccggcuccgggagcgcaaucugcucuggaaucgccguaugcaaaguccuccaccucgaaggagaaguaaacaaaaucaaaaacgcgcuccucaguaccaacaaagccgucgucucucuaucaaacggcguaucgguccucaccuucaaaguccucgaccuaaagaacuacauagacaaacaacuccuccccauccuaaacaaacaauccugcucaaucccaaacaucgaaaccgugaucgaguuccaacagaaaaacaaccgccuacucgaaaucacccgagaguucucagucaacgcaggagucaccacccccgucucaacauacaugcuuaccaacagcgaacuccuaucccucaucaacgacaugccaaucacaaacgaccaaaagaaacucaugagcaacaacguccagaucguaagacaacaaagcuacagcaucaugugcaucaucaaagaagaaguacuagcauacgucguccaacucccccucuacggcgucaucgacacccccugcuggaaacuccacaccucaccccucugcacaaccaacaccaaagaaggcuccaauaucugccucacacgcaccgaccgcggcugguacugcgacaacgccggcuccgucuccuucuucccucaagccgaaaccugcaaaguccaguccaacagagucuucugcgacaccaugaacucccuaacacuuccaucagaagucaaccuuuguaacaucgacaucuucaaucccaaauacgacuguaaaauaaugaccucaaaaacugacgugucaagcucaguuaucaccucccuaggggccaucgucuccugcuacggcaaaacaaaaugcaccgcauccaacaaaaaucgcggaaucaucaaaacauucuccaacggaugcgacuacgucucaaacaagggaguagauaccguaagcguuggcaacacccucuacugcguaaacaaacaagaaggccaaucacucuacgucaaaggcgaacccauaaucaacuucuacgacccccucgucuucccuuccgaugaguucgacgccagcaucucccaagucaacgagaaaauaaaccagucacucgcauucauccgcaaaagcgacgaacuccuccacaacguaaacguaggcaaauccacaaccaauaucaugauaaccacaaucaucaucgugaucaucgucauccuccuccuccucauagcugucggacucuuccucuacuguaaagcacgcugaggacuaguguccaccugucccuccugggcugcuggauugucucguuuuccugccaaauaaacaggaucagcgcuuuacagaucuaaaaaaaaaaaaaaaaaaaaaaaaaaaaaaaaaaaaaaaaaaaaaaaaaaaaaaaaaaaaaaaaugcaucccccccccccccccccccccccccccccccaaaggcucuuuucagagccaccagaauu

SEQ ID NO: 15850 - RNA, 1834 nt, Artificial Sequence
  mRNA product Design b-3 comprising derived and/or modified sequence from HRSV(Memphis-37)__AIY60640.1__F-del_DSCav1_mut3 (opt1)
gggagagucccgcagucggcguccagcggcucugcuuguucgugugugugucguugcaggccuuauucaagcuuaccauggagcugcccauccucaagaccaacgccaucaccacgauccuggccgcggugacccugugcuucgccagcucccagaacaucaccgaggaguucuaccagagcacgugcuccgccgucagcaagggcuaccucggcgcccugcgcaccgggugguacaccagcgugaucaccaucgagcuguccaacaucaaggagaucaagugcaacggcaccgacgccaaggugaagcucaucaagcaggagcuggacaaguacaagaacgcggucacggaccugcagcuccugaugcagagcaccccggccgccggcuccgggagcgcgaucugcuccggcaucgccgucugcaaggugcugcaccucgagggcgaggugaacaagaucaagaacgcccugcuguccaccaacaaggccgucgugagccucuccaacggggugagcguccugaccuucaaggugcuggaccucaagaacuacaucgacaagcagcugcugcccauccugaacaagcagagcugcuccauccccaacaucgagaccgucaucgaguuccagcagaagaacaaccgccuccuggagaucacgcgggaguucagcgugaacgcgggcgugaccacccccgucuccaccuacaugcugacgaacagcgagcuccugucccugaucaacgacaugccgaucaccaacgaccagaagaagcucaugagcaacaacgugcagaucgugcgccagcaguccuacagcaucaugugcaucaucaaggaggagguccuggccuacguggugcagcugccccucuacggggucaucgacacccccugcuggaagcugcacaccagcccccugugcacgaccaacaccaaggagggcuccaacaucugccucacccggacggaccgcgggugguacugcgacaacgccggcagcguguccuucuucccgcaggccgagaccugcaagguccagagcaaccggguguucugcgacaccaugaacucccugacccugcccagcgaggugaaccucugcaacaucgacaucuucaaccccaaguacgacugcaagaucaugacguccaagaccgacgucagcuccagcgugaucaccucccugggcgccaucgugagcugcuacgggaagaccaagugcacggcgagcaacaagaaccgcggcaucaucaagaccuucuccaacgggugcgacuacgucagcaacaagggcguggacaccguguccgucggcaacacccuguacugcgugaacaagcaggagggccagagccucuacgugaagggggagcccaucaucaacuucuacgacccgcuggucuuccccuccgacgaguucgacgccagcaucucccaggugaacgagaagaucaaccagagccuggccuucauccggaaguccgacgagcuccugcacaacgugaacgucggcaagagcaccacgaacaucaugaucaccaccaucaucaucgugaucaucgugauccugcugcuccugaucgccgucgggcuguuccucuacugcaaggcccgcugaggacuaguguccaccugucccuccugggcugcuggauugucucguuuuccugccaaauaaacaggaucagcgcuuuacagaucuaaaaaaaaaaaaaaaaaaaaaaaaaaaaaaaaaaaaaaaaaaaaaaaaaaaaaaaaaaaaaaaaugcaucccccccccccccccccccccccccccccccaaaggcucuuuucagagccaccagaauu

SEQ ID NO: 15851 - RNA, 1834 nt, Artificial Sequence
  mRNA product Design b-3 comprising derived and/or modified sequence from HRSV(Memphis-37)__AIY60640.1__F-del_DSCav1_mut3 (opt1)
gggagagucccgcagucggcguccagcggcucugcuuguucgugugugugucguugcaggccuuauucaagcuuaccauggagcugcccauccucaagaccaacgccaucaccacgauccuggccgcggugacccugugcuucgccagcucccagaacaucaccgaggaguucuaccagagcacgugcuccgccgucagcaagggcuaccucggggcccugcgcaccggcugguacaccuccgugaucaccaucgagcugagcaacaucaaggagaucaagugcaacgggaccgacgccaaggugaagcucaucaagcaggagcuggacaaguacaagaacgcggucacggaccugcagcuccugaugcaguccaccccggccgccggcagcggguccgccaucugcagcggcaucgcggugugcaaggugcugcaccucgagggcgaggucaacaagaucaagaacgcccugcuguccaccaacaaggccguggugagccucuccaacggggucagcgugcugaccuucaaggugcuggaccucaagaacuacaucgacaagcagcugcugcccauccucaacaagcaguccugcagcauccccaacaucgagacggucaucgaguuccagcagaagaacaaccggcugcuggagaucacccgcgaguucuccgugaacgccggcgugaccacccccgucagcacguacaugcucaccaacuccgagcugcugagccucaucaacgacaugccgaucaccaacgaccagaagaagcugaugagcaacaacgugcagaucgugcggcagcaguccuacagcaucaugugcaucaucaaggaggagguccuggccuacguggugcagcucccccuguacggggucaucgacacccccugcuggaagcugcacacgagcccccucugcaccaccaacaccaaggagggcuccaacaucugccugacgcgcaccgaccgggggugguacugcgacaacgcgggcuccgugagcuucuucccgcaggccgagaccugcaaggugcaguccaaccgcgucuucugcgacaccaugaacagccugacgcuccccuccgaggugaaccugugcaacaucgacaucuucaaccccaaguacgacugcaagaucaugaccagcaagaccgacgucuccagcuccgugaucaccagccugggcgccaucguguccugcuacgggaagacgaagugcaccgccagcaacaagaaccggggcaucaucaagaccuucuccaacgggugcgacuacgucagcaacaagggcguggacaccguguccgucggcaacacgcucuacugcgugaacaagcaggaggggcagagccuguacgugaagggcgagcccaucaucaacuucuacgacccgcuggucuuccccagcgacgaguucgacgccuccaucagccaggugaacgagaagaucaaccagucccucgcguucauccgcaagagcgacgagcugcugcacaacgugaacgucgggaaguccaccaccaacaucaugaucaccaccaucaucaucgugaucaucgugauccuccugcugcucaucgccgucggccuguuccuguacugcaaggcccggugaggacuaguguccaccugucccuccugggcugcuggauugucucguuuuccugccaaauaaacaggaucagcgcuuuacagaucuaaaaaaaaaaaaaaaaaaaaaaaaaaaaaaaaaaaaaaaaaaaaaaaaaaaaaaaaaaaaaaaaugcaucccccccccccccccccccccccccccccccaaaggcucuuuucagagccaccagaauu

SEQ ID NO: 15852 - RNA, 1834 nt, Artificial Sequence
  mRNA product Design b-3 comprising derived and/or modified sequence from HRSV(Memphis-37)__AIY60640.1__F-del_DSCav1_mut3 (opt2)
gggagagucccgcagucggcguccagcggcucugcuuguucgugugugugucguugcaggccuuauucaagcuuaccauggagcuccccauccucaagaccaacgccaucaccaccauccucgccgccgucacccucugcuucgccuccucccagaacaucaccgaggaguucuaccaguccaccugcuccgccgucuccaagggcuaccucggcgcccuccgcaccggcugguacaccuccgucaucaccaucgagcucuccaacaucaaggagaucaagugcaacggcaccgacgccaaggucaagcucaucaagcaggagcucgacaaguacaagaacgccgucaccgaccuccagcuccucaugcaguccacccccgccgccggcuccggcuccgccaucugcuccggcaucgccgucugcaagguccuccaccucgagggcgaggucaacaagaucaagaacgcccuccucuccaccaacaaggccgucgucucccucuccaacggcgucuccguccucaccuucaagguccucgaccucaagaacuacaucgacaagcagcuccuccccauccucaacaagcaguccugcuccauccccaacaucgagaccgucaucgaguuccagcagaagaacaaccgccuccucgagaucacccgcgaguucuccgucaacgccggcgucaccacccccgucuccaccuacaugcucaccaacuccgagcuccucucccucaucaacgacaugcccaucaccaacgaccagaagaagcucauguccaacaacguccagaucguccgccagcaguccuacuccaucaugugcaucaucaaggaggagguccucgccuacgucguccagcucccccucuacggcgucaucgacacccccugcuggaagcuccacaccuccccccucugcaccaccaacaccaaggagggcuccaacaucugccucacccgcaccgaccgcggcugguacugcgacaacgccggcuccgucuccuucuucccccaggccgagaccugcaagguccaguccaaccgcgucuucugcgacaccaugaacucccucacccuccccuccgaggucaaccucugcaacaucgacaucuucaaccccaaguacgacugcaagaucaugaccuccaagaccgacgucuccuccuccgucaucaccucccucggcgccaucgucuccugcuacggcaagaccaagugcaccgccuccaacaagaaccgcggcaucaucaagaccuucuccaacggcugcgacuacgucuccaacaagggcgucgacaccgucuccgucggcaacacccucuacugcgucaacaagcaggagggccagucccucuacgucaagggcgagcccaucaucaacuucuacgacccccucgucuuccccuccgacgaguucgacgccuccaucucccaggucaacgagaagaucaaccagucccucgccuucauccgcaaguccgacgagcuccuccacaacgucaacgucggcaaguccaccaccaacaucaugaucaccaccaucaucaucgucaucaucgucauccuccuccuccucaucgccgucggccucuuccucuacugcaaggcccgcugaggacuaguguccaccugucccuccugggcugcuggauugucucguuuuccugccaaauaaacaggaucagcgcuuuacagaucuaaaaaaaaaaaaaaaaaaaaaaaaaaaaaaaaaaaaaaaaaaaaaaaaaaaaaaaaaaaaaaaaugcaucccccccccccccccccccccccccccccccaaaggcucuuuucagagccaccagaauu

SEQ ID NO: 15853 - RNA, 1834 nt, Artificial Sequence
  mRNA product Design b-3 comprising derived and/or modified sequence from HRSV(Memphis-37)__AIY60640.1__F-del_DSCav1_mut3 (opt3)
gggagagucccgcagucggcguccagcggcucugcuuguucgugugugugucguugcaggccuuauucaagcuuaccauggagcugcccauccucaagaccaacgccauuacaacuauacuugcugcagugacgcugugcuucgccagcucccagaauaucaccgaagaguuuuaccaaucuacauguucagcggucaguaaaggcuauuugggggcuuuaagaacuggaugguacaccagcguuauuacaaucgaacuguccaacauuaaggagaucaaaugcaaugguaccgacgccaaggugaaacuaauaaagcaggaacucgauaaguauaaaaacgcaguaacugaccugcagcuucugaugcagucuacuccugccgcuggcucggggucagcaaucuguagcggaauugccgugugcaaggucuugcaccucgagggcgaggugaauaaaaucaagaacgcucugcugaguaccaauaaagccguugugucccucucuaacggugucagcguguuaacguucaagguacuggaucuuaagaauuacauugacaaacaauugcugccaauccuaaacaagcaguccuguucaauaccgaauauugaaacuguuaucgaguuucagcagaaaaacaauaggcuccuggaaauuacccgggaguucagugugaacgcgggggucacaacucccgugagcaccuauaugcuuacaaauucugagcuguugucccucaucaacgauaugccuaucaccaacgaccaaaagaaacugaugucaaauaacgugcagauuguccgccagcagagcuacaguauaaugugcaucauuaaggaagagguuuuagcauaugugguacaacugccacucuacggagugaucgauacgcccuguuggaaacuucauacuucuccucugugcacaaccaauacuaaggaaggcuccaacauauguuugacacgaaccgaccguggcugguacugcgauaaugccgggagcgucucguuuuucccacaggcugagacguguaaggugcagucuaacagaguuuucugcgacaccaugaacucccuaacacugcccucagaagugaaucucugcaauauugauaucuucaacccuaaauaugacuguaagaucaugacaaguaaaaccgaugucagcuccucugugauuacaagccugggagccaucguaucaugcuacgguaagacuaaauguaccgcaaguaauaagaacaggggcauuauaaagacauuuuccaaugggugcgacuauguuagcaacaaaggaguggacaccgucucugugggcaauacucuuuacugugucaacaagcaagagggucagucacuguaugugaaaggggagccaaucauuaacuucuacgauccguugguuuuucccagugacgaauuugaugcuagcaucucccaggugaaugagaagaucaaccagucucucgccuuuauucggaaaucggacgaacuguuacacaauguaaacgucggaaagagcacgacaaauauaaugaucaccacuauuaucauugugaucauaguuauccugcuacuccugauugcggugggccuuuucuuguauugcaaggcccgcugaggacuaguguccaccugucccuccugggcugcuggauugucucguuuuccugccaaauaaacaggaucagcgcuuuacagaucuaaaaaaaaaaaaaaaaaaaaaaaaaaaaaaaaaaaaaaaaaaaaaaaaaaaaaaaaaaaaaaaaugcaucccccccccccccccccccccccccccccccaaaggcucuuuucagagccaccagaauu

SEQ ID NO: 15854 - RNA, 1834 nt, Artificial Sequence
  mRNA product Design b-3 comprising derived and/or modified sequence from HRSV(Memphis-37)__AIY60640.1__F-del_DSCav1_mut3 (opt4)
gggagagucccgcagucggcguccagcggcucugcuuguucgugugugugucguugcaggccuuauucaagcuuaccauggagcugcccauccugaagaccaacgccaucaccaccauccuggccgccgugacccugugcuucgccagcagccagaacaucaccgaggaguucuaccagagcaccugcagcgccgugagcaagggcuaccugggcgcccugagaaccggcugguacaccagcgugaucaccaucgagcugagcaacaucaaggagaucaagugcaacggcaccgacgccaaggugaagcugaucaagcaggagcuggacaaguacaagaacgccgugaccgaccugcagcugcugaugcagagcacccccgccgccggcagcggcagcgccaucugcagcggcaucgccgugugcaaggugcugcaccuggagggcgaggugaacaagaucaagaacgcccugcugagcaccaacaaggccguggugagccugagcaacggcgugagcgugcugaccuucaaggugcuggaccugaagaacuacaucgacaagcagcugcugcccauccugaacaagcagagcugcagcauccccaacaucgagaccgugaucgaguuccagcagaagaacaacagacugcuggagaucaccagagaguucagcgugaacgccggcgugaccacccccgugagcaccuacaugcugaccaacagcgagcugcugagccugaucaacgacaugcccaucaccaacgaccagaagaagcugaugagcaacaacgugcagaucgugagacagcagagcuacagcaucaugugcaucaucaaggaggaggugcuggccuacguggugcagcugccccuguacggcgugaucgacacccccugcuggaagcugcacaccagcccccugugcaccaccaacaccaaggagggcagcaacaucugccugaccagaaccgacagaggcugguacugcgacaacgccggcagcgugagcuucuucccccaggccgagaccugcaaggugcagagcaacagaguguucugcgacaccaugaacagccugacccugcccagcgaggugaaccugugcaacaucgacaucuucaaccccaaguacgacugcaagaucaugaccagcaagaccgacgugagcagcagcgugaucaccagccugggcgccaucgugagcugcuacggcaagaccaagugcaccgccagcaacaagaacagaggcaucaucaagaccuucagcaacggcugcgacuacgugagcaacaagggcguggacaccgugagcgugggcaacacccuguacugcgugaacaagcaggagggccagagccuguacgugaagggcgagcccaucaucaacuucuacgacccccugguguuccccagcgacgaguucgacgccagcaucagccaggugaacgagaagaucaaccagagccuggccuucaucagaaagagcgacgagcugcugcacaacgugaacgugggcaagagcaccaccaacaucaugaucaccaccaucaucaucgugaucaucgugauccugcugcugcugaucgccgugggccuguuccuguacugcaaggccagaugaggacuaguguccaccugucccuccugggcugcuggauugucucguuuuccugccaaauaaacaggaucagcgcuuuacagaucuaaaaaaaaaaaaaaaaaaaaaaaaaaaaaaaaaaaaaaaaaaaaaaaaaaaaaaaaaaaaaaaaugcaucccccccccccccccccccccccccccccccaaaggcucuuuucagagccaccagaauu

SEQ ID NO: 15855 - RNA, 1834 nt, Artificial Sequence
  mRNA product Design b-3 comprising derived and/or modified sequence from HRSV(Memphis-37)__AIY60640.1__F-del_DSCav1_mut3 (opt5)
gggagagucccgcagucggcguccagcggcucugcuuguucgugugugugucguugcaggccuuauucaagcuuaccauggagcugcccauccucaagaccaacgccauuacaacgauccuggcugccgugacccuuugcuucgcgagcucccagaauauuacagaagaguuuuaccaaucuaccuguagcgcugucuccaaaggcuaucugggggcccucagaacaggaugguacaccucuguuaucacaauugaacugagcaacaucaaggagaucaaaugcaauggcaccgacgccaaggugaaacuuauuaagcaggaacuggauaaguauaaaaacgcugugacggaccuccagcugcugaugcaguccaccccugccgcugggucuggaagcgccaucuguuccggcauugcggucugcaaggugcuccaccuggagggggagguuaauaaaaucaagaacgcccuucugagcacaaauaaagcuguggucucucucuccaacggagugagcguucugaccuucaaggugcuugaucugaagaauuacauugacaaacaacuccugccgauccugaacaagcagucuuguuccauucccaauaucgaaacagucaucgaguuucagcagaaaaacaaucggcuccuggaaauuacccgcgaguucagcgugaacgccggcgugacgacaccugucucuaccuauaugcuuacaaauuccgagcugcucagccugaucaacgauaugcccauuaccaacgaccaaaagaaacuuauguccaauaacguucagaucgugagacagcagucuuacagcauuaugugcaucaucaaggaagaggugcuggcuuaugucgugcaacucccucuguacggcguuauugauacccccuguuggaaacugcauacauccccucucugcacgaccaauacaaaggaagggagcaacaucugucugacccggacagaccgcggaugguacugcgauaaugccggcucuguguccuuuuucccgcaggcggagaccuguaagguccagagcaacagaguguuuugcgacacgaugaacucucuuacacugcccagcgaaguuaaucucugcaauauugauaucuucaacccuaaauaugacuguaagauuaugaccuccaaaaccgaugugucuagcuccgucaucacaagccugggggccaucgugucuugcuacggaaagaccaaauguacagcuuccaauaagaaccggggcauuaucaagacguuuagcaaugggugcgacuaugucucuaacaaaggaguggacaccguuuccgugggcaauacacuuuacugugucaacaagcaagagggccagagccuguaugugaaaggggagcccauuaucaacuucuacgauccucucguuuuucccuccgacgaguucgaugccucuauuagccaggugaaugaaaagaucaaccagucccuggcuuuuauucgcaaaucugacgaacugcuccacaaugucaacgugggaaagagcaccacaaauaucaugaucaccacgauuaucauugugaucauuguuauccugcuucugcucaucgccgucggccuguuccuguauugcaaggccagaugaggacuaguguccaccugucccuccugggcugcuggauugucucguuuuccugccaaauaaacaggaucagcgcuuuacagaucuaaaaaaaaaaaaaaaaaaaaaaaaaaaaaaaaaaaaaaaaaaaaaaaaaaaaaaaaaaaaaaaaugcaucccccccccccccccccccccccccccccccaaaggcucuuuucagagccaccagaauu

SEQ ID NO: 15856 - RNA, 1834 nt, Artificial Sequence
  mRNA product Design b-3 comprising derived and/or modified sequence from HRSV(Memphis-37)__AIY60640.1__F-del_DSCav1_mut3 (opt6)
gggagagucccgcagucggcguccagcggcucugcuuguucgugugugugucguugcaggccuuauucaagcuuaccauggaacuacccauccuaaaaacaaaugccauaaccacaauacucgccgcuguaacacuauguuucgcuaguucacaaaacauuacagaagaauuuuaccaauccacaugcucagcaguaucaaaaggauaccuaggugcacuaagaacaggaugguacacaagcguaauuacaauagaauuauccaauauuaaagaaauaaaauguaacggcacugacgcuaaaguaaaauuaaucaaacaagaacuagacaaauacaaaaacgcaguaacagaccuacaauuacucaugcaauccacacccgcagcaggaucaggcucagccauaugcucagguauagcaguaugcaaaguacuccaccuugaaggagaaguaaacaaaauaaaaaacgcauuacuaucaacaaacaaagcaguaguaucacuaucaaacggagucucugucuuaaccuuuaaaguauuagauuuaaaaaacuacauagacaaacaacuauuaccaauucuaaauaaacaaucauguucuauaccaaauauagaaacaguaauagaauuucaacaaaaaaacaaccgauuacuagaaaucacaagagaauuuucugucaacgccggcguaaccaccccagucucaacauauaugcuaacaaauagugaacucuuauccuuaauaaacgacaugccaauaacaaaugaccaaaaaaaauuaauguccaauaacguacaaauagucagacaacagucauacucaauaauguguaucaucaaagaagaaguauuagcauacguaguucaacuaccccuauacggcguaauagacacaccauguuggaaacuacacacaucacccuuaugcacaaccaauaccaaagaaggaucuaacauaugccuaaccagaacagacagaggcugguacugcgacaacgcagguucagucucauucuucccacaagccgaaacaugcaaaguccaauccaacagaguauuuugcgacacuaugaacucacuaacucuaccuucagaagucaaccuuuguaacauagacauauuuaacccaaaauacgauuguaaaauaaugaccagcaaaacagacgucucaucaagcguaauaacaucacuuggcgcaauagucuccugcuacggaaaaacaaaaugcacagcauccaacaaaaacagaggcaucauaaaaaccuucuccaacggcugcgacuauguaagcaacaaaggugucgauacaguaucaguaggaaacacacuauacugcguaaacaaacaagaaggacaaucacucuacguaaaaggugaaccaaucauaaacuucuacgacccauuaguuuucccaucagacgaauuugaugccuccauaucacaaguaaaugaaaaaauaaaucaaucccuagcauucauacgaaaaucugaugaauuacuucacaaugucaacgucggaaaaucaaccacuaacauaaugauaacaacaauuauaauaguaauaauaguaauacuccuacuauuaauagccgucggucuuuuccuauacugcaaagcacgauaaggacuaguguccaccugucccuccugggcugcuggauugucucguuuuccugccaaauaaacaggaucagcgcuuuacagaucuaaaaaaaaaaaaaaaaaaaaaaaaaaaaaaaaaaaaaaaaaaaaaaaaaaaaaaaaaaaaaaaaugcaucccccccccccccccccccccccccccccccaaaggcucuuuucagagccaccagaauu

SEQ ID NO: 15857 - RNA, 1834 nt, Artificial Sequence
  mRNA product Design b-3 comprising derived and/or modified sequence from HRSV(Memphis-37)__AIY60640.1__F-del_DSCav1_mut3 (opt11)
gggagagucccgcagucggcguccagcggcucugcuuguucgugugugugucguugcaggccuuauucaagcuuaccauggaacuacccauccucaaaaccaacgccaucaccacaauccuagcugccgucacccuaugcuucgcaagcagccaaaacaucacagaagaauuuuaccaaucaaccugcuccgccgucuccaaaggguaccuaggugcccuccgcaccggcugguacacgucugucauaaccaucgaacucuccaacaucaaagaaaucaaauguaacggaacagacgcaaaagucaaacuaaucaaacaagaacuagacaaauacaaaaacgccguaaccgaccuccaacugcucaugcaauccacccccgcugccggcuccgggagcgcaaucugcucuggaaucgccguaugcaaaguccuccaccucgaaggagaaguaaacaaaaucaaaaacgcgcuccucaguaccaacaaagccgucgucucucuaucaaacggcguaucgguccucaccuucaaaguccucgaccuaaagaacuacauagacaaacaacuccuccccauccuaaacaaacaauccugcucaaucccaaacaucgaaaccgugaucgaguuccaacagaaaaacaaccgccuacucgaaaucacccgagaguucucagucaacgcaggagucaccacccccgucucaacauacaugcuuaccaacagcgaacuccuaucccucaucaacgacaugccaaucacaaacgaccaaaagaaacucaugagcaacaacguccagaucguaagacaacaaagcuacagcaucaugugcaucaucaaagaagaaguacuagcauacgucguccaacucccccucuacggcgucaucgacacccccugcuggaaacuccacaccucaccccucugcacaaccaacaccaaagaaggcuccaauaucugccucacacgcaccgaccgcggcugguacugcgacaacgccggcuccgucuccuucuucccucaagccgaaaccugcaaaguccaguccaacagagucuucugcgacaccaugaacucccuaacacuuccaucagaagucaaccuuuguaacaucgacaucuucaaucccaaauacgacuguaaaauaaugaccucaaaaacugacgugucaagcucaguuaucaccucccuaggggccaucgucuccugcuacggcaaaacaaaaugcaccgcauccaacaaaaaucgcggaaucaucaaaacauucuccaacggaugcgacuacgucucaaacaagggaguagauaccguaagcguuggcaacacccucuacugcguaaacaaacaagaaggccaaucacucuacgucaaaggcgaacccauaaucaacuucuacgacccccucgucuucccuuccgaugaguucgacgccagcaucucccaagucaacgagaaaauaaaccagucacucgcauucauccgcaaaagcgacgaacuccuccacaacguaaacguaggcaaauccacaaccaauaucaugauaaccacaaucaucaucgugaucaucgucauccuccuccuccucauagcugucggacucuuccucuacuguaaagcacgcugaggacuaguguccaccugucccuccugggcugcuggauugucucguuuuccugccaaauaaacaggaucagcgcuuuacagaucuaaaaaaaaaaaaaaaaaaaaaaaaaaaaaaaaaaaaaaaaaaaaaaaaaaaaaaaaaaaaaaaaugcaucccccccccccccccccccccccccccccccaaaggcucuuuucagagccaccagaauu

SEQ ID NO: 15858 - RNA, 1885 nt, Artificial Sequence
  mRNA product Design b-4 comprising derived and/or modified sequence from HRSV(Memphis-37)__AIY60640.1__F-del_DSCav1_mut3 (opt1)
gggagagucccgcagucggcguccagcggcucugcuuguucgugugugugucguugcaggccuuauucaagcuuaccauggagcugcccauccucaagaccaacgccaucaccacgauccuggccgcggugacccugugcuucgccagcucccagaacaucaccgaggaguucuaccagagcacgugcuccgccgucagcaagggcuaccucggcgcccugcgcaccgggugguacaccagcgugaucaccaucgagcuguccaacaucaaggagaucaagugcaacggcaccgacgccaaggugaagcucaucaagcaggagcuggacaaguacaagaacgcggucacggaccugcagcuccugaugcagagcaccccggccgccggcuccgggagcgcgaucugcuccggcaucgccgucugcaaggugcugcaccucgagggcgaggugaacaagaucaagaacgcccugcuguccaccaacaaggccgucgugagccucuccaacggggugagcguccugaccuucaaggugcuggaccucaagaacuacaucgacaagcagcugcugcccauccugaacaagcagagcugcuccauccccaacaucgagaccgucaucgaguuccagcagaagaacaaccgccuccuggagaucacgcgggaguucagcgugaacgcgggcgugaccacccccgucuccaccuacaugcugacgaacagcgagcuccugucccugaucaacgacaugccgaucaccaacgaccagaagaagcucaugagcaacaacgugcagaucgugcgccagcaguccuacagcaucaugugcaucaucaaggaggagguccuggccuacguggugcagcugccccucuacggggucaucgacacccccugcuggaagcugcacaccagcccccugugcacgaccaacaccaaggagggcuccaacaucugccucacccggacggaccgcgggugguacugcgacaacgccggcagcguguccuucuucccgcaggccgagaccugcaagguccagagcaaccggguguucugcgacaccaugaacucccugacccugcccagcgaggugaaccucugcaacaucgacaucuucaaccccaaguacgacugcaagaucaugacguccaagaccgacgucagcuccagcgugaucaccucccugggcgccaucgugagcugcuacgggaagaccaagugcacggcgagcaacaagaaccgcggcaucaucaagaccuucuccaacgggugcgacuacgucagcaacaagggcguggacaccguguccgucggcaacacccuguacugcgugaacaagcaggagggccagagccucuacgugaagggggagcccaucaucaacuucuacgacccgcuggucuuccccuccgacgaguucgacgccagcaucucccaggugaacgagaagaucaaccagagccuggccuucauccggaaguccgacgagcuccugcacaacgugaacgucggcaagagcaccacgaacaucaugaucaccaccaucaucaucgugaucaucgugauccugcugcuccugaucgccgucgggcuguuccucuacugcaaggcccgcugaggacuaguaauaaggaaacuguaugaaugucugugggcaggaagugaagagauccuucuguaaagguuuuuggaauuaugucugcugaauaauaaacuuuuuugaaauaauaaaucugguagaaaaaugagaucuaaaaaaaaaaaaaaaaaaaaaaaaaaaaaaaaaaaaaaaaaaaaaaaaaaaaaaaaaaaaaaaaugcaucccccccccccccccccccccccccccccccaaaggcucuuuucagagccaccagaauu

SEQ ID NO: 15859 - RNA, 1885 nt, Artificial Sequence
  mRNA product Design b-4 comprising derived and/or modified sequence from HRSV(Memphis-37)__AIY60640.1__F-del_DSCav1_mut3 (opt1)
gggagagucccgcagucggcguccagcggcucugcuuguucgugugugugucguugcaggccuuauucaagcuuaccauggagcugcccauccucaagaccaacgccaucaccacgauccuggccgcggugacccugugcuucgccagcucccagaacaucaccgaggaguucuaccagagcacgugcuccgccgucagcaagggcuaccucggggcccugcgcaccggcugguacaccuccgugaucaccaucgagcugagcaacaucaaggagaucaagugcaacgggaccgacgccaaggugaagcucaucaagcaggagcuggacaaguacaagaacgcggucacggaccugcagcuccugaugcaguccaccccggccgccggcagcggguccgccaucugcagcggcaucgcggugugcaaggugcugcaccucgagggcgaggucaacaagaucaagaacgcccugcuguccaccaacaaggccguggugagccucuccaacggggucagcgugcugaccuucaaggugcuggaccucaagaacuacaucgacaagcagcugcugcccauccucaacaagcaguccugcagcauccccaacaucgagacggucaucgaguuccagcagaagaacaaccggcugcuggagaucacccgcgaguucuccgugaacgccggcgugaccacccccgucagcacguacaugcucaccaacuccgagcugcugagccucaucaacgacaugccgaucaccaacgaccagaagaagcugaugagcaacaacgugcagaucgugcggcagcaguccuacagcaucaugugcaucaucaaggaggagguccuggccuacguggugcagcucccccuguacggggucaucgacacccccugcuggaagcugcacacgagcccccucugcaccaccaacaccaaggagggcuccaacaucugccugacgcgcaccgaccgggggugguacugcgacaacgcgggcuccgugagcuucuucccgcaggccgagaccugcaaggugcaguccaaccgcgucuucugcgacaccaugaacagccugacgcuccccuccgaggugaaccugugcaacaucgacaucuucaaccccaaguacgacugcaagaucaugaccagcaagaccgacgucuccagcuccgugaucaccagccugggcgccaucguguccugcuacgggaagacgaagugcaccgccagcaacaagaaccggggcaucaucaagaccuucuccaacgggugcgacuacgucagcaacaagggcguggacaccguguccgucggcaacacgcucuacugcgugaacaagcaggaggggcagagccuguacgugaagggcgagcccaucaucaacuucuacgacccgcuggucuuccccagcgacgaguucgacgccuccaucagccaggugaacgagaagaucaaccagucccucgcguucauccgcaagagcgacgagcugcugcacaacgugaacgucgggaaguccaccaccaacaucaugaucaccaccaucaucaucgugaucaucgugauccuccugcugcucaucgccgucggccuguuccuguacugcaaggcccggugaggacuaguaauaaggaaacuguaugaaugucugugggcaggaagugaagagauccuucuguaaagguuuuuggaauuaugucugcugaauaauaaacuuuuuugaaauaauaaaucugguagaaaaaugagaucuaaaaaaaaaaaaaaaaaaaaaaaaaaaaaaaaaaaaaaaaaaaaaaaaaaaaaaaaaaaaaaaaugcaucccccccccccccccccccccccccccccccaaaggcucuuuucagagccaccagaauu

SEQ ID NO: 15860 - RNA, 1885 nt, Artificial Sequence
  mRNA product Design b-4 comprising derived and/or modified sequence from HRSV(Memphis-37)__AIY60640.1__F-del_DSCav1_mut3 (opt2)
gggagagucccgcagucggcguccagcggcucugcuuguucgugugugugucguugcaggccuuauucaagcuuaccauggagcuccccauccucaagaccaacgccaucaccaccauccucgccgccgucacccucugcuucgccuccucccagaacaucaccgaggaguucuaccaguccaccugcuccgccgucuccaagggcuaccucggcgcccuccgcaccggcugguacaccuccgucaucaccaucgagcucuccaacaucaaggagaucaagugcaacggcaccgacgccaaggucaagcucaucaagcaggagcucgacaaguacaagaacgccgucaccgaccuccagcuccucaugcaguccacccccgccgccggcuccggcuccgccaucugcuccggcaucgccgucugcaagguccuccaccucgagggcgaggucaacaagaucaagaacgcccuccucuccaccaacaaggccgucgucucccucuccaacggcgucuccguccucaccuucaagguccucgaccucaagaacuacaucgacaagcagcuccuccccauccucaacaagcaguccugcuccauccccaacaucgagaccgucaucgaguuccagcagaagaacaaccgccuccucgagaucacccgcgaguucuccgucaacgccggcgucaccacccccgucuccaccuacaugcucaccaacuccgagcuccucucccucaucaacgacaugcccaucaccaacgaccagaagaagcucauguccaacaacguccagaucguccgccagcaguccuacuccaucaugugcaucaucaaggaggagguccucgccuacgucguccagcucccccucuacggcgucaucgacacccccugcuggaagcuccacaccuccccccucugcaccaccaacaccaaggagggcuccaacaucugccucacccgcaccgaccgcggcugguacugcgacaacgccggcuccgucuccuucuucccccaggccgagaccugcaagguccaguccaaccgcgucuucugcgacaccaugaacucccucacccuccccuccgaggucaaccucugcaacaucgacaucuucaaccccaaguacgacugcaagaucaugaccuccaagaccgacgucuccuccuccgucaucaccucccucggcgccaucgucuccugcuacggcaagaccaagugcaccgccuccaacaagaaccgcggcaucaucaagaccuucuccaacggcugcgacuacgucuccaacaagggcgucgacaccgucuccgucggcaacacccucuacugcgucaacaagcaggagggccagucccucuacgucaagggcgagcccaucaucaacuucuacgacccccucgucuuccccuccgacgaguucgacgccuccaucucccaggucaacgagaagaucaaccagucccucgccuucauccgcaaguccgacgagcuccuccacaacgucaacgucggcaaguccaccaccaacaucaugaucaccaccaucaucaucgucaucaucgucauccuccuccuccucaucgccgucggccucuuccucuacugcaaggcccgcugaggacuaguaauaaggaaacuguaugaaugucugugggcaggaagugaagagauccuucuguaaagguuuuuggaauuaugucugcugaauaauaaacuuuuuugaaauaauaaaucugguagaaaaaugagaucuaaaaaaaaaaaaaaaaaaaaaaaaaaaaaaaaaaaaaaaaaaaaaaaaaaaaaaaaaaaaaaaaugcaucccccccccccccccccccccccccccccccaaaggcucuuuucagagccaccagaauu

SEQ ID NO: 15861 - RNA, 1885 nt, Artificial Sequence
  mRNA product Design b-4 comprising derived and/or modified sequence from HRSV(Memphis-37)__AIY60640.1__F-del_DSCav1_mut3 (opt3)
gggagagucccgcagucggcguccagcggcucugcuuguucgugugugugucguugcaggccuuauucaagcuuaccauggagcugcccauccucaagaccaacgccauuacaacuauacuugcugcagugacgcugugcuucgccagcucccagaauaucaccgaagaguuuuaccaaucuacauguucagcggucaguaaaggcuauuugggggcuuuaagaacuggaugguacaccagcguuauuacaaucgaacuguccaacauuaaggagaucaaaugcaaugguaccgacgccaaggugaaacuaauaaagcaggaacucgauaaguauaaaaacgcaguaacugaccugcagcuucugaugcagucuacuccugccgcuggcucggggucagcaaucuguagcggaauugccgugugcaaggucuugcaccucgagggcgaggugaauaaaaucaagaacgcucugcugaguaccaauaaagccguugugucccucucuaacggugucagcguguuaacguucaagguacuggaucuuaagaauuacauugacaaacaauugcugccaauccuaaacaagcaguccuguucaauaccgaauauugaaacuguuaucgaguuucagcagaaaaacaauaggcuccuggaaauuacccgggaguucagugugaacgcgggggucacaacucccgugagcaccuauaugcuuacaaauucugagcuguugucccucaucaacgauaugccuaucaccaacgaccaaaagaaacugaugucaaauaacgugcagauuguccgccagcagagcuacaguauaaugugcaucauuaaggaagagguuuuagcauaugugguacaacugccacucuacggagugaucgauacgcccuguuggaaacuucauacuucuccucugugcacaaccaauacuaaggaaggcuccaacauauguuugacacgaaccgaccguggcugguacugcgauaaugccgggagcgucucguuuuucccacaggcugagacguguaaggugcagucuaacagaguuuucugcgacaccaugaacucccuaacacugcccucagaagugaaucucugcaauauugauaucuucaacccuaaauaugacuguaagaucaugacaaguaaaaccgaugucagcuccucugugauuacaagccugggagccaucguaucaugcuacgguaagacuaaauguaccgcaaguaauaagaacaggggcauuauaaagacauuuuccaaugggugcgacuauguuagcaacaaaggaguggacaccgucucugugggcaauacucuuuacugugucaacaagcaagagggucagucacuguaugugaaaggggagccaaucauuaacuucuacgauccguugguuuuucccagugacgaauuugaugcuagcaucucccaggugaaugagaagaucaaccagucucucgccuuuauucggaaaucggacgaacuguuacacaauguaaacgucggaaagagcacgacaaauauaaugaucaccacuauuaucauugugaucauaguuauccugcuacuccugauugcggugggccuuuucuuguauugcaaggcccgcugaggacuaguaauaaggaaacuguaugaaugucugugggcaggaagugaagagauccuucuguaaagguuuuuggaauuaugucugcugaauaauaaacuuuuuugaaauaauaaaucugguagaaaaaugagaucuaaaaaaaaaaaaaaaaaaaaaaaaaaaaaaaaaaaaaaaaaaaaaaaaaaaaaaaaaaaaaaaaugcaucccccccccccccccccccccccccccccccaaaggcucuuuucagagccaccagaauu

SEQ ID NO: 15862 - RNA, 1885 nt, Artificial Sequence
  mRNA product Design b-4 comprising derived and/or modified sequence from HRSV(Memphis-37)__AIY60640.1__F-del_DSCav1_mut3 (opt4)
gggagagucccgcagucggcguccagcggcucugcuuguucgugugugugucguugcaggccuuauucaagcuuaccauggagcugcccauccugaagaccaacgccaucaccaccauccuggccgccgugacccugugcuucgccagcagccagaacaucaccgaggaguucuaccagagcaccugcagcgccgugagcaagggcuaccugggcgcccugagaaccggcugguacaccagcgugaucaccaucgagcugagcaacaucaaggagaucaagugcaacggcaccgacgccaaggugaagcugaucaagcaggagcuggacaaguacaagaacgccgugaccgaccugcagcugcugaugcagagcacccccgccgccggcagcggcagcgccaucugcagcggcaucgccgugugcaaggugcugcaccuggagggcgaggugaacaagaucaagaacgcccugcugagcaccaacaaggccguggugagccugagcaacggcgugagcgugcugaccuucaaggugcuggaccugaagaacuacaucgacaagcagcugcugcccauccugaacaagcagagcugcagcauccccaacaucgagaccgugaucgaguuccagcagaagaacaacagacugcuggagaucaccagagaguucagcgugaacgccggcgugaccacccccgugagcaccuacaugcugaccaacagcgagcugcugagccugaucaacgacaugcccaucaccaacgaccagaagaagcugaugagcaacaacgugcagaucgugagacagcagagcuacagcaucaugugcaucaucaaggaggaggugcuggccuacguggugcagcugccccuguacggcgugaucgacacccccugcuggaagcugcacaccagcccccugugcaccaccaacaccaaggagggcagcaacaucugccugaccagaaccgacagaggcugguacugcgacaacgccggcagcgugagcuucuucccccaggccgagaccugcaaggugcagagcaacagaguguucugcgacaccaugaacagccugacccugcccagcgaggugaaccugugcaacaucgacaucuucaaccccaaguacgacugcaagaucaugaccagcaagaccgacgugagcagcagcgugaucaccagccugggcgccaucgugagcugcuacggcaagaccaagugcaccgccagcaacaagaacagaggcaucaucaagaccuucagcaacggcugcgacuacgugagcaacaagggcguggacaccgugagcgugggcaacacccuguacugcgugaacaagcaggagggccagagccuguacgugaagggcgagcccaucaucaacuucuacgacccccugguguuccccagcgacgaguucgacgccagcaucagccaggugaacgagaagaucaaccagagccuggccuucaucagaaagagcgacgagcugcugcacaacgugaacgugggcaagagcaccaccaacaucaugaucaccaccaucaucaucgugaucaucgugauccugcugcugcugaucgccgugggccuguuccuguacugcaaggccagaugaggacuaguaauaaggaaacuguaugaaugucugugggcaggaagugaagagauccuucuguaaagguuuuuggaauuaugucugcugaauaauaaacuuuuuugaaauaauaaaucugguagaaaaaugagaucuaaaaaaaaaaaaaaaaaaaaaaaaaaaaaaaaaaaaaaaaaaaaaaaaaaaaaaaaaaaaaaaaugcaucccccccccccccccccccccccccccccccaaaggcucuuuucagagccaccagaauu

SEQ ID NO: 15863 - RNA, 1885 nt, Artificial Sequence
  mRNA product Design b-4 comprising derived and/or modified sequence from HRSV(Memphis-37)__AIY60640.1__F-del_DSCav1_mut3 (opt5)
gggagagucccgcagucggcguccagcggcucugcuuguucgugugugugucguugcaggccuuauucaagcuuaccauggagcugcccauccucaagaccaacgccauuacaacgauccuggcugccgugacccuuugcuucgcgagcucccagaauauuacagaagaguuuuaccaaucuaccuguagcgcugucuccaaaggcuaucugggggcccucagaacaggaugguacaccucuguuaucacaauugaacugagcaacaucaaggagaucaaaugcaauggcaccgacgccaaggugaaacuuauuaagcaggaacuggauaaguauaaaaacgcugugacggaccuccagcugcugaugcaguccaccccugccgcugggucuggaagcgccaucuguuccggcauugcggucugcaaggugcuccaccuggagggggagguuaauaaaaucaagaacgcccuucugagcacaaauaaagcuguggucucucucuccaacggagugagcguucugaccuucaaggugcuugaucugaagaauuacauugacaaacaacuccugccgauccugaacaagcagucuuguuccauucccaauaucgaaacagucaucgaguuucagcagaaaaacaaucggcuccuggaaauuacccgcgaguucagcgugaacgccggcgugacgacaccugucucuaccuauaugcuuacaaauuccgagcugcucagccugaucaacgauaugcccauuaccaacgaccaaaagaaacuuauguccaauaacguucagaucgugagacagcagucuuacagcauuaugugcaucaucaaggaagaggugcuggcuuaugucgugcaacucccucuguacggcguuauugauacccccuguuggaaacugcauacauccccucucugcacgaccaauacaaaggaagggagcaacaucugucugacccggacagaccgcggaugguacugcgauaaugccggcucuguguccuuuuucccgcaggcggagaccuguaagguccagagcaacagaguguuuugcgacacgaugaacucucuuacacugcccagcgaaguuaaucucugcaauauugauaucuucaacccuaaauaugacuguaagauuaugaccuccaaaaccgaugugucuagcuccgucaucacaagccugggggccaucgugucuugcuacggaaagaccaaauguacagcuuccaauaagaaccggggcauuaucaagacguuuagcaaugggugcgacuaugucucuaacaaaggaguggacaccguuuccgugggcaauacacuuuacugugucaacaagcaagagggccagagccuguaugugaaaggggagcccauuaucaacuucuacgauccucucguuuuucccuccgacgaguucgaugccucuauuagccaggugaaugaaaagaucaaccagucccuggcuuuuauucgcaaaucugacgaacugcuccacaaugucaacgugggaaagagcaccacaaauaucaugaucaccacgauuaucauugugaucauuguuauccugcuucugcucaucgccgucggccuguuccuguauugcaaggccagaugaggacuaguaauaaggaaacuguaugaaugucugugggcaggaagugaagagauccuucuguaaagguuuuuggaauuaugucugcugaauaauaaacuuuuuugaaauaauaaaucugguagaaaaaugagaucuaaaaaaaaaaaaaaaaaaaaaaaaaaaaaaaaaaaaaaaaaaaaaaaaaaaaaaaaaaaaaaaaugcaucccccccccccccccccccccccccccccccaaaggcucuuuucagagccaccagaauu

SEQ ID NO: 15864 - RNA, 1885 nt, Artificial Sequence
  mRNA product Design b-4 comprising derived and/or modified sequence from HRSV(Memphis-37)__AIY60640.1__F-del_DSCav1_mut3 (opt6)
gggagagucccgcagucggcguccagcggcucugcuuguucgugugugugucguugcaggccuuauucaagcuuaccauggaacuacccauccuaaaaacaaaugccauaaccacaauacucgccgcuguaacacuauguuucgcuaguucacaaaacauuacagaagaauuuuaccaauccacaugcucagcaguaucaaaaggauaccuaggugcacuaagaacaggaugguacacaagcguaauuacaauagaauuauccaauauuaaagaaauaaaauguaacggcacugacgcuaaaguaaaauuaaucaaacaagaacuagacaaauacaaaaacgcaguaacagaccuacaauuacucaugcaauccacacccgcagcaggaucaggcucagccauaugcucagguauagcaguaugcaaaguacuccaccuugaaggagaaguaaacaaaauaaaaaacgcauuacuaucaacaaacaaagcaguaguaucacuaucaaacggagucucugucuuaaccuuuaaaguauuagauuuaaaaaacuacauagacaaacaacuauuaccaauucuaaauaaacaaucauguucuauaccaaauauagaaacaguaauagaauuucaacaaaaaaacaaccgauuacuagaaaucacaagagaauuuucugucaacgccggcguaaccaccccagucucaacauauaugcuaacaaauagugaacucuuauccuuaauaaacgacaugccaauaacaaaugaccaaaaaaaauuaauguccaauaacguacaaauagucagacaacagucauacucaauaauguguaucaucaaagaagaaguauuagcauacguaguucaacuaccccuauacggcguaauagacacaccauguuggaaacuacacacaucacccuuaugcacaaccaauaccaaagaaggaucuaacauaugccuaaccagaacagacagaggcugguacugcgacaacgcagguucagucucauucuucccacaagccgaaacaugcaaaguccaauccaacagaguauuuugcgacacuaugaacucacuaacucuaccuucagaagucaaccuuuguaacauagacauauuuaacccaaaauacgauuguaaaauaaugaccagcaaaacagacgucucaucaagcguaauaacaucacuuggcgcaauagucuccugcuacggaaaaacaaaaugcacagcauccaacaaaaacagaggcaucauaaaaaccuucuccaacggcugcgacuauguaagcaacaaaggugucgauacaguaucaguaggaaacacacuauacugcguaaacaaacaagaaggacaaucacucuacguaaaaggugaaccaaucauaaacuucuacgacccauuaguuuucccaucagacgaauuugaugccuccauaucacaaguaaaugaaaaaauaaaucaaucccuagcauucauacgaaaaucugaugaauuacuucacaaugucaacgucggaaaaucaaccacuaacauaaugauaacaacaauuauaauaguaauaauaguaauacuccuacuauuaauagccgucggucuuuuccuauacugcaaagcacgauaaggacuaguaauaaggaaacuguaugaaugucugugggcaggaagugaagagauccuucuguaaagguuuuuggaauuaugucugcugaauaauaaacuuuuuugaaauaauaaaucugguagaaaaaugagaucuaaaaaaaaaaaaaaaaaaaaaaaaaaaaaaaaaaaaaaaaaaaaaaaaaaaaaaaaaaaaaaaaugcaucccccccccccccccccccccccccccccccaaaggcucuuuucagagccaccagaauu

SEQ ID NO: 15865 - RNA, 1885 nt, Artificial Sequence
  mRNA product Design b-4 comprising derived and/or modified sequence from HRSV(Memphis-37)__AIY60640.1__F-del_DSCav1_mut3 (opt11)
gggagagucccgcagucggcguccagcggcucugcuuguucgugugugugucguugcaggccuuauucaagcuuaccauggaacuacccauccucaaaaccaacgccaucaccacaauccuagcugccgucacccuaugcuucgcaagcagccaaaacaucacagaagaauuuuaccaaucaaccugcuccgccgucuccaaaggguaccuaggugcccuccgcaccggcugguacacgucugucauaaccaucgaacucuccaacaucaaagaaaucaaauguaacggaacagacgcaaaagucaaacuaaucaaacaagaacuagacaaauacaaaaacgccguaaccgaccuccaacugcucaugcaauccacccccgcugccggcuccgggagcgcaaucugcucuggaaucgccguaugcaaaguccuccaccucgaaggagaaguaaacaaaaucaaaaacgcgcuccucaguaccaacaaagccgucgucucucuaucaaacggcguaucgguccucaccuucaaaguccucgaccuaaagaacuacauagacaaacaacuccuccccauccuaaacaaacaauccugcucaaucccaaacaucgaaaccgugaucgaguuccaacagaaaaacaaccgccuacucgaaaucacccgagaguucucagucaacgcaggagucaccacccccgucucaacauacaugcuuaccaacagcgaacuccuaucccucaucaacgacaugccaaucacaaacgaccaaaagaaacucaugagcaacaacguccagaucguaagacaacaaagcuacagcaucaugugcaucaucaaagaagaaguacuagcauacgucguccaacucccccucuacggcgucaucgacacccccugcuggaaacuccacaccucaccccucugcacaaccaacaccaaagaaggcuccaauaucugccucacacgcaccgaccgcggcugguacugcgacaacgccggcuccgucuccuucuucccucaagccgaaaccugcaaaguccaguccaacagagucuucugcgacaccaugaacucccuaacacuuccaucagaagucaaccuuuguaacaucgacaucuucaaucccaaauacgacuguaaaauaaugaccucaaaaacugacgugucaagcucaguuaucaccucccuaggggccaucgucuccugcuacggcaaaacaaaaugcaccgcauccaacaaaaaucgcggaaucaucaaaacauucuccaacggaugcgacuacgucucaaacaagggaguagauaccguaagcguuggcaacacccucuacugcguaaacaaacaagaaggccaaucacucuacgucaaaggcgaacccauaaucaacuucuacgacccccucgucuucccuuccgaugaguucgacgccagcaucucccaagucaacgagaaaauaaaccagucacucgcauucauccgcaaaagcgacgaacuccuccacaacguaaacguaggcaaauccacaaccaauaucaugauaaccacaaucaucaucgugaucaucgucauccuccuccuccucauagcugucggacucuuccucuacuguaaagcacgcugaggacuaguaauaaggaaacuguaugaaugucugugggcaggaagugaagagauccuucuguaaagguuuuuggaauuaugucugcugaauaauaaacuuuuuugaaauaauaaaucugguagaaaaaugagaucuaaaaaaaaaaaaaaaaaaaaaaaaaaaaaaaaaaaaaaaaaaaaaaaaaaaaaaaaaaaaaaaaugcaucccccccccccccccccccccccccccccccaaaggcucuuuucagagccaccagaauu

SEQ ID NO: 15866 - RNA, 1947 nt, Artificial Sequence
  mRNA product Design b-5 comprising derived and/or modified sequence from HRSV(Memphis-37)__AIY60640.1__F-del_DSCav1_mut3 (opt1)
gggagacuccugucgggcggaaguaggaggaguagaguuuaaaaacaguacucuuuuuccgguucgggacguaguugaagcaacgacaagccggauaaccgcucuugagacaggaagcuuaccauggagcugcccauccucaagaccaacgccaucaccacgauccuggccgcggugacccugugcuucgccagcucccagaacaucaccgaggaguucuaccagagcacgugcuccgccgucagcaagggcuaccucggcgcccugcgcaccgggugguacaccagcgugaucaccaucgagcuguccaacaucaaggagaucaagugcaacggcaccgacgccaaggugaagcucaucaagcaggagcuggacaaguacaagaacgcggucacggaccugcagcuccugaugcagagcaccccggccgccggcuccgggagcgcgaucugcuccggcaucgccgucugcaaggugcugcaccucgagggcgaggugaacaagaucaagaacgcccugcuguccaccaacaaggccgucgugagccucuccaacggggugagcguccugaccuucaaggugcuggaccucaagaacuacaucgacaagcagcugcugcccauccugaacaagcagagcugcuccauccccaacaucgagaccgucaucgaguuccagcagaagaacaaccgccuccuggagaucacgcgggaguucagcgugaacgcgggcgugaccacccccgucuccaccuacaugcugacgaacagcgagcuccugucccugaucaacgacaugccgaucaccaacgaccagaagaagcucaugagcaacaacgugcagaucgugcgccagcaguccuacagcaucaugugcaucaucaaggaggagguccuggccuacguggugcagcugccccucuacggggucaucgacacccccugcuggaagcugcacaccagcccccugugcacgaccaacaccaaggagggcuccaacaucugccucacccggacggaccgcgggugguacugcgacaacgccggcagcguguccuucuucccgcaggccgagaccugcaagguccagagcaaccggguguucugcgacaccaugaacucccugacccugcccagcgaggugaaccucugcaacaucgacaucuucaaccccaaguacgacugcaagaucaugacguccaagaccgacgucagcuccagcgugaucaccucccugggcgccaucgugagcugcuacgggaagaccaagugcacggcgagcaacaagaaccgcggcaucaucaagaccuucuccaacgggugcgacuacgucagcaacaagggcguggacaccguguccgucggcaacacccuguacugcgugaacaagcaggagggccagagccucuacgugaagggggagcccaucaucaacuucuacgacccgcuggucuuccccuccgacgaguucgacgccagcaucucccaggugaacgagaagaucaaccagagccuggccuucauccggaaguccgacgagcuccugcacaacgugaacgucggcaagagcaccacgaacaucaugaucaccaccaucaucaucgugaucaucgugauccugcugcuccugaucgccgucgggcuguuccucuacugcaaggcccgcugaggacuaguacuggcugcaucucccuuuccucuguccuccauccuucucccaggauggugaagggggaccugguacccagugauccccaccccaggauccuaaaucaugacuuaccugcuaauaaaaacucauuggaaaagugagaagaucuaaaaaaaaaaaaaaaaaaaaaaaaaaaaaaaaaaaaaaaaaaaaaaaaaaaaaaaaaaaaaaaaugcaucccccccccccccccccccccccccccccccaaaggcucuuuucagagccaccagaauu

SEQ ID NO: 15867 - RNA, 1947 nt, Artificial Sequence
  mRNA product Design b-5 comprising derived and/or modified sequence from HRSV(Memphis-37)__AIY60640.1__F-del_DSCav1_mut3 (opt1)
gggagacuccugucgggcggaaguaggaggaguagaguuuaaaaacaguacucuuuuuccgguucgggacguaguugaagcaacgacaagccggauaaccgcucuugagacaggaagcuuaccauggagcugcccauccucaagaccaacgccaucaccacgauccuggccgcggugacccugugcuucgccagcucccagaacaucaccgaggaguucuaccagagcacgugcuccgccgucagcaagggcuaccucggggcccugcgcaccggcugguacaccuccgugaucaccaucgagcugagcaacaucaaggagaucaagugcaacgggaccgacgccaaggugaagcucaucaagcaggagcuggacaaguacaagaacgcggucacggaccugcagcuccugaugcaguccaccccggccgccggcagcggguccgccaucugcagcggcaucgcggugugcaaggugcugcaccucgagggcgaggucaacaagaucaagaacgcccugcuguccaccaacaaggccguggugagccucuccaacggggucagcgugcugaccuucaaggugcuggaccucaagaacuacaucgacaagcagcugcugcccauccucaacaagcaguccugcagcauccccaacaucgagacggucaucgaguuccagcagaagaacaaccggcugcuggagaucacccgcgaguucuccgugaacgccggcgugaccacccccgucagcacguacaugcucaccaacuccgagcugcugagccucaucaacgacaugccgaucaccaacgaccagaagaagcugaugagcaacaacgugcagaucgugcggcagcaguccuacagcaucaugugcaucaucaaggaggagguccuggccuacguggugcagcucccccuguacggggucaucgacacccccugcuggaagcugcacacgagcccccucugcaccaccaacaccaaggagggcuccaacaucugccugacgcgcaccgaccgggggugguacugcgacaacgcgggcuccgugagcuucuucccgcaggccgagaccugcaaggugcaguccaaccgcgucuucugcgacaccaugaacagccugacgcuccccuccgaggugaaccugugcaacaucgacaucuucaaccccaaguacgacugcaagaucaugaccagcaagaccgacgucuccagcuccgugaucaccagccugggcgccaucguguccugcuacgggaagacgaagugcaccgccagcaacaagaaccggggcaucaucaagaccuucuccaacgggugcgacuacgucagcaacaagggcguggacaccguguccgucggcaacacgcucuacugcgugaacaagcaggaggggcagagccuguacgugaagggcgagcccaucaucaacuucuacgacccgcuggucuuccccagcgacgaguucgacgccuccaucagccaggugaacgagaagaucaaccagucccucgcguucauccgcaagagcgacgagcugcugcacaacgugaacgucgggaaguccaccaccaacaucaugaucaccaccaucaucaucgugaucaucgugauccuccugcugcucaucgccgucggccuguuccuguacugcaaggcccggugaggacuaguacuggcugcaucucccuuuccucuguccuccauccuucucccaggauggugaagggggaccugguacccagugauccccaccccaggauccuaaaucaugacuuaccugcuaauaaaaacucauuggaaaagugagaagaucuaaaaaaaaaaaaaaaaaaaaaaaaaaaaaaaaaaaaaaaaaaaaaaaaaaaaaaaaaaaaaaaaugcaucccccccccccccccccccccccccccccccaaaggcucuuuucagagccaccagaauu

SEQ ID NO: 15868 - RNA, 1947 nt, Artificial Sequence
  mRNA product Design b-5 comprising derived and/or modified sequence from HRSV(Memphis-37)__AIY60640.1__F-del_DSCav1_mut3 (opt2)
gggagacuccugucgggcggaaguaggaggaguagaguuuaaaaacaguacucuuuuuccgguucgggacguaguugaagcaacgacaagccggauaaccgcucuugagacaggaagcuuaccauggagcuccccauccucaagaccaacgccaucaccaccauccucgccgccgucacccucugcuucgccuccucccagaacaucaccgaggaguucuaccaguccaccugcuccgccgucuccaagggcuaccucggcgcccuccgcaccggcugguacaccuccgucaucaccaucgagcucuccaacaucaaggagaucaagugcaacggcaccgacgccaaggucaagcucaucaagcaggagcucgacaaguacaagaacgccgucaccgaccuccagcuccucaugcaguccacccccgccgccggcuccggcuccgccaucugcuccggcaucgccgucugcaagguccuccaccucgagggcgaggucaacaagaucaagaacgcccuccucuccaccaacaaggccgucgucucccucuccaacggcgucuccguccucaccuucaagguccucgaccucaagaacuacaucgacaagcagcuccuccccauccucaacaagcaguccugcuccauccccaacaucgagaccgucaucgaguuccagcagaagaacaaccgccuccucgagaucacccgcgaguucuccgucaacgccggcgucaccacccccgucuccaccuacaugcucaccaacuccgagcuccucucccucaucaacgacaugcccaucaccaacgaccagaagaagcucauguccaacaacguccagaucguccgccagcaguccuacuccaucaugugcaucaucaaggaggagguccucgccuacgucguccagcucccccucuacggcgucaucgacacccccugcuggaagcuccacaccuccccccucugcaccaccaacaccaaggagggcuccaacaucugccucacccgcaccgaccgcggcugguacugcgacaacgccggcuccgucuccuucuucccccaggccgagaccugcaagguccaguccaaccgcgucuucugcgacaccaugaacucccucacccuccccuccgaggucaaccucugcaacaucgacaucuucaaccccaaguacgacugcaagaucaugaccuccaagaccgacgucuccuccuccgucaucaccucccucggcgccaucgucuccugcuacggcaagaccaagugcaccgccuccaacaagaaccgcggcaucaucaagaccuucuccaacggcugcgacuacgucuccaacaagggcgucgacaccgucuccgucggcaacacccucuacugcgucaacaagcaggagggccagucccucuacgucaagggcgagcccaucaucaacuucuacgacccccucgucuuccccuccgacgaguucgacgccuccaucucccaggucaacgagaagaucaaccagucccucgccuucauccgcaaguccgacgagcuccuccacaacgucaacgucggcaaguccaccaccaacaucaugaucaccaccaucaucaucgucaucaucgucauccuccuccuccucaucgccgucggccucuuccucuacugcaaggcccgcugaggacuaguacuggcugcaucucccuuuccucuguccuccauccuucucccaggauggugaagggggaccugguacccagugauccccaccccaggauccuaaaucaugacuuaccugcuaauaaaaacucauuggaaaagugagaagaucuaaaaaaaaaaaaaaaaaaaaaaaaaaaaaaaaaaaaaaaaaaaaaaaaaaaaaaaaaaaaaaaaugcaucccccccccccccccccccccccccccccccaaaggcucuuuucagagccaccagaauu

SEQ ID NO: 15869 - RNA, 1947 nt, Artificial Sequence
  mRNA product Design b-5 comprising derived and/or modified sequence from HRSV(Memphis-37)__AIY60640.1__F-del_DSCav1_mut3 (opt3)
gggagacuccugucgggcggaaguaggaggaguagaguuuaaaaacaguacucuuuuuccgguucgggacguaguugaagcaacgacaagccggauaaccgcucuugagacaggaagcuuaccauggagcugcccauccucaagaccaacgccauuacaacuauacuugcugcagugacgcugugcuucgccagcucccagaauaucaccgaagaguuuuaccaaucuacauguucagcggucaguaaaggcuauuugggggcuuuaagaacuggaugguacaccagcguuauuacaaucgaacuguccaacauuaaggagaucaaaugcaaugguaccgacgccaaggugaaacuaauaaagcaggaacucgauaaguauaaaaacgcaguaacugaccugcagcuucugaugcagucuacuccugccgcuggcucggggucagcaaucuguagcggaauugccgugugcaaggucuugcaccucgagggcgaggugaauaaaaucaagaacgcucugcugaguaccaauaaagccguugugucccucucuaacggugucagcguguuaacguucaagguacuggaucuuaagaauuacauugacaaacaauugcugccaauccuaaacaagcaguccuguucaauaccgaauauugaaacuguuaucgaguuucagcagaaaaacaauaggcuccuggaaauuacccgggaguucagugugaacgcgggggucacaacucccgugagcaccuauaugcuuacaaauucugagcuguugucccucaucaacgauaugccuaucaccaacgaccaaaagaaacugaugucaaauaacgugcagauuguccgccagcagagcuacaguauaaugugcaucauuaaggaagagguuuuagcauaugugguacaacugccacucuacggagugaucgauacgcccuguuggaaacuucauacuucuccucugugcacaaccaauacuaaggaaggcuccaacauauguuugacacgaaccgaccguggcugguacugcgauaaugccgggagcgucucguuuuucccacaggcugagacguguaaggugcagucuaacagaguuuucugcgacaccaugaacucccuaacacugcccucagaagugaaucucugcaauauugauaucuucaacccuaaauaugacuguaagaucaugacaaguaaaaccgaugucagcuccucugugauuacaagccugggagccaucguaucaugcuacgguaagacuaaauguaccgcaaguaauaagaacaggggcauuauaaagacauuuuccaaugggugcgacuauguuagcaacaaaggaguggacaccgucucugugggcaauacucuuuacugugucaacaagcaagagggucagucacuguaugugaaaggggagccaaucauuaacuucuacgauccguugguuuuucccagugacgaauuugaugcuagcaucucccaggugaaugagaagaucaaccagucucucgccuuuauucggaaaucggacgaacuguuacacaauguaaacgucggaaagagcacgacaaauauaaugaucaccacuauuaucauugugaucauaguuauccugcuacuccugauugcggugggccuuuucuuguauugcaaggcccgcugaggacuaguacuggcugcaucucccuuuccucuguccuccauccuucucccaggauggugaagggggaccugguacccagugauccccaccccaggauccuaaaucaugacuuaccugcuaauaaaaacucauuggaaaagugagaagaucuaaaaaaaaaaaaaaaaaaaaaaaaaaaaaaaaaaaaaaaaaaaaaaaaaaaaaaaaaaaaaaaaugcaucccccccccccccccccccccccccccccccaaaggcucuuuucagagccaccagaauu

SEQ ID NO: 15870 - RNA, 1947 nt, Artificial Sequence
  mRNA product Design b-5 comprising derived and/or modified sequence from HRSV(Memphis-37)__AIY60640.1__F-del_DSCav1_mut3 (opt4)
gggagacuccugucgggcggaaguaggaggaguagaguuuaaaaacaguacucuuuuuccgguucgggacguaguugaagcaacgacaagccggauaaccgcucuugagacaggaagcuuaccauggagcugcccauccugaagaccaacgccaucaccaccauccuggccgccgugacccugugcuucgccagcagccagaacaucaccgaggaguucuaccagagcaccugcagcgccgugagcaagggcuaccugggcgcccugagaaccggcugguacaccagcgugaucaccaucgagcugagcaacaucaaggagaucaagugcaacggcaccgacgccaaggugaagcugaucaagcaggagcuggacaaguacaagaacgccgugaccgaccugcagcugcugaugcagagcacccccgccgccggcagcggcagcgccaucugcagcggcaucgccgugugcaaggugcugcaccuggagggcgaggugaacaagaucaagaacgcccugcugagcaccaacaaggccguggugagccugagcaacggcgugagcgugcugaccuucaaggugcuggaccugaagaacuacaucgacaagcagcugcugcccauccugaacaagcagagcugcagcauccccaacaucgagaccgugaucgaguuccagcagaagaacaacagacugcuggagaucaccagagaguucagcgugaacgccggcgugaccacccccgugagcaccuacaugcugaccaacagcgagcugcugagccugaucaacgacaugcccaucaccaacgaccagaagaagcugaugagcaacaacgugcagaucgugagacagcagagcuacagcaucaugugcaucaucaaggaggaggugcuggccuacguggugcagcugccccuguacggcgugaucgacacccccugcuggaagcugcacaccagcccccugugcaccaccaacaccaaggagggcagcaacaucugccugaccagaaccgacagaggcugguacugcgacaacgccggcagcgugagcuucuucccccaggccgagaccugcaaggugcagagcaacagaguguucugcgacaccaugaacagccugacccugcccagcgaggugaaccugugcaacaucgacaucuucaaccccaaguacgacugcaagaucaugaccagcaagaccgacgugagcagcagcgugaucaccagccugggcgccaucgugagcugcuacggcaagaccaagugcaccgccagcaacaagaacagaggcaucaucaagaccuucagcaacggcugcgacuacgugagcaacaagggcguggacaccgugagcgugggcaacacccuguacugcgugaacaagcaggagggccagagccuguacgugaagggcgagcccaucaucaacuucuacgacccccugguguuccccagcgacgaguucgacgccagcaucagccaggugaacgagaagaucaaccagagccuggccuucaucagaaagagcgacgagcugcugcacaacgugaacgugggcaagagcaccaccaacaucaugaucaccaccaucaucaucgugaucaucgugauccugcugcugcugaucgccgugggccuguuccuguacugcaaggccagaugaggacuaguacuggcugcaucucccuuuccucuguccuccauccuucucccaggauggugaagggggaccugguacccagugauccccaccccaggauccuaaaucaugacuuaccugcuaauaaaaacucauuggaaaagugagaagaucuaaaaaaaaaaaaaaaaaaaaaaaaaaaaaaaaaaaaaaaaaaaaaaaaaaaaaaaaaaaaaaaaugcaucccccccccccccccccccccccccccccccaaaggcucuuuucagagccaccagaauu

SEQ ID NO: 15871 - RNA, 1947 nt, Artificial Sequence
  mRNA product Design b-5 comprising derived and/or modified sequence from HRSV(Memphis-37)__AIY60640.1__F-del_DSCav1_mut3 (opt5)
gggagacuccugucgggcggaaguaggaggaguagaguuuaaaaacaguacucuuuuuccgguucgggacguaguugaagcaacgacaagccggauaaccgcucuugagacaggaagcuuaccauggagcugcccauccucaagaccaacgccauuacaacgauccuggcugccgugacccuuugcuucgcgagcucccagaauauuacagaagaguuuuaccaaucuaccuguagcgcugucuccaaaggcuaucugggggcccucagaacaggaugguacaccucuguuaucacaauugaacugagcaacaucaaggagaucaaaugcaauggcaccgacgccaaggugaaacuuauuaagcaggaacuggauaaguauaaaaacgcugugacggaccuccagcugcugaugcaguccaccccugccgcugggucuggaagcgccaucuguuccggcauugcggucugcaaggugcuccaccuggagggggagguuaauaaaaucaagaacgcccuucugagcacaaauaaagcuguggucucucucuccaacggagugagcguucugaccuucaaggugcuugaucugaagaauuacauugacaaacaacuccugccgauccugaacaagcagucuuguuccauucccaauaucgaaacagucaucgaguuucagcagaaaaacaaucggcuccuggaaauuacccgcgaguucagcgugaacgccggcgugacgacaccugucucuaccuauaugcuuacaaauuccgagcugcucagccugaucaacgauaugcccauuaccaacgaccaaaagaaacuuauguccaauaacguucagaucgugagacagcagucuuacagcauuaugugcaucaucaaggaagaggugcuggcuuaugucgugcaacucccucuguacggcguuauugauacccccuguuggaaacugcauacauccccucucugcacgaccaauacaaaggaagggagcaacaucugucugacccggacagaccgcggaugguacugcgauaaugccggcucuguguccuuuuucccgcaggcggagaccuguaagguccagagcaacagaguguuuugcgacacgaugaacucucuuacacugcccagcgaaguuaaucucugcaauauugauaucuucaacccuaaauaugacuguaagauuaugaccuccaaaaccgaugugucuagcuccgucaucacaagccugggggccaucgugucuugcuacggaaagaccaaauguacagcuuccaauaagaaccggggcauuaucaagacguuuagcaaugggugcgacuaugucucuaacaaaggaguggacaccguuuccgugggcaauacacuuuacugugucaacaagcaagagggccagagccuguaugugaaaggggagcccauuaucaacuucuacgauccucucguuuuucccuccgacgaguucgaugccucuauuagccaggugaaugaaaagaucaaccagucccuggcuuuuauucgcaaaucugacgaacugcuccacaaugucaacgugggaaagagcaccacaaauaucaugaucaccacgauuaucauugugaucauuguuauccugcuucugcucaucgccgucggccuguuccuguauugcaaggccagaugaggacuaguacuggcugcaucucccuuuccucuguccuccauccuucucccaggauggugaagggggaccugguacccagugauccccaccccaggauccuaaaucaugacuuaccugcuaauaaaaacucauuggaaaagugagaagaucuaaaaaaaaaaaaaaaaaaaaaaaaaaaaaaaaaaaaaaaaaaaaaaaaaaaaaaaaaaaaaaaaugcaucccccccccccccccccccccccccccccccaaaggcucuuuucagagccaccagaauu

SEQ ID NO: 15872 - RNA, 1947 nt, Artificial Sequence
  mRNA product Design b-5 comprising derived and/or modified sequence from HRSV(Memphis-37)__AIY60640.1__F-del_DSCav1_mut3 (opt6)
gggagacuccugucgggcggaaguaggaggaguagaguuuaaaaacaguacucuuuuuccgguucgggacguaguugaagcaacgacaagccggauaaccgcucuugagacaggaagcuuaccauggaacuacccauccuaaaaacaaaugccauaaccacaauacucgccgcuguaacacuauguuucgcuaguucacaaaacauuacagaagaauuuuaccaauccacaugcucagcaguaucaaaaggauaccuaggugcacuaagaacaggaugguacacaagcguaauuacaauagaauuauccaauauuaaagaaauaaaauguaacggcacugacgcuaaaguaaaauuaaucaaacaagaacuagacaaauacaaaaacgcaguaacagaccuacaauuacucaugcaauccacacccgcagcaggaucaggcucagccauaugcucagguauagcaguaugcaaaguacuccaccuugaaggagaaguaaacaaaauaaaaaacgcauuacuaucaacaaacaaagcaguaguaucacuaucaaacggagucucugucuuaaccuuuaaaguauuagauuuaaaaaacuacauagacaaacaacuauuaccaauucuaaauaaacaaucauguucuauaccaaauauagaaacaguaauagaauuucaacaaaaaaacaaccgauuacuagaaaucacaagagaauuuucugucaacgccggcguaaccaccccagucucaacauauaugcuaacaaauagugaacucuuauccuuaauaaacgacaugccaauaacaaaugaccaaaaaaaauuaauguccaauaacguacaaauagucagacaacagucauacucaauaauguguaucaucaaagaagaaguauuagcauacguaguucaacuaccccuauacggcguaauagacacaccauguuggaaacuacacacaucacccuuaugcacaaccaauaccaaagaaggaucuaacauaugccuaaccagaacagacagaggcugguacugcgacaacgcagguucagucucauucuucccacaagccgaaacaugcaaaguccaauccaacagaguauuuugcgacacuaugaacucacuaacucuaccuucagaagucaaccuuuguaacauagacauauuuaacccaaaauacgauuguaaaauaaugaccagcaaaacagacgucucaucaagcguaauaacaucacuuggcgcaauagucuccugcuacggaaaaacaaaaugcacagcauccaacaaaaacagaggcaucauaaaaaccuucuccaacggcugcgacuauguaagcaacaaaggugucgauacaguaucaguaggaaacacacuauacugcguaaacaaacaagaaggacaaucacucuacguaaaaggugaaccaaucauaaacuucuacgacccauuaguuuucccaucagacgaauuugaugccuccauaucacaaguaaaugaaaaaauaaaucaaucccuagcauucauacgaaaaucugaugaauuacuucacaaugucaacgucggaaaaucaaccacuaacauaaugauaacaacaauuauaauaguaauaauaguaauacuccuacuauuaauagccgucggucuuuuccuauacugcaaagcacgauaaggacuaguacuggcugcaucucccuuuccucuguccuccauccuucucccaggauggugaagggggaccugguacccagugauccccaccccaggauccuaaaucaugacuuaccugcuaauaaaaacucauuggaaaagugagaagaucuaaaaaaaaaaaaaaaaaaaaaaaaaaaaaaaaaaaaaaaaaaaaaaaaaaaaaaaaaaaaaaaaugcaucccccccccccccccccccccccccccccccaaaggcucuuuucagagccaccagaauu

SEQ ID NO: 15873 - RNA, 1947 nt, Artificial Sequence
  mRNA product Design b-5 comprising derived and/or modified sequence from HRSV(Memphis-37)__AIY60640.1__F-del_DSCav1_mut3 (opt11)
gggagacuccugucgggcggaaguaggaggaguagaguuuaaaaacaguacucuuuuuccgguucgggacguaguugaagcaacgacaagccggauaaccgcucuugagacaggaagcuuaccauggaacuacccauccucaaaaccaacgccaucaccacaauccuagcugccgucacccuaugcuucgcaagcagccaaaacaucacagaagaauuuuaccaaucaaccugcuccgccgucuccaaaggguaccuaggugcccuccgcaccggcugguacacgucugucauaaccaucgaacucuccaacaucaaagaaaucaaauguaacggaacagacgcaaaagucaaacuaaucaaacaagaacuagacaaauacaaaaacgccguaaccgaccuccaacugcucaugcaauccacccccgcugccggcuccgggagcgcaaucugcucuggaaucgccguaugcaaaguccuccaccucgaaggagaaguaaacaaaaucaaaaacgcgcuccucaguaccaacaaagccgucgucucucuaucaaacggcguaucgguccucaccuucaaaguccucgaccuaaagaacuacauagacaaacaacuccuccccauccuaaacaaacaauccugcucaaucccaaacaucgaaaccgugaucgaguuccaacagaaaaacaaccgccuacucgaaaucacccgagaguucucagucaacgcaggagucaccacccccgucucaacauacaugcuuaccaacagcgaacuccuaucccucaucaacgacaugccaaucacaaacgaccaaaagaaacucaugagcaacaacguccagaucguaagacaacaaagcuacagcaucaugugcaucaucaaagaagaaguacuagcauacgucguccaacucccccucuacggcgucaucgacacccccugcuggaaacuccacaccucaccccucugcacaaccaacaccaaagaaggcuccaauaucugccucacacgcaccgaccgcggcugguacugcgacaacgccggcuccgucuccuucuucccucaagccgaaaccugcaaaguccaguccaacagagucuucugcgacaccaugaacucccuaacacuuccaucagaagucaaccuuuguaacaucgacaucuucaaucccaaauacgacuguaaaauaaugaccucaaaaacugacgugucaagcucaguuaucaccucccuaggggccaucgucuccugcuacggcaaaacaaaaugcaccgcauccaacaaaaaucgcggaaucaucaaaacauucuccaacggaugcgacuacgucucaaacaagggaguagauaccguaagcguuggcaacacccucuacugcguaaacaaacaagaaggccaaucacucuacgucaaaggcgaacccauaaucaacuucuacgacccccucgucuucccuuccgaugaguucgacgccagcaucucccaagucaacgagaaaauaaaccagucacucgcauucauccgcaaaagcgacgaacuccuccacaacguaaacguaggcaaauccacaaccaauaucaugauaaccacaaucaucaucgugaucaucgucauccuccuccuccucauagcugucggacucuuccucuacuguaaagcacgcugaggacuaguacuggcugcaucucccuuuccucuguccuccauccuucucccaggauggugaagggggaccugguacccagugauccccaccccaggauccuaaaucaugacuuaccugcuaauaaaaacucauuggaaaagugagaagaucuaaaaaaaaaaaaaaaaaaaaaaaaaaaaaaaaaaaaaaaaaaaaaaaaaaaaaaaaaaaaaaaaugcaucccccccccccccccccccccccccccccccaaaggcucuuuucagagccaccagaauu

SEQ ID NO: 15874 - RNA, 1853 nt, Artificial Sequence
  mRNA product Design c-1 comprising derived and/or modified sequence from HRSV(Memphis-37)__AIY60640.1__F-del_DSCav1_mut3 (opt1)
gggagaguccgcucagccagguugcagaagcggcuuagcguguguccuaaucuucucucugcguguagguaggccugugccgcaaacaagcuuaccauggagcugcccauccucaagaccaacgccaucaccacgauccuggccgcggugacccugugcuucgccagcucccagaacaucaccgaggaguucuaccagagcacgugcuccgccgucagcaagggcuaccucggcgcccugcgcaccgggugguacaccagcgugaucaccaucgagcuguccaacaucaaggagaucaagugcaacggcaccgacgccaaggugaagcucaucaagcaggagcuggacaaguacaagaacgcggucacggaccugcagcuccugaugcagagcaccccggccgccggcuccgggagcgcgaucugcuccggcaucgccgucugcaaggugcugcaccucgagggcgaggugaacaagaucaagaacgcccugcuguccaccaacaaggccgucgugagccucuccaacggggugagcguccugaccuucaaggugcuggaccucaagaacuacaucgacaagcagcugcugcccauccugaacaagcagagcugcuccauccccaacaucgagaccgucaucgaguuccagcagaagaacaaccgccuccuggagaucacgcgggaguucagcgugaacgcgggcgugaccacccccgucuccaccuacaugcugacgaacagcgagcuccugucccugaucaacgacaugccgaucaccaacgaccagaagaagcucaugagcaacaacgugcagaucgugcgccagcaguccuacagcaucaugugcaucaucaaggaggagguccuggccuacguggugcagcugccccucuacggggucaucgacacccccugcuggaagcugcacaccagcccccugugcacgaccaacaccaaggagggcuccaacaucugccucacccggacggaccgcgggugguacugcgacaacgccggcagcguguccuucuucccgcaggccgagaccugcaagguccagagcaaccggguguucugcgacaccaugaacucccugacccugcccagcgaggugaaccucugcaacaucgacaucuucaaccccaaguacgacugcaagaucaugacguccaagaccgacgucagcuccagcgugaucaccucccugggcgccaucgugagcugcuacgggaagaccaagugcacggcgagcaacaagaaccgcggcaucaucaagaccuucuccaacgggugcgacuacgucagcaacaagggcguggacaccguguccgucggcaacacccuguacugcgugaacaagcaggagggccagagccucuacgugaagggggagcccaucaucaacuucuacgacccgcuggucuuccccuccgacgaguucgacgccagcaucucccaggugaacgagaagaucaaccagagccuggccuucauccggaaguccgacgagcuccugcacaacgugaacgucggcaagagcaccacgaacaucaugaucaccaccaucaucaucgugaucaucgugauccugcugcuccugaucgccgucgggcuguuccucuacugcaaggcccgcugaggacuaguguccaccugucccuccugggcugcuggauugucucguuuuccugccaaauaaacaggaucagcgcuuuacagaucuaaaaaaaaaaaaaaaaaaaaaaaaaaaaaaaaaaaaaaaaaaaaaaaaaaaaaaaaaaaaaaaaugcaucccccccccccccccccccccccccccccccaaaggcucuuuucagagccaccagaauu

SEQ ID NO: 15875 - RNA, 1853 nt, Artificial Sequence
  mRNA product Design c-1 comprising derived and/or modified sequence from HRSV(Memphis-37)__AIY60640.1__F-del_DSCav1_mut3 (opt1)
gggagaguccgcucagccagguugcagaagcggcuuagcguguguccuaaucuucucucugcguguagguaggccugugccgcaaacaagcuuaccauggagcugcccauccucaagaccaacgccaucaccacgauccuggccgcggugacccugugcuucgccagcucccagaacaucaccgaggaguucuaccagagcacgugcuccgccgucagcaagggcuaccucggggcccugcgcaccggcugguacaccuccgugaucaccaucgagcugagcaacaucaaggagaucaagugcaacgggaccgacgccaaggugaagcucaucaagcaggagcuggacaaguacaagaacgcggucacggaccugcagcuccugaugcaguccaccccggccgccggcagcggguccgccaucugcagcggcaucgcggugugcaaggugcugcaccucgagggcgaggucaacaagaucaagaacgcccugcuguccaccaacaaggccguggugagccucuccaacggggucagcgugcugaccuucaaggugcuggaccucaagaacuacaucgacaagcagcugcugcccauccucaacaagcaguccugcagcauccccaacaucgagacggucaucgaguuccagcagaagaacaaccggcugcuggagaucacccgcgaguucuccgugaacgccggcgugaccacccccgucagcacguacaugcucaccaacuccgagcugcugagccucaucaacgacaugccgaucaccaacgaccagaagaagcugaugagcaacaacgugcagaucgugcggcagcaguccuacagcaucaugugcaucaucaaggaggagguccuggccuacguggugcagcucccccuguacggggucaucgacacccccugcuggaagcugcacacgagcccccucugcaccaccaacaccaaggagggcuccaacaucugccugacgcgcaccgaccgggggugguacugcgacaacgcgggcuccgugagcuucuucccgcaggccgagaccugcaaggugcaguccaaccgcgucuucugcgacaccaugaacagccugacgcuccccuccgaggugaaccugugcaacaucgacaucuucaaccccaaguacgacugcaagaucaugaccagcaagaccgacgucuccagcuccgugaucaccagccugggcgccaucguguccugcuacgggaagacgaagugcaccgccagcaacaagaaccggggcaucaucaagaccuucuccaacgggugcgacuacgucagcaacaagggcguggacaccguguccgucggcaacacgcucuacugcgugaacaagcaggaggggcagagccuguacgugaagggcgagcccaucaucaacuucuacgacccgcuggucuuccccagcgacgaguucgacgccuccaucagccaggugaacgagaagaucaaccagucccucgcguucauccgcaagagcgacgagcugcugcacaacgugaacgucgggaaguccaccaccaacaucaugaucaccaccaucaucaucgugaucaucgugauccuccugcugcucaucgccgucggccuguuccuguacugcaaggcccggugaggacuaguguccaccugucccuccugggcugcuggauugucucguuuuccugccaaauaaacaggaucagcgcuuuacagaucuaaaaaaaaaaaaaaaaaaaaaaaaaaaaaaaaaaaaaaaaaaaaaaaaaaaaaaaaaaaaaaaaugcaucccccccccccccccccccccccccccccccaaaggcucuuuucagagccaccagaauu

SEQ ID NO: 15876 - RNA, 1853 nt, Artificial Sequence
  mRNA product Design c-1 comprising derived and/or modified sequence from HRSV(Memphis-37)__AIY60640.1__F-del_DSCav1_mut3 (opt2)
gggagaguccgcucagccagguugcagaagcggcuuagcguguguccuaaucuucucucugcguguagguaggccugugccgcaaacaagcuuaccauggagcuccccauccucaagaccaacgccaucaccaccauccucgccgccgucacccucugcuucgccuccucccagaacaucaccgaggaguucuaccaguccaccugcuccgccgucuccaagggcuaccucggcgcccuccgcaccggcugguacaccuccgucaucaccaucgagcucuccaacaucaaggagaucaagugcaacggcaccgacgccaaggucaagcucaucaagcaggagcucgacaaguacaagaacgccgucaccgaccuccagcuccucaugcaguccacccccgccgccggcuccggcuccgccaucugcuccggcaucgccgucugcaagguccuccaccucgagggcgaggucaacaagaucaagaacgcccuccucuccaccaacaaggccgucgucucccucuccaacggcgucuccguccucaccuucaagguccucgaccucaagaacuacaucgacaagcagcuccuccccauccucaacaagcaguccugcuccauccccaacaucgagaccgucaucgaguuccagcagaagaacaaccgccuccucgagaucacccgcgaguucuccgucaacgccggcgucaccacccccgucuccaccuacaugcucaccaacuccgagcuccucucccucaucaacgacaugcccaucaccaacgaccagaagaagcucauguccaacaacguccagaucguccgccagcaguccuacuccaucaugugcaucaucaaggaggagguccucgccuacgucguccagcucccccucuacggcgucaucgacacccccugcuggaagcuccacaccuccccccucugcaccaccaacaccaaggagggcuccaacaucugccucacccgcaccgaccgcggcugguacugcgacaacgccggcuccgucuccuucuucccccaggccgagaccugcaagguccaguccaaccgcgucuucugcgacaccaugaacucccucacccuccccuccgaggucaaccucugcaacaucgacaucuucaaccccaaguacgacugcaagaucaugaccuccaagaccgacgucuccuccuccgucaucaccucccucggcgccaucgucuccugcuacggcaagaccaagugcaccgccuccaacaagaaccgcggcaucaucaagaccuucuccaacggcugcgacuacgucuccaacaagggcgucgacaccgucuccgucggcaacacccucuacugcgucaacaagcaggagggccagucccucuacgucaagggcgagcccaucaucaacuucuacgacccccucgucuuccccuccgacgaguucgacgccuccaucucccaggucaacgagaagaucaaccagucccucgccuucauccgcaaguccgacgagcuccuccacaacgucaacgucggcaaguccaccaccaacaucaugaucaccaccaucaucaucgucaucaucgucauccuccuccuccucaucgccgucggccucuuccucuacugcaaggcccgcugaggacuaguguccaccugucccuccugggcugcuggauugucucguuuuccugccaaauaaacaggaucagcgcuuuacagaucuaaaaaaaaaaaaaaaaaaaaaaaaaaaaaaaaaaaaaaaaaaaaaaaaaaaaaaaaaaaaaaaaugcaucccccccccccccccccccccccccccccccaaaggcucuuuucagagccaccagaauu

SEQ ID NO: 15877 - RNA, 1853 nt, Artificial Sequence
  mRNA product Design c-1 comprising derived and/or modified sequence from HRSV(Memphis-37)__AIY60640.1__F-del_DSCav1_mut3 (opt3)
gggagaguccgcucagccagguugcagaagcggcuuagcguguguccuaaucuucucucugcguguagguaggccugugccgcaaacaagcuuaccauggagcugcccauccucaagaccaacgccauuacaacuauacuugcugcagugacgcugugcuucgccagcucccagaauaucaccgaagaguuuuaccaaucuacauguucagcggucaguaaaggcuauuugggggcuuuaagaacuggaugguacaccagcguuauuacaaucgaacuguccaacauuaaggagaucaaaugcaaugguaccgacgccaaggugaaacuaauaaagcaggaacucgauaaguauaaaaacgcaguaacugaccugcagcuucugaugcagucuacuccugccgcuggcucggggucagcaaucuguagcggaauugccgugugcaaggucuugcaccucgagggcgaggugaauaaaaucaagaacgcucugcugaguaccaauaaagccguugugucccucucuaacggugucagcguguuaacguucaagguacuggaucuuaagaauuacauugacaaacaauugcugccaauccuaaacaagcaguccuguucaauaccgaauauugaaacuguuaucgaguuucagcagaaaaacaauaggcuccuggaaauuacccgggaguucagugugaacgcgggggucacaacucccgugagcaccuauaugcuuacaaauucugagcuguugucccucaucaacgauaugccuaucaccaacgaccaaaagaaacugaugucaaauaacgugcagauuguccgccagcagagcuacaguauaaugugcaucauuaaggaagagguuuuagcauaugugguacaacugccacucuacggagugaucgauacgcccuguuggaaacuucauacuucuccucugugcacaaccaauacuaaggaaggcuccaacauauguuugacacgaaccgaccguggcugguacugcgauaaugccgggagcgucucguuuuucccacaggcugagacguguaaggugcagucuaacagaguuuucugcgacaccaugaacucccuaacacugcccucagaagugaaucucugcaauauugauaucuucaacccuaaauaugacuguaagaucaugacaaguaaaaccgaugucagcuccucugugauuacaagccugggagccaucguaucaugcuacgguaagacuaaauguaccgcaaguaauaagaacaggggcauuauaaagacauuuuccaaugggugcgacuauguuagcaacaaaggaguggacaccgucucugugggcaauacucuuuacugugucaacaagcaagagggucagucacuguaugugaaaggggagccaaucauuaacuucuacgauccguugguuuuucccagugacgaauuugaugcuagcaucucccaggugaaugagaagaucaaccagucucucgccuuuauucggaaaucggacgaacuguuacacaauguaaacgucggaaagagcacgacaaauauaaugaucaccacuauuaucauugugaucauaguuauccugcuacuccugauugcggugggccuuuucuuguauugcaaggcccgcugaggacuaguguccaccugucccuccugggcugcuggauugucucguuuuccugccaaauaaacaggaucagcgcuuuacagaucuaaaaaaaaaaaaaaaaaaaaaaaaaaaaaaaaaaaaaaaaaaaaaaaaaaaaaaaaaaaaaaaaugcaucccccccccccccccccccccccccccccccaaaggcucuuuucagagccaccagaauu

SEQ ID NO: 15878 - RNA, 1853 nt, Artificial Sequence
  mRNA product Design c-1 comprising derived and/or modified sequence from HRSV(Memphis-37)__AIY60640.1__F-del_DSCav1_mut3 (opt4)
gggagaguccgcucagccagguugcagaagcggcuuagcguguguccuaaucuucucucugcguguagguaggccugugccgcaaacaagcuuaccauggagcugcccauccugaagaccaacgccaucaccaccauccuggccgccgugacccugugcuucgccagcagccagaacaucaccgaggaguucuaccagagcaccugcagcgccgugagcaagggcuaccugggcgcccugagaaccggcugguacaccagcgugaucaccaucgagcugagcaacaucaaggagaucaagugcaacggcaccgacgccaaggugaagcugaucaagcaggagcuggacaaguacaagaacgccgugaccgaccugcagcugcugaugcagagcacccccgccgccggcagcggcagcgccaucugcagcggcaucgccgugugcaaggugcugcaccuggagggcgaggugaacaagaucaagaacgcccugcugagcaccaacaaggccguggugagccugagcaacggcgugagcgugcugaccuucaaggugcuggaccugaagaacuacaucgacaagcagcugcugcccauccugaacaagcagagcugcagcauccccaacaucgagaccgugaucgaguuccagcagaagaacaacagacugcuggagaucaccagagaguucagcgugaacgccggcgugaccacccccgugagcaccuacaugcugaccaacagcgagcugcugagccugaucaacgacaugcccaucaccaacgaccagaagaagcugaugagcaacaacgugcagaucgugagacagcagagcuacagcaucaugugcaucaucaaggaggaggugcuggccuacguggugcagcugccccuguacggcgugaucgacacccccugcuggaagcugcacaccagcccccugugcaccaccaacaccaaggagggcagcaacaucugccugaccagaaccgacagaggcugguacugcgacaacgccggcagcgugagcuucuucccccaggccgagaccugcaaggugcagagcaacagaguguucugcgacaccaugaacagccugacccugcccagcgaggugaaccugugcaacaucgacaucuucaaccccaaguacgacugcaagaucaugaccagcaagaccgacgugagcagcagcgugaucaccagccugggcgccaucgugagcugcuacggcaagaccaagugcaccgccagcaacaagaacagaggcaucaucaagaccuucagcaacggcugcgacuacgugagcaacaagggcguggacaccgugagcgugggcaacacccuguacugcgugaacaagcaggagggccagagccuguacgugaagggcgagcccaucaucaacuucuacgacccccugguguuccccagcgacgaguucgacgccagcaucagccaggugaacgagaagaucaaccagagccuggccuucaucagaaagagcgacgagcugcugcacaacgugaacgugggcaagagcaccaccaacaucaugaucaccaccaucaucaucgugaucaucgugauccugcugcugcugaucgccgugggccuguuccuguacugcaaggccagaugaggacuaguguccaccugucccuccugggcugcuggauugucucguuuuccugccaaauaaacaggaucagcgcuuuacagaucuaaaaaaaaaaaaaaaaaaaaaaaaaaaaaaaaaaaaaaaaaaaaaaaaaaaaaaaaaaaaaaaaugcaucccccccccccccccccccccccccccccccaaaggcucuuuucagagccaccagaauu

SEQ ID NO: 15879 - RNA, 1853 nt, Artificial Sequence
  mRNA product Design c-1 comprising derived and/or modified sequence from HRSV(Memphis-37)__AIY60640.1__F-del_DSCav1_mut3 (opt5)
gggagaguccgcucagccagguugcagaagcggcuuagcguguguccuaaucuucucucugcguguagguaggccugugccgcaaacaagcuuaccauggagcugcccauccucaagaccaacgccauuacaacgauccuggcugccgugacccuuugcuucgcgagcucccagaauauuacagaagaguuuuaccaaucuaccuguagcgcugucuccaaaggcuaucugggggcccucagaacaggaugguacaccucuguuaucacaauugaacugagcaacaucaaggagaucaaaugcaauggcaccgacgccaaggugaaacuuauuaagcaggaacuggauaaguauaaaaacgcugugacggaccuccagcugcugaugcaguccaccccugccgcugggucuggaagcgccaucuguuccggcauugcggucugcaaggugcuccaccuggagggggagguuaauaaaaucaagaacgcccuucugagcacaaauaaagcuguggucucucucuccaacggagugagcguucugaccuucaaggugcuugaucugaagaauuacauugacaaacaacuccugccgauccugaacaagcagucuuguuccauucccaauaucgaaacagucaucgaguuucagcagaaaaacaaucggcuccuggaaauuacccgcgaguucagcgugaacgccggcgugacgacaccugucucuaccuauaugcuuacaaauuccgagcugcucagccugaucaacgauaugcccauuaccaacgaccaaaagaaacuuauguccaauaacguucagaucgugagacagcagucuuacagcauuaugugcaucaucaaggaagaggugcuggcuuaugucgugcaacucccucuguacggcguuauugauacccccuguuggaaacugcauacauccccucucugcacgaccaauacaaaggaagggagcaacaucugucugacccggacagaccgcggaugguacugcgauaaugccggcucuguguccuuuuucccgcaggcggagaccuguaagguccagagcaacagaguguuuugcgacacgaugaacucucuuacacugcccagcgaaguuaaucucugcaauauugauaucuucaacccuaaauaugacuguaagauuaugaccuccaaaaccgaugugucuagcuccgucaucacaagccugggggccaucgugucuugcuacggaaagaccaaauguacagcuuccaauaagaaccggggcauuaucaagacguuuagcaaugggugcgacuaugucucuaacaaaggaguggacaccguuuccgugggcaauacacuuuacugugucaacaagcaagagggccagagccuguaugugaaaggggagcccauuaucaacuucuacgauccucucguuuuucccuccgacgaguucgaugccucuauuagccaggugaaugaaaagaucaaccagucccuggcuuuuauucgcaaaucugacgaacugcuccacaaugucaacgugggaaagagcaccacaaauaucaugaucaccacgauuaucauugugaucauuguuauccugcuucugcucaucgccgucggccuguuccuguauugcaaggccagaugaggacuaguguccaccugucccuccugggcugcuggauugucucguuuuccugccaaauaaacaggaucagcgcuuuacagaucuaaaaaaaaaaaaaaaaaaaaaaaaaaaaaaaaaaaaaaaaaaaaaaaaaaaaaaaaaaaaaaaaugcaucccccccccccccccccccccccccccccccaaaggcucuuuucagagccaccagaauu

SEQ ID NO: 15880 - RNA, 1853 nt, Artificial Sequence
  mRNA product Design c-1 comprising derived and/or modified sequence from HRSV(Memphis-37)__AIY60640.1__F-del_DSCav1_mut3 (opt6)
gggagaguccgcucagccagguugcagaagcggcuuagcguguguccuaaucuucucucugcguguagguaggccugugccgcaaacaagcuuaccauggaacuacccauccuaaaaacaaaugccauaaccacaauacucgccgcuguaacacuauguuucgcuaguucacaaaacauuacagaagaauuuuaccaauccacaugcucagcaguaucaaaaggauaccuaggugcacuaagaacaggaugguacacaagcguaauuacaauagaauuauccaauauuaaagaaauaaaauguaacggcacugacgcuaaaguaaaauuaaucaaacaagaacuagacaaauacaaaaacgcaguaacagaccuacaauuacucaugcaauccacacccgcagcaggaucaggcucagccauaugcucagguauagcaguaugcaaaguacuccaccuugaaggagaaguaaacaaaauaaaaaacgcauuacuaucaacaaacaaagcaguaguaucacuaucaaacggagucucugucuuaaccuuuaaaguauuagauuuaaaaaacuacauagacaaacaacuauuaccaauucuaaauaaacaaucauguucuauaccaaauauagaaacaguaauagaauuucaacaaaaaaacaaccgauuacuagaaaucacaagagaauuuucugucaacgccggcguaaccaccccagucucaacauauaugcuaacaaauagugaacucuuauccuuaauaaacgacaugccaauaacaaaugaccaaaaaaaauuaauguccaauaacguacaaauagucagacaacagucauacucaauaauguguaucaucaaagaagaaguauuagcauacguaguucaacuaccccuauacggcguaauagacacaccauguuggaaacuacacacaucacccuuaugcacaaccaauaccaaagaaggaucuaacauaugccuaaccagaacagacagaggcugguacugcgacaacgcagguucagucucauucuucccacaagccgaaacaugcaaaguccaauccaacagaguauuuugcgacacuaugaacucacuaacucuaccuucagaagucaaccuuuguaacauagacauauuuaacccaaaauacgauuguaaaauaaugaccagcaaaacagacgucucaucaagcguaauaacaucacuuggcgcaauagucuccugcuacggaaaaacaaaaugcacagcauccaacaaaaacagaggcaucauaaaaaccuucuccaacggcugcgacuauguaagcaacaaaggugucgauacaguaucaguaggaaacacacuauacugcguaaacaaacaagaaggacaaucacucuacguaaaaggugaaccaaucauaaacuucuacgacccauuaguuuucccaucagacgaauuugaugccuccauaucacaaguaaaugaaaaaauaaaucaaucccuagcauucauacgaaaaucugaugaauuacuucacaaugucaacgucggaaaaucaaccacuaacauaaugauaacaacaauuauaauaguaauaauaguaauacuccuacuauuaauagccgucggucuuuuccuauacugcaaagcacgauaaggacuaguguccaccugucccuccugggcugcuggauugucucguuuuccugccaaauaaacaggaucagcgcuuuacagaucuaaaaaaaaaaaaaaaaaaaaaaaaaaaaaaaaaaaaaaaaaaaaaaaaaaaaaaaaaaaaaaaaugcaucccccccccccccccccccccccccccccccaaaggcucuuuucagagccaccagaauu

SEQ ID NO: 15881 - RNA, 1853 nt, Artificial Sequence
  mRNA product Design c-1 comprising derived and/or modified sequence from HRSV(Memphis-37)__AIY60640.1__F-del_DSCav1_mut3 (opt11)
gggagaguccgcucagccagguugcagaagcggcuuagcguguguccuaaucuucucucugcguguagguaggccugugccgcaaacaagcuuaccauggaacuacccauccucaaaaccaacgccaucaccacaauccuagcugccgucacccuaugcuucgcaagcagccaaaacaucacagaagaauuuuaccaaucaaccugcuccgccgucuccaaaggguaccuaggugcccuccgcaccggcugguacacgucugucauaaccaucgaacucuccaacaucaaagaaaucaaauguaacggaacagacgcaaaagucaaacuaaucaaacaagaacuagacaaauacaaaaacgccguaaccgaccuccaacugcucaugcaauccacccccgcugccggcuccgggagcgcaaucugcucuggaaucgccguaugcaaaguccuccaccucgaaggagaaguaaacaaaaucaaaaacgcgcuccucaguaccaacaaagccgucgucucucuaucaaacggcguaucgguccucaccuucaaaguccucgaccuaaagaacuacauagacaaacaacuccuccccauccuaaacaaacaauccugcucaaucccaaacaucgaaaccgugaucgaguuccaacagaaaaacaaccgccuacucgaaaucacccgagaguucucagucaacgcaggagucaccacccccgucucaacauacaugcuuaccaacagcgaacuccuaucccucaucaacgacaugccaaucacaaacgaccaaaagaaacucaugagcaacaacguccagaucguaagacaacaaagcuacagcaucaugugcaucaucaaagaagaaguacuagcauacgucguccaacucccccucuacggcgucaucgacacccccugcuggaaacuccacaccucaccccucugcacaaccaacaccaaagaaggcuccaauaucugccucacacgcaccgaccgcggcugguacugcgacaacgccggcuccgucuccuucuucccucaagccgaaaccugcaaaguccaguccaacagagucuucugcgacaccaugaacucccuaacacuuccaucagaagucaaccuuuguaacaucgacaucuucaaucccaaauacgacuguaaaauaaugaccucaaaaacugacgugucaagcucaguuaucaccucccuaggggccaucgucuccugcuacggcaaaacaaaaugcaccgcauccaacaaaaaucgcggaaucaucaaaacauucuccaacggaugcgacuacgucucaaacaagggaguagauaccguaagcguuggcaacacccucuacugcguaaacaaacaagaaggccaaucacucuacgucaaaggcgaacccauaaucaacuucuacgacccccucgucuucccuuccgaugaguucgacgccagcaucucccaagucaacgagaaaauaaaccagucacucgcauucauccgcaaaagcgacgaacuccuccacaacguaaacguaggcaaauccacaaccaauaucaugauaaccacaaucaucaucgugaucaucgucauccuccuccuccucauagcugucggacucuuccucuacuguaaagcacgcugaggacuaguguccaccugucccuccugggcugcuggauugucucguuuuccugccaaauaaacaggaucagcgcuuuacagaucuaaaaaaaaaaaaaaaaaaaaaaaaaaaaaaaaaaaaaaaaaaaaaaaaaaaaaaaaaaaaaaaaugcaucccccccccccccccccccccccccccccccaaaggcucuuuucagagccaccagaauu

SEQ ID NO: 15882 - RNA, 1943 nt, Artificial Sequence
  mRNA product Design c-2 comprising derived and/or modified sequence from HRSV(Memphis-37)__AIY60640.1__F-del_DSCav1_mut3 (opt1)
gggagacuccugucgggcggaaguaggaggaguagaguuuaaaaacaguacucuuuuuccgguucgggacguaguugaagcaacgacaagccggauaaccgcucuugagacaggaagcuuaccauggagcugcccauccucaagaccaacgccaucaccacgauccuggccgcggugacccugugcuucgccagcucccagaacaucaccgaggaguucuaccagagcacgugcuccgccgucagcaagggcuaccucggcgcccugcgcaccgggugguacaccagcgugaucaccaucgagcuguccaacaucaaggagaucaagugcaacggcaccgacgccaaggugaagcucaucaagcaggagcuggacaaguacaagaacgcggucacggaccugcagcuccugaugcagagcaccccggccgccggcuccgggagcgcgaucugcuccggcaucgccgucugcaaggugcugcaccucgagggcgaggugaacaagaucaagaacgcccugcuguccaccaacaaggccgucgugagccucuccaacggggugagcguccugaccuucaaggugcuggaccucaagaacuacaucgacaagcagcugcugcccauccugaacaagcagagcugcuccauccccaacaucgagaccgucaucgaguuccagcagaagaacaaccgccuccuggagaucacgcgggaguucagcgugaacgcgggcgugaccacccccgucuccaccuacaugcugacgaacagcgagcuccugucccugaucaacgacaugccgaucaccaacgaccagaagaagcucaugagcaacaacgugcagaucgugcgccagcaguccuacagcaucaugugcaucaucaaggaggagguccuggccuacguggugcagcugccccucuacggggucaucgacacccccugcuggaagcugcacaccagcccccugugcacgaccaacaccaaggagggcuccaacaucugccucacccggacggaccgcgggugguacugcgacaacgccggcagcguguccuucuucccgcaggccgagaccugcaagguccagagcaaccggguguucugcgacaccaugaacucccugacccugcccagcgaggugaaccucugcaacaucgacaucuucaaccccaaguacgacugcaagaucaugacguccaagaccgacgucagcuccagcgugaucaccucccugggcgccaucgugagcugcuacgggaagaccaagugcacggcgagcaacaagaaccgcggcaucaucaagaccuucuccaacgggugcgacuacgucagcaacaagggcguggacaccguguccgucggcaacacccuguacugcgugaacaagcaggagggccagagccucuacgugaagggggagcccaucaucaacuucuacgacccgcuggucuuccccuccgacgaguucgacgccagcaucucccaggugaacgagaagaucaaccagagccuggccuucauccggaaguccgacgagcuccugcacaacgugaacgucggcaagagcaccacgaacaucaugaucaccaccaucaucaucgugaucaucgugauccugcugcuccugaucgccgucgggcuguuccucuacugcaaggcccgcugaggacuaguggaagcauuuuccuggcugauuaaaagaaauuacucagcuauggucaucuguuccuguuagaaggcuaugcagcauauuauauacuaugcgcauguuaugaaaugcauaauaaaaaauuuuaaaaaaucuaaaagaucuaaaaaaaaaaaaaaaaaaaaaaaaaaaaaaaaaaaaaaaaaaaaaaaaaaaaaaaaaaaaaaaaugcaucccccccccccccccccccccccccccccccaaaggcucuuuucagagccaccagaauu

SEQ ID NO: 15883 - RNA, 1943 nt, Artificial Sequence
  mRNA product Design c-2 comprising derived and/or modified sequence from HRSV(Memphis-37)__AIY60640.1__F-del_DSCav1_mut3 (opt1)
gggagacuccugucgggcggaaguaggaggaguagaguuuaaaaacaguacucuuuuuccgguucgggacguaguugaagcaacgacaagccggauaaccgcucuugagacaggaagcuuaccauggagcugcccauccucaagaccaacgccaucaccacgauccuggccgcggugacccugugcuucgccagcucccagaacaucaccgaggaguucuaccagagcacgugcuccgccgucagcaagggcuaccucggggcccugcgcaccggcugguacaccuccgugaucaccaucgagcugagcaacaucaaggagaucaagugcaacgggaccgacgccaaggugaagcucaucaagcaggagcuggacaaguacaagaacgcggucacggaccugcagcuccugaugcaguccaccccggccgccggcagcggguccgccaucugcagcggcaucgcggugugcaaggugcugcaccucgagggcgaggucaacaagaucaagaacgcccugcuguccaccaacaaggccguggugagccucuccaacggggucagcgugcugaccuucaaggugcuggaccucaagaacuacaucgacaagcagcugcugcccauccucaacaagcaguccugcagcauccccaacaucgagacggucaucgaguuccagcagaagaacaaccggcugcuggagaucacccgcgaguucuccgugaacgccggcgugaccacccccgucagcacguacaugcucaccaacuccgagcugcugagccucaucaacgacaugccgaucaccaacgaccagaagaagcugaugagcaacaacgugcagaucgugcggcagcaguccuacagcaucaugugcaucaucaaggaggagguccuggccuacguggugcagcucccccuguacggggucaucgacacccccugcuggaagcugcacacgagcccccucugcaccaccaacaccaaggagggcuccaacaucugccugacgcgcaccgaccgggggugguacugcgacaacgcgggcuccgugagcuucuucccgcaggccgagaccugcaaggugcaguccaaccgcgucuucugcgacaccaugaacagccugacgcuccccuccgaggugaaccugugcaacaucgacaucuucaaccccaaguacgacugcaagaucaugaccagcaagaccgacgucuccagcuccgugaucaccagccugggcgccaucguguccugcuacgggaagacgaagugcaccgccagcaacaagaaccggggcaucaucaagaccuucuccaacgggugcgacuacgucagcaacaagggcguggacaccguguccgucggcaacacgcucuacugcgugaacaagcaggaggggcagagccuguacgugaagggcgagcccaucaucaacuucuacgacccgcuggucuuccccagcgacgaguucgacgccuccaucagccaggugaacgagaagaucaaccagucccucgcguucauccgcaagagcgacgagcugcugcacaacgugaacgucgggaaguccaccaccaacaucaugaucaccaccaucaucaucgugaucaucgugauccuccugcugcucaucgccgucggccuguuccuguacugcaaggcccggugaggacuaguggaagcauuuuccuggcugauuaaaagaaauuacucagcuauggucaucuguuccuguuagaaggcuaugcagcauauuauauacuaugcgcauguuaugaaaugcauaauaaaaaauuuuaaaaaaucuaaaagaucuaaaaaaaaaaaaaaaaaaaaaaaaaaaaaaaaaaaaaaaaaaaaaaaaaaaaaaaaaaaaaaaaugcaucccccccccccccccccccccccccccccccaaaggcucuuuucagagccaccagaauu

SEQ ID NO: 15884 - RNA, 1943 nt, Artificial Sequence
  mRNA product Design c-2 comprising derived and/or modified sequence from HRSV(Memphis-37)__AIY60640.1__F-del_DSCav1_mut3 (opt2)
gggagacuccugucgggcggaaguaggaggaguagaguuuaaaaacaguacucuuuuuccgguucgggacguaguugaagcaacgacaagccggauaaccgcucuugagacaggaagcuuaccauggagcuccccauccucaagaccaacgccaucaccaccauccucgccgccgucacccucugcuucgccuccucccagaacaucaccgaggaguucuaccaguccaccugcuccgccgucuccaagggcuaccucggcgcccuccgcaccggcugguacaccuccgucaucaccaucgagcucuccaacaucaaggagaucaagugcaacggcaccgacgccaaggucaagcucaucaagcaggagcucgacaaguacaagaacgccgucaccgaccuccagcuccucaugcaguccacccccgccgccggcuccggcuccgccaucugcuccggcaucgccgucugcaagguccuccaccucgagggcgaggucaacaagaucaagaacgcccuccucuccaccaacaaggccgucgucucccucuccaacggcgucuccguccucaccuucaagguccucgaccucaagaacuacaucgacaagcagcuccuccccauccucaacaagcaguccugcuccauccccaacaucgagaccgucaucgaguuccagcagaagaacaaccgccuccucgagaucacccgcgaguucuccgucaacgccggcgucaccacccccgucuccaccuacaugcucaccaacuccgagcuccucucccucaucaacgacaugcccaucaccaacgaccagaagaagcucauguccaacaacguccagaucguccgccagcaguccuacuccaucaugugcaucaucaaggaggagguccucgccuacgucguccagcucccccucuacggcgucaucgacacccccugcuggaagcuccacaccuccccccucugcaccaccaacaccaaggagggcuccaacaucugccucacccgcaccgaccgcggcugguacugcgacaacgccggcuccgucuccuucuucccccaggccgagaccugcaagguccaguccaaccgcgucuucugcgacaccaugaacucccucacccuccccuccgaggucaaccucugcaacaucgacaucuucaaccccaaguacgacugcaagaucaugaccuccaagaccgacgucuccuccuccgucaucaccucccucggcgccaucgucuccugcuacggcaagaccaagugcaccgccuccaacaagaaccgcggcaucaucaagaccuucuccaacggcugcgacuacgucuccaacaagggcgucgacaccgucuccgucggcaacacccucuacugcgucaacaagcaggagggccagucccucuacgucaagggcgagcccaucaucaacuucuacgacccccucgucuuccccuccgacgaguucgacgccuccaucucccaggucaacgagaagaucaaccagucccucgccuucauccgcaaguccgacgagcuccuccacaacgucaacgucggcaaguccaccaccaacaucaugaucaccaccaucaucaucgucaucaucgucauccuccuccuccucaucgccgucggccucuuccucuacugcaaggcccgcugaggacuaguggaagcauuuuccuggcugauuaaaagaaauuacucagcuauggucaucuguuccuguuagaaggcuaugcagcauauuauauacuaugcgcauguuaugaaaugcauaauaaaaaauuuuaaaaaaucuaaaagaucuaaaaaaaaaaaaaaaaaaaaaaaaaaaaaaaaaaaaaaaaaaaaaaaaaaaaaaaaaaaaaaaaugcaucccccccccccccccccccccccccccccccaaaggcucuuuucagagccaccagaauu

SEQ ID NO: 15885 - RNA, 1943 nt, Artificial Sequence
  mRNA product Design c-2 comprising derived and/or modified sequence from HRSV(Memphis-37)__AIY60640.1__F-del_DSCav1_mut3 (opt3)
gggagacuccugucgggcggaaguaggaggaguagaguuuaaaaacaguacucuuuuuccgguucgggacguaguugaagcaacgacaagccggauaaccgcucuugagacaggaagcuuaccauggagcugcccauccucaagaccaacgccauuacaacuauacuugcugcagugacgcugugcuucgccagcucccagaauaucaccgaagaguuuuaccaaucuacauguucagcggucaguaaaggcuauuugggggcuuuaagaacuggaugguacaccagcguuauuacaaucgaacuguccaacauuaaggagaucaaaugcaaugguaccgacgccaaggugaaacuaauaaagcaggaacucgauaaguauaaaaacgcaguaacugaccugcagcuucugaugcagucuacuccugccgcuggcucggggucagcaaucuguagcggaauugccgugugcaaggucuugcaccucgagggcgaggugaauaaaaucaagaacgcucugcugaguaccaauaaagccguugugucccucucuaacggugucagcguguuaacguucaagguacuggaucuuaagaauuacauugacaaacaauugcugccaauccuaaacaagcaguccuguucaauaccgaauauugaaacuguuaucgaguuucagcagaaaaacaauaggcuccuggaaauuacccgggaguucagugugaacgcgggggucacaacucccgugagcaccuauaugcuuacaaauucugagcuguugucccucaucaacgauaugccuaucaccaacgaccaaaagaaacugaugucaaauaacgugcagauuguccgccagcagagcuacaguauaaugugcaucauuaaggaagagguuuuagcauaugugguacaacugccacucuacggagugaucgauacgcccuguuggaaacuucauacuucuccucugugcacaaccaauacuaaggaaggcuccaacauauguuugacacgaaccgaccguggcugguacugcgauaaugccgggagcgucucguuuuucccacaggcugagacguguaaggugcagucuaacagaguuuucugcgacaccaugaacucccuaacacugcccucagaagugaaucucugcaauauugauaucuucaacccuaaauaugacuguaagaucaugacaaguaaaaccgaugucagcuccucugugauuacaagccugggagccaucguaucaugcuacgguaagacuaaauguaccgcaaguaauaagaacaggggcauuauaaagacauuuuccaaugggugcgacuauguuagcaacaaaggaguggacaccgucucugugggcaauacucuuuacugugucaacaagcaagagggucagucacuguaugugaaaggggagccaaucauuaacuucuacgauccguugguuuuucccagugacgaauuugaugcuagcaucucccaggugaaugagaagaucaaccagucucucgccuuuauucggaaaucggacgaacuguuacacaauguaaacgucggaaagagcacgacaaauauaaugaucaccacuauuaucauugugaucauaguuauccugcuacuccugauugcggugggccuuuucuuguauugcaaggcccgcugaggacuaguggaagcauuuuccuggcugauuaaaagaaauuacucagcuauggucaucuguuccuguuagaaggcuaugcagcauauuauauacuaugcgcauguuaugaaaugcauaauaaaaaauuuuaaaaaaucuaaaagaucuaaaaaaaaaaaaaaaaaaaaaaaaaaaaaaaaaaaaaaaaaaaaaaaaaaaaaaaaaaaaaaaaugcaucccccccccccccccccccccccccccccccaaaggcucuuuucagagccaccagaauu

SEQ ID NO: 15886 - RNA, 1943 nt, Artificial Sequence
  mRNA product Design c-2 comprising derived and/or modified sequence from HRSV(Memphis-37)__AIY60640.1__F-del_DSCav1_mut3 (opt4)
gggagacuccugucgggcggaaguaggaggaguagaguuuaaaaacaguacucuuuuuccgguucgggacguaguugaagcaacgacaagccggauaaccgcucuugagacaggaagcuuaccauggagcugcccauccugaagaccaacgccaucaccaccauccuggccgccgugacccugugcuucgccagcagccagaacaucaccgaggaguucuaccagagcaccugcagcgccgugagcaagggcuaccugggcgcccugagaaccggcugguacaccagcgugaucaccaucgagcugagcaacaucaaggagaucaagugcaacggcaccgacgccaaggugaagcugaucaagcaggagcuggacaaguacaagaacgccgugaccgaccugcagcugcugaugcagagcacccccgccgccggcagcggcagcgccaucugcagcggcaucgccgugugcaaggugcugcaccuggagggcgaggugaacaagaucaagaacgcccugcugagcaccaacaaggccguggugagccugagcaacggcgugagcgugcugaccuucaaggugcuggaccugaagaacuacaucgacaagcagcugcugcccauccugaacaagcagagcugcagcauccccaacaucgagaccgugaucgaguuccagcagaagaacaacagacugcuggagaucaccagagaguucagcgugaacgccggcgugaccacccccgugagcaccuacaugcugaccaacagcgagcugcugagccugaucaacgacaugcccaucaccaacgaccagaagaagcugaugagcaacaacgugcagaucgugagacagcagagcuacagcaucaugugcaucaucaaggaggaggugcuggccuacguggugcagcugccccuguacggcgugaucgacacccccugcuggaagcugcacaccagcccccugugcaccaccaacaccaaggagggcagcaacaucugccugaccagaaccgacagaggcugguacugcgacaacgccggcagcgugagcuucuucccccaggccgagaccugcaaggugcagagcaacagaguguucugcgacaccaugaacagccugacccugcccagcgaggugaaccugugcaacaucgacaucuucaaccccaaguacgacugcaagaucaugaccagcaagaccgacgugagcagcagcgugaucaccagccugggcgccaucgugagcugcuacggcaagaccaagugcaccgccagcaacaagaacagaggcaucaucaagaccuucagcaacggcugcgacuacgugagcaacaagggcguggacaccgugagcgugggcaacacccuguacugcgugaacaagcaggagggccagagccuguacgugaagggcgagcccaucaucaacuucuacgacccccugguguuccccagcgacgaguucgacgccagcaucagccaggugaacgagaagaucaaccagagccuggccuucaucagaaagagcgacgagcugcugcacaacgugaacgugggcaagagcaccaccaacaucaugaucaccaccaucaucaucgugaucaucgugauccugcugcugcugaucgccgugggccuguuccuguacugcaaggccagaugaggacuaguggaagcauuuuccuggcugauuaaaagaaauuacucagcuauggucaucuguuccuguuagaaggcuaugcagcauauuauauacuaugcgcauguuaugaaaugcauaauaaaaaauuuuaaaaaaucuaaaagaucuaaaaaaaaaaaaaaaaaaaaaaaaaaaaaaaaaaaaaaaaaaaaaaaaaaaaaaaaaaaaaaaaugcaucccccccccccccccccccccccccccccccaaaggcucuuuucagagccaccagaauu

SEQ ID NO: 15887 - RNA, 1943 nt, Artificial Sequence
  mRNA product Design c-2 comprising derived and/or modified sequence from HRSV(Memphis-37)__AIY60640.1__F-del_DSCav1_mut3 (opt5)
gggagacuccugucgggcggaaguaggaggaguagaguuuaaaaacaguacucuuuuuccgguucgggacguaguugaagcaacgacaagccggauaaccgcucuugagacaggaagcuuaccauggagcugcccauccucaagaccaacgccauuacaacgauccuggcugccgugacccuuugcuucgcgagcucccagaauauuacagaagaguuuuaccaaucuaccuguagcgcugucuccaaaggcuaucugggggcccucagaacaggaugguacaccucuguuaucacaauugaacugagcaacaucaaggagaucaaaugcaauggcaccgacgccaaggugaaacuuauuaagcaggaacuggauaaguauaaaaacgcugugacggaccuccagcugcugaugcaguccaccccugccgcugggucuggaagcgccaucuguuccggcauugcggucugcaaggugcuccaccuggagggggagguuaauaaaaucaagaacgcccuucugagcacaaauaaagcuguggucucucucuccaacggagugagcguucugaccuucaaggugcuugaucugaagaauuacauugacaaacaacuccugccgauccugaacaagcagucuuguuccauucccaauaucgaaacagucaucgaguuucagcagaaaaacaaucggcuccuggaaauuacccgcgaguucagcgugaacgccggcgugacgacaccugucucuaccuauaugcuuacaaauuccgagcugcucagccugaucaacgauaugcccauuaccaacgaccaaaagaaacuuauguccaauaacguucagaucgugagacagcagucuuacagcauuaugugcaucaucaaggaagaggugcuggcuuaugucgugcaacucccucuguacggcguuauugauacccccuguuggaaacugcauacauccccucucugcacgaccaauacaaaggaagggagcaacaucugucugacccggacagaccgcggaugguacugcgauaaugccggcucuguguccuuuuucccgcaggcggagaccuguaagguccagagcaacagaguguuuugcgacacgaugaacucucuuacacugcccagcgaaguuaaucucugcaauauugauaucuucaacccuaaauaugacuguaagauuaugaccuccaaaaccgaugugucuagcuccgucaucacaagccugggggccaucgugucuugcuacggaaagaccaaauguacagcuuccaauaagaaccggggcauuaucaagacguuuagcaaugggugcgacuaugucucuaacaaaggaguggacaccguuuccgugggcaauacacuuuacugugucaacaagcaagagggccagagccuguaugugaaaggggagcccauuaucaacuucuacgauccucucguuuuucccuccgacgaguucgaugccucuauuagccaggugaaugaaaagaucaaccagucccuggcuuuuauucgcaaaucugacgaacugcuccacaaugucaacgugggaaagagcaccacaaauaucaugaucaccacgauuaucauugugaucauuguuauccugcuucugcucaucgccgucggccuguuccuguauugcaaggccagaugaggacuaguggaagcauuuuccuggcugauuaaaagaaauuacucagcuauggucaucuguuccuguuagaaggcuaugcagcauauuauauacuaugcgcauguuaugaaaugcauaauaaaaaauuuuaaaaaaucuaaaagaucuaaaaaaaaaaaaaaaaaaaaaaaaaaaaaaaaaaaaaaaaaaaaaaaaaaaaaaaaaaaaaaaaugcaucccccccccccccccccccccccccccccccaaaggcucuuuucagagccaccagaauu

SEQ ID NO: 15888 - RNA, 1943 nt, Artificial Sequence
  mRNA product Design c-2 comprising derived and/or modified sequence from HRSV(Memphis-37)__AIY60640.1__F-del_DSCav1_mut3 (opt6)
gggagacuccugucgggcggaaguaggaggaguagaguuuaaaaacaguacucuuuuuccgguucgggacguaguugaagcaacgacaagccggauaaccgcucuugagacaggaagcuuaccauggaacuacccauccuaaaaacaaaugccauaaccacaauacucgccgcuguaacacuauguuucgcuaguucacaaaacauuacagaagaauuuuaccaauccacaugcucagcaguaucaaaaggauaccuaggugcacuaagaacaggaugguacacaagcguaauuacaauagaauuauccaauauuaaagaaauaaaauguaacggcacugacgcuaaaguaaaauuaaucaaacaagaacuagacaaauacaaaaacgcaguaacagaccuacaauuacucaugcaauccacacccgcagcaggaucaggcucagccauaugcucagguauagcaguaugcaaaguacuccaccuugaaggagaaguaaacaaaauaaaaaacgcauuacuaucaacaaacaaagcaguaguaucacuaucaaacggagucucugucuuaaccuuuaaaguauuagauuuaaaaaacuacauagacaaacaacuauuaccaauucuaaauaaacaaucauguucuauaccaaauauagaaacaguaauagaauuucaacaaaaaaacaaccgauuacuagaaaucacaagagaauuuucugucaacgccggcguaaccaccccagucucaacauauaugcuaacaaauagugaacucuuauccuuaauaaacgacaugccaauaacaaaugaccaaaaaaaauuaauguccaauaacguacaaauagucagacaacagucauacucaauaauguguaucaucaaagaagaaguauuagcauacguaguucaacuaccccuauacggcguaauagacacaccauguuggaaacuacacacaucacccuuaugcacaaccaauaccaaagaaggaucuaacauaugccuaaccagaacagacagaggcugguacugcgacaacgcagguucagucucauucuucccacaagccgaaacaugcaaaguccaauccaacagaguauuuugcgacacuaugaacucacuaacucuaccuucagaagucaaccuuuguaacauagacauauuuaacccaaaauacgauuguaaaauaaugaccagcaaaacagacgucucaucaagcguaauaacaucacuuggcgcaauagucuccugcuacggaaaaacaaaaugcacagcauccaacaaaaacagaggcaucauaaaaaccuucuccaacggcugcgacuauguaagcaacaaaggugucgauacaguaucaguaggaaacacacuauacugcguaaacaaacaagaaggacaaucacucuacguaaaaggugaaccaaucauaaacuucuacgacccauuaguuuucccaucagacgaauuugaugccuccauaucacaaguaaaugaaaaaauaaaucaaucccuagcauucauacgaaaaucugaugaauuacuucacaaugucaacgucggaaaaucaaccacuaacauaaugauaacaacaauuauaauaguaauaauaguaauacuccuacuauuaauagccgucggucuuuuccuauacugcaaagcacgauaaggacuaguggaagcauuuuccuggcugauuaaaagaaauuacucagcuauggucaucuguuccuguuagaaggcuaugcagcauauuauauacuaugcgcauguuaugaaaugcauaauaaaaaauuuuaaaaaaucuaaaagaucuaaaaaaaaaaaaaaaaaaaaaaaaaaaaaaaaaaaaaaaaaaaaaaaaaaaaaaaaaaaaaaaaugcaucccccccccccccccccccccccccccccccaaaggcucuuuucagagccaccagaauu

SEQ ID NO: 15889 - RNA, 1943 nt, Artificial Sequence
  mRNA product Design c-2 comprising derived and/or modified sequence from HRSV(Memphis-37)__AIY60640.1__F-del_DSCav1_mut3 (opt11)
gggagacuccugucgggcggaaguaggaggaguagaguuuaaaaacaguacucuuuuuccgguucgggacguaguugaagcaacgacaagccggauaaccgcucuugagacaggaagcuuaccauggaacuacccauccucaaaaccaacgccaucaccacaauccuagcugccgucacccuaugcuucgcaagcagccaaaacaucacagaagaauuuuaccaaucaaccugcuccgccgucuccaaaggguaccuaggugcccuccgcaccggcugguacacgucugucauaaccaucgaacucuccaacaucaaagaaaucaaauguaacggaacagacgcaaaagucaaacuaaucaaacaagaacuagacaaauacaaaaacgccguaaccgaccuccaacugcucaugcaauccacccccgcugccggcuccgggagcgcaaucugcucuggaaucgccguaugcaaaguccuccaccucgaaggagaaguaaacaaaaucaaaaacgcgcuccucaguaccaacaaagccgucgucucucuaucaaacggcguaucgguccucaccuucaaaguccucgaccuaaagaacuacauagacaaacaacuccuccccauccuaaacaaacaauccugcucaaucccaaacaucgaaaccgugaucgaguuccaacagaaaaacaaccgccuacucgaaaucacccgagaguucucagucaacgcaggagucaccacccccgucucaacauacaugcuuaccaacagcgaacuccuaucccucaucaacgacaugccaaucacaaacgaccaaaagaaacucaugagcaacaacguccagaucguaagacaacaaagcuacagcaucaugugcaucaucaaagaagaaguacuagcauacgucguccaacucccccucuacggcgucaucgacacccccugcuggaaacuccacaccucaccccucugcacaaccaacaccaaagaaggcuccaauaucugccucacacgcaccgaccgcggcugguacugcgacaacgccggcuccgucuccuucuucccucaagccgaaaccugcaaaguccaguccaacagagucuucugcgacaccaugaacucccuaacacuuccaucagaagucaaccuuuguaacaucgacaucuucaaucccaaauacgacuguaaaauaaugaccucaaaaacugacgugucaagcucaguuaucaccucccuaggggccaucgucuccugcuacggcaaaacaaaaugcaccgcauccaacaaaaaucgcggaaucaucaaaacauucuccaacggaugcgacuacgucucaaacaagggaguagauaccguaagcguuggcaacacccucuacugcguaaacaaacaagaaggccaaucacucuacgucaaaggcgaacccauaaucaacuucuacgacccccucgucuucccuuccgaugaguucgacgccagcaucucccaagucaacgagaaaauaaaccagucacucgcauucauccgcaaaagcgacgaacuccuccacaacguaaacguaggcaaauccacaaccaauaucaugauaaccacaaucaucaucgugaucaucgucauccuccuccuccucauagcugucggacucuuccucuacuguaaagcacgcugaggacuaguggaagcauuuuccuggcugauuaaaagaaauuacucagcuauggucaucuguuccuguuagaaggcuaugcagcauauuauauacuaugcgcauguuaugaaaugcauaauaaaaaauuuuaaaaaaucuaaaagaucuaaaaaaaaaaaaaaaaaaaaaaaaaaaaaaaaaaaaaaaaaaaaaaaaaaaaaaaaaaaaaaaaugcaucccccccccccccccccccccccccccccccaaaggcucuuuucagagccaccagaauu

SEQ ID NO: 15890 - RNA, 1920 nt, Artificial Sequence
  mRNA product Design c-3 comprising derived and/or modified sequence from HRSV(Memphis-37)__AIY60640.1__F-del_DSCav1_mut3 (opt1)
gggagaguccgcucagccagguugcagaagcggcuuagcguguguccuaaucuucucucugcguguagguaggccugugccgcaaacaagcuuaccauggagcugcccauccucaagaccaacgccaucaccacgauccuggccgcggugacccugugcuucgccagcucccagaacaucaccgaggaguucuaccagagcacgugcuccgccgucagcaagggcuaccucggcgcccugcgcaccgggugguacaccagcgugaucaccaucgagcuguccaacaucaaggagaucaagugcaacggcaccgacgccaaggugaagcucaucaagcaggagcuggacaaguacaagaacgcggucacggaccugcagcuccugaugcagagcaccccggccgccggcuccgggagcgcgaucugcuccggcaucgccgucugcaaggugcugcaccucgagggcgaggugaacaagaucaagaacgcccugcuguccaccaacaaggccgucgugagccucuccaacggggugagcguccugaccuucaaggugcuggaccucaagaacuacaucgacaagcagcugcugcccauccugaacaagcagagcugcuccauccccaacaucgagaccgucaucgaguuccagcagaagaacaaccgccuccuggagaucacgcgggaguucagcgugaacgcgggcgugaccacccccgucuccaccuacaugcugacgaacagcgagcuccugucccugaucaacgacaugccgaucaccaacgaccagaagaagcucaugagcaacaacgugcagaucgugcgccagcaguccuacagcaucaugugcaucaucaaggaggagguccuggccuacguggugcagcugccccucuacggggucaucgacacccccugcuggaagcugcacaccagcccccugugcacgaccaacaccaaggagggcuccaacaucugccucacccggacggaccgcgggugguacugcgacaacgccggcagcguguccuucuucccgcaggccgagaccugcaagguccagagcaaccggguguucugcgacaccaugaacucccugacccugcccagcgaggugaaccucugcaacaucgacaucuucaaccccaaguacgacugcaagaucaugacguccaagaccgacgucagcuccagcgugaucaccucccugggcgccaucgugagcugcuacgggaagaccaagugcacggcgagcaacaagaaccgcggcaucaucaagaccuucuccaacgggugcgacuacgucagcaacaagggcguggacaccguguccgucggcaacacccuguacugcgugaacaagcaggagggccagagccucuacgugaagggggagcccaucaucaacuucuacgacccgcuggucuuccccuccgacgaguucgacgccagcaucucccaggugaacgagaagaucaaccagagccuggccuucauccggaaguccgacgagcuccugcacaacgugaacgucggcaagagcaccacgaacaucaugaucaccaccaucaucaucgugaucaucgugauccugcugcuccugaucgccgucgggcuguuccucuacugcaaggcccgcugaggacuaguacuggcugcaucucccuuuccucuguccuccauccuucucccaggauggugaagggggaccugguacccagugauccccaccccaggauccuaaaucaugacuuaccugcuaauaaaaacucauuggaaaagugagaagaucuaaaaaaaaaaaaaaaaaaaaaaaaaaaaaaaaaaaaaaaaaaaaaaaaaaaaaaaaaaaaaaaaugcaucccccccccccccccccccccccccccccccaaaggcucuuuucagagccaccagaauu

SEQ ID NO: 15891 - RNA, 1920 nt, Artificial Sequence
  mRNA product Design c-3 comprising derived and/or modified sequence from HRSV(Memphis-37)__AIY60640.1__F-del_DSCav1_mut3 (opt1)
gggagaguccgcucagccagguugcagaagcggcuuagcguguguccuaaucuucucucugcguguagguaggccugugccgcaaacaagcuuaccauggagcugcccauccucaagaccaacgccaucaccacgauccuggccgcggugacccugugcuucgccagcucccagaacaucaccgaggaguucuaccagagcacgugcuccgccgucagcaagggcuaccucggggcccugcgcaccggcugguacaccuccgugaucaccaucgagcugagcaacaucaaggagaucaagugcaacgggaccgacgccaaggugaagcucaucaagcaggagcuggacaaguacaagaacgcggucacggaccugcagcuccugaugcaguccaccccggccgccggcagcggguccgccaucugcagcggcaucgcggugugcaaggugcugcaccucgagggcgaggucaacaagaucaagaacgcccugcuguccaccaacaaggccguggugagccucuccaacggggucagcgugcugaccuucaaggugcuggaccucaagaacuacaucgacaagcagcugcugcccauccucaacaagcaguccugcagcauccccaacaucgagacggucaucgaguuccagcagaagaacaaccggcugcuggagaucacccgcgaguucuccgugaacgccggcgugaccacccccgucagcacguacaugcucaccaacuccgagcugcugagccucaucaacgacaugccgaucaccaacgaccagaagaagcugaugagcaacaacgugcagaucgugcggcagcaguccuacagcaucaugugcaucaucaaggaggagguccuggccuacguggugcagcucccccuguacggggucaucgacacccccugcuggaagcugcacacgagcccccucugcaccaccaacaccaaggagggcuccaacaucugccugacgcgcaccgaccgggggugguacugcgacaacgcgggcuccgugagcuucuucccgcaggccgagaccugcaaggugcaguccaaccgcgucuucugcgacaccaugaacagccugacgcuccccuccgaggugaaccugugcaacaucgacaucuucaaccccaaguacgacugcaagaucaugaccagcaagaccgacgucuccagcuccgugaucaccagccugggcgccaucguguccugcuacgggaagacgaagugcaccgccagcaacaagaaccggggcaucaucaagaccuucuccaacgggugcgacuacgucagcaacaagggcguggacaccguguccgucggcaacacgcucuacugcgugaacaagcaggaggggcagagccuguacgugaagggcgagcccaucaucaacuucuacgacccgcuggucuuccccagcgacgaguucgacgccuccaucagccaggugaacgagaagaucaaccagucccucgcguucauccgcaagagcgacgagcugcugcacaacgugaacgucgggaaguccaccaccaacaucaugaucaccaccaucaucaucgugaucaucgugauccuccugcugcucaucgccgucggccuguuccuguacugcaaggcccggugaggacuaguacuggcugcaucucccuuuccucuguccuccauccuucucccaggauggugaagggggaccugguacccagugauccccaccccaggauccuaaaucaugacuuaccugcuaauaaaaacucauuggaaaagugagaagaucuaaaaaaaaaaaaaaaaaaaaaaaaaaaaaaaaaaaaaaaaaaaaaaaaaaaaaaaaaaaaaaaaugcaucccccccccccccccccccccccccccccccaaaggcucuuuucagagccaccagaauu

SEQ ID NO: 15892 - RNA, 1920 nt, Artificial Sequence
  mRNA product Design c-3 comprising derived and/or modified sequence from HRSV(Memphis-37)__AIY60640.1__F-del_DSCav1_mut3 (opt2)
gggagaguccgcucagccagguugcagaagcggcuuagcguguguccuaaucuucucucugcguguagguaggccugugccgcaaacaagcuuaccauggagcuccccauccucaagaccaacgccaucaccaccauccucgccgccgucacccucugcuucgccuccucccagaacaucaccgaggaguucuaccaguccaccugcuccgccgucuccaagggcuaccucggcgcccuccgcaccggcugguacaccuccgucaucaccaucgagcucuccaacaucaaggagaucaagugcaacggcaccgacgccaaggucaagcucaucaagcaggagcucgacaaguacaagaacgccgucaccgaccuccagcuccucaugcaguccacccccgccgccggcuccggcuccgccaucugcuccggcaucgccgucugcaagguccuccaccucgagggcgaggucaacaagaucaagaacgcccuccucuccaccaacaaggccgucgucucccucuccaacggcgucuccguccucaccuucaagguccucgaccucaagaacuacaucgacaagcagcuccuccccauccucaacaagcaguccugcuccauccccaacaucgagaccgucaucgaguuccagcagaagaacaaccgccuccucgagaucacccgcgaguucuccgucaacgccggcgucaccacccccgucuccaccuacaugcucaccaacuccgagcuccucucccucaucaacgacaugcccaucaccaacgaccagaagaagcucauguccaacaacguccagaucguccgccagcaguccuacuccaucaugugcaucaucaaggaggagguccucgccuacgucguccagcucccccucuacggcgucaucgacacccccugcuggaagcuccacaccuccccccucugcaccaccaacaccaaggagggcuccaacaucugccucacccgcaccgaccgcggcugguacugcgacaacgccggcuccgucuccuucuucccccaggccgagaccugcaagguccaguccaaccgcgucuucugcgacaccaugaacucccucacccuccccuccgaggucaaccucugcaacaucgacaucuucaaccccaaguacgacugcaagaucaugaccuccaagaccgacgucuccuccuccgucaucaccucccucggcgccaucgucuccugcuacggcaagaccaagugcaccgccuccaacaagaaccgcggcaucaucaagaccuucuccaacggcugcgacuacgucuccaacaagggcgucgacaccgucuccgucggcaacacccucuacugcgucaacaagcaggagggccagucccucuacgucaagggcgagcccaucaucaacuucuacgacccccucgucuuccccuccgacgaguucgacgccuccaucucccaggucaacgagaagaucaaccagucccucgccuucauccgcaaguccgacgagcuccuccacaacgucaacgucggcaaguccaccaccaacaucaugaucaccaccaucaucaucgucaucaucgucauccuccuccuccucaucgccgucggccucuuccucuacugcaaggcccgcugaggacuaguacuggcugcaucucccuuuccucuguccuccauccuucucccaggauggugaagggggaccugguacccagugauccccaccccaggauccuaaaucaugacuuaccugcuaauaaaaacucauuggaaaagugagaagaucuaaaaaaaaaaaaaaaaaaaaaaaaaaaaaaaaaaaaaaaaaaaaaaaaaaaaaaaaaaaaaaaaugcaucccccccccccccccccccccccccccccccaaaggcucuuuucagagccaccagaauu

SEQ ID NO: 15893 - RNA, 1920 nt, Artificial Sequence
  mRNA product Design c-3 comprising derived and/or modified sequence from HRSV(Memphis-37)__AIY60640.1__F-del_DSCav1_mut3 (opt3)
gggagaguccgcucagccagguugcagaagcggcuuagcguguguccuaaucuucucucugcguguagguaggccugugccgcaaacaagcuuaccauggagcugcccauccucaagaccaacgccauuacaacuauacuugcugcagugacgcugugcuucgccagcucccagaauaucaccgaagaguuuuaccaaucuacauguucagcggucaguaaaggcuauuugggggcuuuaagaacuggaugguacaccagcguuauuacaaucgaacuguccaacauuaaggagaucaaaugcaaugguaccgacgccaaggugaaacuaauaaagcaggaacucgauaaguauaaaaacgcaguaacugaccugcagcuucugaugcagucuacuccugccgcuggcucggggucagcaaucuguagcggaauugccgugugcaaggucuugcaccucgagggcgaggugaauaaaaucaagaacgcucugcugaguaccaauaaagccguugugucccucucuaacggugucagcguguuaacguucaagguacuggaucuuaagaauuacauugacaaacaauugcugccaauccuaaacaagcaguccuguucaauaccgaauauugaaacuguuaucgaguuucagcagaaaaacaauaggcuccuggaaauuacccgggaguucagugugaacgcgggggucacaacucccgugagcaccuauaugcuuacaaauucugagcuguugucccucaucaacgauaugccuaucaccaacgaccaaaagaaacugaugucaaauaacgugcagauuguccgccagcagagcuacaguauaaugugcaucauuaaggaagagguuuuagcauaugugguacaacugccacucuacggagugaucgauacgcccuguuggaaacuucauacuucuccucugugcacaaccaauacuaaggaaggcuccaacauauguuugacacgaaccgaccguggcugguacugcgauaaugccgggagcgucucguuuuucccacaggcugagacguguaaggugcagucuaacagaguuuucugcgacaccaugaacucccuaacacugcccucagaagugaaucucugcaauauugauaucuucaacccuaaauaugacuguaagaucaugacaaguaaaaccgaugucagcuccucugugauuacaagccugggagccaucguaucaugcuacgguaagacuaaauguaccgcaaguaauaagaacaggggcauuauaaagacauuuuccaaugggugcgacuauguuagcaacaaaggaguggacaccgucucugugggcaauacucuuuacugugucaacaagcaagagggucagucacuguaugugaaaggggagccaaucauuaacuucuacgauccguugguuuuucccagugacgaauuugaugcuagcaucucccaggugaaugagaagaucaaccagucucucgccuuuauucggaaaucggacgaacuguuacacaauguaaacgucggaaagagcacgacaaauauaaugaucaccacuauuaucauugugaucauaguuauccugcuacuccugauugcggugggccuuuucuuguauugcaaggcccgcugaggacuaguacuggcugcaucucccuuuccucuguccuccauccuucucccaggauggugaagggggaccugguacccagugauccccaccccaggauccuaaaucaugacuuaccugcuaauaaaaacucauuggaaaagugagaagaucuaaaaaaaaaaaaaaaaaaaaaaaaaaaaaaaaaaaaaaaaaaaaaaaaaaaaaaaaaaaaaaaaugcaucccccccccccccccccccccccccccccccaaaggcucuuuucagagccaccagaauu

SEQ ID NO: 15894 - RNA, 1920 nt, Artificial Sequence
  mRNA product Design c-3 comprising derived and/or modified sequence from HRSV(Memphis-37)__AIY60640.1__F-del_DSCav1_mut3 (opt4)
gggagaguccgcucagccagguugcagaagcggcuuagcguguguccuaaucuucucucugcguguagguaggccugugccgcaaacaagcuuaccauggagcugcccauccugaagaccaacgccaucaccaccauccuggccgccgugacccugugcuucgccagcagccagaacaucaccgaggaguucuaccagagcaccugcagcgccgugagcaagggcuaccugggcgcccugagaaccggcugguacaccagcgugaucaccaucgagcugagcaacaucaaggagaucaagugcaacggcaccgacgccaaggugaagcugaucaagcaggagcuggacaaguacaagaacgccgugaccgaccugcagcugcugaugcagagcacccccgccgccggcagcggcagcgccaucugcagcggcaucgccgugugcaaggugcugcaccuggagggcgaggugaacaagaucaagaacgcccugcugagcaccaacaaggccguggugagccugagcaacggcgugagcgugcugaccuucaaggugcuggaccugaagaacuacaucgacaagcagcugcugcccauccugaacaagcagagcugcagcauccccaacaucgagaccgugaucgaguuccagcagaagaacaacagacugcuggagaucaccagagaguucagcgugaacgccggcgugaccacccccgugagcaccuacaugcugaccaacagcgagcugcugagccugaucaacgacaugcccaucaccaacgaccagaagaagcugaugagcaacaacgugcagaucgugagacagcagagcuacagcaucaugugcaucaucaaggaggaggugcuggccuacguggugcagcugccccuguacggcgugaucgacacccccugcuggaagcugcacaccagcccccugugcaccaccaacaccaaggagggcagcaacaucugccugaccagaaccgacagaggcugguacugcgacaacgccggcagcgugagcuucuucccccaggccgagaccugcaaggugcagagcaacagaguguucugcgacaccaugaacagccugacccugcccagcgaggugaaccugugcaacaucgacaucuucaaccccaaguacgacugcaagaucaugaccagcaagaccgacgugagcagcagcgugaucaccagccugggcgccaucgugagcugcuacggcaagaccaagugcaccgccagcaacaagaacagaggcaucaucaagaccuucagcaacggcugcgacuacgugagcaacaagggcguggacaccgugagcgugggcaacacccuguacugcgugaacaagcaggagggccagagccuguacgugaagggcgagcccaucaucaacuucuacgacccccugguguuccccagcgacgaguucgacgccagcaucagccaggugaacgagaagaucaaccagagccuggccuucaucagaaagagcgacgagcugcugcacaacgugaacgugggcaagagcaccaccaacaucaugaucaccaccaucaucaucgugaucaucgugauccugcugcugcugaucgccgugggccuguuccuguacugcaaggccagaugaggacuaguacuggcugcaucucccuuuccucuguccuccauccuucucccaggauggugaagggggaccugguacccagugauccccaccccaggauccuaaaucaugacuuaccugcuaauaaaaacucauuggaaaagugagaagaucuaaaaaaaaaaaaaaaaaaaaaaaaaaaaaaaaaaaaaaaaaaaaaaaaaaaaaaaaaaaaaaaaugcaucccccccccccccccccccccccccccccccaaaggcucuuuucagagccaccagaauu

SEQ ID NO: 15895 - RNA, 1920 nt, Artificial Sequence
  mRNA product Design c-3 comprising derived and/or modified sequence from HRSV(Memphis-37)__AIY60640.1__F-del_DSCav1_mut3 (opt5)
gggagaguccgcucagccagguugcagaagcggcuuagcguguguccuaaucuucucucugcguguagguaggccugugccgcaaacaagcuuaccauggagcugcccauccucaagaccaacgccauuacaacgauccuggcugccgugacccuuugcuucgcgagcucccagaauauuacagaagaguuuuaccaaucuaccuguagcgcugucuccaaaggcuaucugggggcccucagaacaggaugguacaccucuguuaucacaauugaacugagcaacaucaaggagaucaaaugcaauggcaccgacgccaaggugaaacuuauuaagcaggaacuggauaaguauaaaaacgcugugacggaccuccagcugcugaugcaguccaccccugccgcugggucuggaagcgccaucuguuccggcauugcggucugcaaggugcuccaccuggagggggagguuaauaaaaucaagaacgcccuucugagcacaaauaaagcuguggucucucucuccaacggagugagcguucugaccuucaaggugcuugaucugaagaauuacauugacaaacaacuccugccgauccugaacaagcagucuuguuccauucccaauaucgaaacagucaucgaguuucagcagaaaaacaaucggcuccuggaaauuacccgcgaguucagcgugaacgccggcgugacgacaccugucucuaccuauaugcuuacaaauuccgagcugcucagccugaucaacgauaugcccauuaccaacgaccaaaagaaacuuauguccaauaacguucagaucgugagacagcagucuuacagcauuaugugcaucaucaaggaagaggugcuggcuuaugucgugcaacucccucuguacggcguuauugauacccccuguuggaaacugcauacauccccucucugcacgaccaauacaaaggaagggagcaacaucugucugacccggacagaccgcggaugguacugcgauaaugccggcucuguguccuuuuucccgcaggcggagaccuguaagguccagagcaacagaguguuuugcgacacgaugaacucucuuacacugcccagcgaaguuaaucucugcaauauugauaucuucaacccuaaauaugacuguaagauuaugaccuccaaaaccgaugugucuagcuccgucaucacaagccugggggccaucgugucuugcuacggaaagaccaaauguacagcuuccaauaagaaccggggcauuaucaagacguuuagcaaugggugcgacuaugucucuaacaaaggaguggacaccguuuccgugggcaauacacuuuacugugucaacaagcaagagggccagagccuguaugugaaaggggagcccauuaucaacuucuacgauccucucguuuuucccuccgacgaguucgaugccucuauuagccaggugaaugaaaagaucaaccagucccuggcuuuuauucgcaaaucugacgaacugcuccacaaugucaacgugggaaagagcaccacaaauaucaugaucaccacgauuaucauugugaucauuguuauccugcuucugcucaucgccgucggccuguuccuguauugcaaggccagaugaggacuaguacuggcugcaucucccuuuccucuguccuccauccuucucccaggauggugaagggggaccugguacccagugauccccaccccaggauccuaaaucaugacuuaccugcuaauaaaaacucauuggaaaagugagaagaucuaaaaaaaaaaaaaaaaaaaaaaaaaaaaaaaaaaaaaaaaaaaaaaaaaaaaaaaaaaaaaaaaugcaucccccccccccccccccccccccccccccccaaaggcucuuuucagagccaccagaauu

SEQ ID NO: 15896 - RNA, 1920 nt, Artificial Sequence
  mRNA product Design c-3 comprising derived and/or modified sequence from HRSV(Memphis-37)__AIY60640.1__F-del_DSCav1_mut3 (opt6)
gggagaguccgcucagccagguugcagaagcggcuuagcguguguccuaaucuucucucugcguguagguaggccugugccgcaaacaagcuuaccauggaacuacccauccuaaaaacaaaugccauaaccacaauacucgccgcuguaacacuauguuucgcuaguucacaaaacauuacagaagaauuuuaccaauccacaugcucagcaguaucaaaaggauaccuaggugcacuaagaacaggaugguacacaagcguaauuacaauagaauuauccaauauuaaagaaauaaaauguaacggcacugacgcuaaaguaaaauuaaucaaacaagaacuagacaaauacaaaaacgcaguaacagaccuacaauuacucaugcaauccacacccgcagcaggaucaggcucagccauaugcucagguauagcaguaugcaaaguacuccaccuugaaggagaaguaaacaaaauaaaaaacgcauuacuaucaacaaacaaagcaguaguaucacuaucaaacggagucucugucuuaaccuuuaaaguauuagauuuaaaaaacuacauagacaaacaacuauuaccaauucuaaauaaacaaucauguucuauaccaaauauagaaacaguaauagaauuucaacaaaaaaacaaccgauuacuagaaaucacaagagaauuuucugucaacgccggcguaaccaccccagucucaacauauaugcuaacaaauagugaacucuuauccuuaauaaacgacaugccaauaacaaaugaccaaaaaaaauuaauguccaauaacguacaaauagucagacaacagucauacucaauaauguguaucaucaaagaagaaguauuagcauacguaguucaacuaccccuauacggcguaauagacacaccauguuggaaacuacacacaucacccuuaugcacaaccaauaccaaagaaggaucuaacauaugccuaaccagaacagacagaggcugguacugcgacaacgcagguucagucucauucuucccacaagccgaaacaugcaaaguccaauccaacagaguauuuugcgacacuaugaacucacuaacucuaccuucagaagucaaccuuuguaacauagacauauuuaacccaaaauacgauuguaaaauaaugaccagcaaaacagacgucucaucaagcguaauaacaucacuuggcgcaauagucuccugcuacggaaaaacaaaaugcacagcauccaacaaaaacagaggcaucauaaaaaccuucuccaacggcugcgacuauguaagcaacaaaggugucgauacaguaucaguaggaaacacacuauacugcguaaacaaacaagaaggacaaucacucuacguaaaaggugaaccaaucauaaacuucuacgacccauuaguuuucccaucagacgaauuugaugccuccauaucacaaguaaaugaaaaaauaaaucaaucccuagcauucauacgaaaaucugaugaauuacuucacaaugucaacgucggaaaaucaaccacuaacauaaugauaacaacaauuauaauaguaauaauaguaauacuccuacuauuaauagccgucggucuuuuccuauacugcaaagcacgauaaggacuaguacuggcugcaucucccuuuccucuguccuccauccuucucccaggauggugaagggggaccugguacccagugauccccaccccaggauccuaaaucaugacuuaccugcuaauaaaaacucauuggaaaagugagaagaucuaaaaaaaaaaaaaaaaaaaaaaaaaaaaaaaaaaaaaaaaaaaaaaaaaaaaaaaaaaaaaaaaugcaucccccccccccccccccccccccccccccccaaaggcucuuuucagagccaccagaauu

SEQ ID NO: 15897 - RNA, 1920 nt, Artificial Sequence
  mRNA product Design c-3 comprising derived and/or modified sequence from HRSV(Memphis-37)__AIY60640.1__F-del_DSCav1_mut3 (opt11)
gggagaguccgcucagccagguugcagaagcggcuuagcguguguccuaaucuucucucugcguguagguaggccugugccgcaaacaagcuuaccauggaacuacccauccucaaaaccaacgccaucaccacaauccuagcugccgucacccuaugcuucgcaagcagccaaaacaucacagaagaauuuuaccaaucaaccugcuccgccgucuccaaaggguaccuaggugcccuccgcaccggcugguacacgucugucauaaccaucgaacucuccaacaucaaagaaaucaaauguaacggaacagacgcaaaagucaaacuaaucaaacaagaacuagacaaauacaaaaacgccguaaccgaccuccaacugcucaugcaauccacccccgcugccggcuccgggagcgcaaucugcucuggaaucgccguaugcaaaguccuccaccucgaaggagaaguaaacaaaaucaaaaacgcgcuccucaguaccaacaaagccgucgucucucuaucaaacggcguaucgguccucaccuucaaaguccucgaccuaaagaacuacauagacaaacaacuccuccccauccuaaacaaacaauccugcucaaucccaaacaucgaaaccgugaucgaguuccaacagaaaaacaaccgccuacucgaaaucacccgagaguucucagucaacgcaggagucaccacccccgucucaacauacaugcuuaccaacagcgaacuccuaucccucaucaacgacaugccaaucacaaacgaccaaaagaaacucaugagcaacaacguccagaucguaagacaacaaagcuacagcaucaugugcaucaucaaagaagaaguacuagcauacgucguccaacucccccucuacggcgucaucgacacccccugcuggaaacuccacaccucaccccucugcacaaccaacaccaaagaaggcuccaauaucugccucacacgcaccgaccgcggcugguacugcgacaacgccggcuccgucuccuucuucccucaagccgaaaccugcaaaguccaguccaacagagucuucugcgacaccaugaacucccuaacacuuccaucagaagucaaccuuuguaacaucgacaucuucaaucccaaauacgacuguaaaauaaugaccucaaaaacugacgugucaagcucaguuaucaccucccuaggggccaucgucuccugcuacggcaaaacaaaaugcaccgcauccaacaaaaaucgcggaaucaucaaaacauucuccaacggaugcgacuacgucucaaacaagggaguagauaccguaagcguuggcaacacccucuacugcguaaacaaacaagaaggccaaucacucuacgucaaaggcgaacccauaaucaacuucuacgacccccucgucuucccuuccgaugaguucgacgccagcaucucccaagucaacgagaaaauaaaccagucacucgcauucauccgcaaaagcgacgaacuccuccacaacguaaacguaggcaaauccacaaccaauaucaugauaaccacaaucaucaucgugaucaucgucauccuccuccuccucauagcugucggacucuuccucuacuguaaagcacgcugaggacuaguacuggcugcaucucccuuuccucuguccuccauccuucucccaggauggugaagggggaccugguacccagugauccccaccccaggauccuaaaucaugacuuaccugcuaauaaaaacucauuggaaaagugagaagaucuaaaaaaaaaaaaaaaaaaaaaaaaaaaaaaaaaaaaaaaaaaaaaaaaaaaaaaaaaaaaaaaaugcaucccccccccccccccccccccccccccccccaaaggcucuuuucagagccaccagaauu

SEQ ID NO: 15898 - RNA, 1916 nt, Artificial Sequence
  mRNA product Design c-4 comprising derived and/or modified sequence from HRSV(Memphis-37)__AIY60640.1__F-del_DSCav1_mut3 (opt1)
gggagaguccgcucagccagguugcagaagcggcuuagcguguguccuaaucuucucucugcguguagguaggccugugccgcaaacaagcuuaccauggagcugcccauccucaagaccaacgccaucaccacgauccuggccgcggugacccugugcuucgccagcucccagaacaucaccgaggaguucuaccagagcacgugcuccgccgucagcaagggcuaccucggcgcccugcgcaccgggugguacaccagcgugaucaccaucgagcuguccaacaucaaggagaucaagugcaacggcaccgacgccaaggugaagcucaucaagcaggagcuggacaaguacaagaacgcggucacggaccugcagcuccugaugcagagcaccccggccgccggcuccgggagcgcgaucugcuccggcaucgccgucugcaaggugcugcaccucgagggcgaggugaacaagaucaagaacgcccugcuguccaccaacaaggccgucgugagccucuccaacggggugagcguccugaccuucaaggugcuggaccucaagaacuacaucgacaagcagcugcugcccauccugaacaagcagagcugcuccauccccaacaucgagaccgucaucgaguuccagcagaagaacaaccgccuccuggagaucacgcgggaguucagcgugaacgcgggcgugaccacccccgucuccaccuacaugcugacgaacagcgagcuccugucccugaucaacgacaugccgaucaccaacgaccagaagaagcucaugagcaacaacgugcagaucgugcgccagcaguccuacagcaucaugugcaucaucaaggaggagguccuggccuacguggugcagcugccccucuacggggucaucgacacccccugcuggaagcugcacaccagcccccugugcacgaccaacaccaaggagggcuccaacaucugccucacccggacggaccgcgggugguacugcgacaacgccggcagcguguccuucuucccgcaggccgagaccugcaagguccagagcaaccggguguucugcgacaccaugaacucccugacccugcccagcgaggugaaccucugcaacaucgacaucuucaaccccaaguacgacugcaagaucaugacguccaagaccgacgucagcuccagcgugaucaccucccugggcgccaucgugagcugcuacgggaagaccaagugcacggcgagcaacaagaaccgcggcaucaucaagaccuucuccaacgggugcgacuacgucagcaacaagggcguggacaccguguccgucggcaacacccuguacugcgugaacaagcaggagggccagagccucuacgugaagggggagcccaucaucaacuucuacgacccgcuggucuuccccuccgacgaguucgacgccagcaucucccaggugaacgagaagaucaaccagagccuggccuucauccggaaguccgacgagcuccugcacaacgugaacgucggcaagagcaccacgaacaucaugaucaccaccaucaucaucgugaucaucgugauccugcugcuccugaucgccgucgggcuguuccucuacugcaaggcccgcugaggacuaguggaagcauuuuccuggcugauuaaaagaaauuacucagcuauggucaucuguuccuguuagaaggcuaugcagcauauuauauacuaugcgcauguuaugaaaugcauaauaaaaaauuuuaaaaaaucuaaaagaucuaaaaaaaaaaaaaaaaaaaaaaaaaaaaaaaaaaaaaaaaaaaaaaaaaaaaaaaaaaaaaaaaugcaucccccccccccccccccccccccccccccccaaaggcucuuuucagagccaccagaauu

SEQ ID NO: 15899 - RNA, 1916 nt, Artificial Sequence
  mRNA product Design c-4 comprising derived and/or modified sequence from HRSV(Memphis-37)__AIY60640.1__F-del_DSCav1_mut3 (opt1)
gggagaguccgcucagccagguugcagaagcggcuuagcguguguccuaaucuucucucugcguguagguaggccugugccgcaaacaagcuuaccauggagcugcccauccucaagaccaacgccaucaccacgauccuggccgcggugacccugugcuucgccagcucccagaacaucaccgaggaguucuaccagagcacgugcuccgccgucagcaagggcuaccucggggcccugcgcaccggcugguacaccuccgugaucaccaucgagcugagcaacaucaaggagaucaagugcaacgggaccgacgccaaggugaagcucaucaagcaggagcuggacaaguacaagaacgcggucacggaccugcagcuccugaugcaguccaccccggccgccggcagcggguccgccaucugcagcggcaucgcggugugcaaggugcugcaccucgagggcgaggucaacaagaucaagaacgcccugcuguccaccaacaaggccguggugagccucuccaacggggucagcgugcugaccuucaaggugcuggaccucaagaacuacaucgacaagcagcugcugcccauccucaacaagcaguccugcagcauccccaacaucgagacggucaucgaguuccagcagaagaacaaccggcugcuggagaucacccgcgaguucuccgugaacgccggcgugaccacccccgucagcacguacaugcucaccaacuccgagcugcugagccucaucaacgacaugccgaucaccaacgaccagaagaagcugaugagcaacaacgugcagaucgugcggcagcaguccuacagcaucaugugcaucaucaaggaggagguccuggccuacguggugcagcucccccuguacggggucaucgacacccccugcuggaagcugcacacgagcccccucugcaccaccaacaccaaggagggcuccaacaucugccugacgcgcaccgaccgggggugguacugcgacaacgcgggcuccgugagcuucuucccgcaggccgagaccugcaaggugcaguccaaccgcgucuucugcgacaccaugaacagccugacgcuccccuccgaggugaaccugugcaacaucgacaucuucaaccccaaguacgacugcaagaucaugaccagcaagaccgacgucuccagcuccgugaucaccagccugggcgccaucguguccugcuacgggaagacgaagugcaccgccagcaacaagaaccggggcaucaucaagaccuucuccaacgggugcgacuacgucagcaacaagggcguggacaccguguccgucggcaacacgcucuacugcgugaacaagcaggaggggcagagccuguacgugaagggcgagcccaucaucaacuucuacgacccgcuggucuuccccagcgacgaguucgacgccuccaucagccaggugaacgagaagaucaaccagucccucgcguucauccgcaagagcgacgagcugcugcacaacgugaacgucgggaaguccaccaccaacaucaugaucaccaccaucaucaucgugaucaucgugauccuccugcugcucaucgccgucggccuguuccuguacugcaaggcccggugaggacuaguggaagcauuuuccuggcugauuaaaagaaauuacucagcuauggucaucuguuccuguuagaaggcuaugcagcauauuauauacuaugcgcauguuaugaaaugcauaauaaaaaauuuuaaaaaaucuaaaagaucuaaaaaaaaaaaaaaaaaaaaaaaaaaaaaaaaaaaaaaaaaaaaaaaaaaaaaaaaaaaaaaaaugcaucccccccccccccccccccccccccccccccaaaggcucuuuucagagccaccagaauu

SEQ ID NO: 15900 - RNA, 1916 nt, Artificial Sequence
  mRNA product Design c-4 comprising derived and/or modified sequence from HRSV(Memphis-37)__AIY60640.1__F-del_DSCav1_mut3 (opt2)
gggagaguccgcucagccagguugcagaagcggcuuagcguguguccuaaucuucucucugcguguagguaggccugugccgcaaacaagcuuaccauggagcuccccauccucaagaccaacgccaucaccaccauccucgccgccgucacccucugcuucgccuccucccagaacaucaccgaggaguucuaccaguccaccugcuccgccgucuccaagggcuaccucggcgcccuccgcaccggcugguacaccuccgucaucaccaucgagcucuccaacaucaaggagaucaagugcaacggcaccgacgccaaggucaagcucaucaagcaggagcucgacaaguacaagaacgccgucaccgaccuccagcuccucaugcaguccacccccgccgccggcuccggcuccgccaucugcuccggcaucgccgucugcaagguccuccaccucgagggcgaggucaacaagaucaagaacgcccuccucuccaccaacaaggccgucgucucccucuccaacggcgucuccguccucaccuucaagguccucgaccucaagaacuacaucgacaagcagcuccuccccauccucaacaagcaguccugcuccauccccaacaucgagaccgucaucgaguuccagcagaagaacaaccgccuccucgagaucacccgcgaguucuccgucaacgccggcgucaccacccccgucuccaccuacaugcucaccaacuccgagcuccucucccucaucaacgacaugcccaucaccaacgaccagaagaagcucauguccaacaacguccagaucguccgccagcaguccuacuccaucaugugcaucaucaaggaggagguccucgccuacgucguccagcucccccucuacggcgucaucgacacccccugcuggaagcuccacaccuccccccucugcaccaccaacaccaaggagggcuccaacaucugccucacccgcaccgaccgcggcugguacugcgacaacgccggcuccgucuccuucuucccccaggccgagaccugcaagguccaguccaaccgcgucuucugcgacaccaugaacucccucacccuccccuccgaggucaaccucugcaacaucgacaucuucaaccccaaguacgacugcaagaucaugaccuccaagaccgacgucuccuccuccgucaucaccucccucggcgccaucgucuccugcuacggcaagaccaagugcaccgccuccaacaagaaccgcggcaucaucaagaccuucuccaacggcugcgacuacgucuccaacaagggcgucgacaccgucuccgucggcaacacccucuacugcgucaacaagcaggagggccagucccucuacgucaagggcgagcccaucaucaacuucuacgacccccucgucuuccccuccgacgaguucgacgccuccaucucccaggucaacgagaagaucaaccagucccucgccuucauccgcaaguccgacgagcuccuccacaacgucaacgucggcaaguccaccaccaacaucaugaucaccaccaucaucaucgucaucaucgucauccuccuccuccucaucgccgucggccucuuccucuacugcaaggcccgcugaggacuaguggaagcauuuuccuggcugauuaaaagaaauuacucagcuauggucaucuguuccuguuagaaggcuaugcagcauauuauauacuaugcgcauguuaugaaaugcauaauaaaaaauuuuaaaaaaucuaaaagaucuaaaaaaaaaaaaaaaaaaaaaaaaaaaaaaaaaaaaaaaaaaaaaaaaaaaaaaaaaaaaaaaaugcaucccccccccccccccccccccccccccccccaaaggcucuuuucagagccaccagaauu

SEQ ID NO: 15901 - RNA, 1916 nt, Artificial Sequence
  mRNA product Design c-4 comprising derived and/or modified sequence from HRSV(Memphis-37)__AIY60640.1__F-del_DSCav1_mut3 (opt3)
gggagaguccgcucagccagguugcagaagcggcuuagcguguguccuaaucuucucucugcguguagguaggccugugccgcaaacaagcuuaccauggagcugcccauccucaagaccaacgccauuacaacuauacuugcugcagugacgcugugcuucgccagcucccagaauaucaccgaagaguuuuaccaaucuacauguucagcggucaguaaaggcuauuugggggcuuuaagaacuggaugguacaccagcguuauuacaaucgaacuguccaacauuaaggagaucaaaugcaaugguaccgacgccaaggugaaacuaauaaagcaggaacucgauaaguauaaaaacgcaguaacugaccugcagcuucugaugcagucuacuccugccgcuggcucggggucagcaaucuguagcggaauugccgugugcaaggucuugcaccucgagggcgaggugaauaaaaucaagaacgcucugcugaguaccaauaaagccguugugucccucucuaacggugucagcguguuaacguucaagguacuggaucuuaagaauuacauugacaaacaauugcugccaauccuaaacaagcaguccuguucaauaccgaauauugaaacuguuaucgaguuucagcagaaaaacaauaggcuccuggaaauuacccgggaguucagugugaacgcgggggucacaacucccgugagcaccuauaugcuuacaaauucugagcuguugucccucaucaacgauaugccuaucaccaacgaccaaaagaaacugaugucaaauaacgugcagauuguccgccagcagagcuacaguauaaugugcaucauuaaggaagagguuuuagcauaugugguacaacugccacucuacggagugaucgauacgcccuguuggaaacuucauacuucuccucugugcacaaccaauacuaaggaaggcuccaacauauguuugacacgaaccgaccguggcugguacugcgauaaugccgggagcgucucguuuuucccacaggcugagacguguaaggugcagucuaacagaguuuucugcgacaccaugaacucccuaacacugcccucagaagugaaucucugcaauauugauaucuucaacccuaaauaugacuguaagaucaugacaaguaaaaccgaugucagcuccucugugauuacaagccugggagccaucguaucaugcuacgguaagacuaaauguaccgcaaguaauaagaacaggggcauuauaaagacauuuuccaaugggugcgacuauguuagcaacaaaggaguggacaccgucucugugggcaauacucuuuacugugucaacaagcaagagggucagucacuguaugugaaaggggagccaaucauuaacuucuacgauccguugguuuuucccagugacgaauuugaugcuagcaucucccaggugaaugagaagaucaaccagucucucgccuuuauucggaaaucggacgaacuguuacacaauguaaacgucggaaagagcacgacaaauauaaugaucaccacuauuaucauugugaucauaguuauccugcuacuccugauugcggugggccuuuucuuguauugcaaggcccgcugaggacuaguggaagcauuuuccuggcugauuaaaagaaauuacucagcuauggucaucuguuccuguuagaaggcuaugcagcauauuauauacuaugcgcauguuaugaaaugcauaauaaaaaauuuuaaaaaaucuaaaagaucuaaaaaaaaaaaaaaaaaaaaaaaaaaaaaaaaaaaaaaaaaaaaaaaaaaaaaaaaaaaaaaaaugcaucccccccccccccccccccccccccccccccaaaggcucuuuucagagccaccagaauu

SEQ ID NO: 15902 - RNA, 1916 nt, Artificial Sequence
  mRNA product Design c-4 comprising derived and/or modified sequence from HRSV(Memphis-37)__AIY60640.1__F-del_DSCav1_mut3 (opt4)
gggagaguccgcucagccagguugcagaagcggcuuagcguguguccuaaucuucucucugcguguagguaggccugugccgcaaacaagcuuaccauggagcugcccauccugaagaccaacgccaucaccaccauccuggccgccgugacccugugcuucgccagcagccagaacaucaccgaggaguucuaccagagcaccugcagcgccgugagcaagggcuaccugggcgcccugagaaccggcugguacaccagcgugaucaccaucgagcugagcaacaucaaggagaucaagugcaacggcaccgacgccaaggugaagcugaucaagcaggagcuggacaaguacaagaacgccgugaccgaccugcagcugcugaugcagagcacccccgccgccggcagcggcagcgccaucugcagcggcaucgccgugugcaaggugcugcaccuggagggcgaggugaacaagaucaagaacgcccugcugagcaccaacaaggccguggugagccugagcaacggcgugagcgugcugaccuucaaggugcuggaccugaagaacuacaucgacaagcagcugcugcccauccugaacaagcagagcugcagcauccccaacaucgagaccgugaucgaguuccagcagaagaacaacagacugcuggagaucaccagagaguucagcgugaacgccggcgugaccacccccgugagcaccuacaugcugaccaacagcgagcugcugagccugaucaacgacaugcccaucaccaacgaccagaagaagcugaugagcaacaacgugcagaucgugagacagcagagcuacagcaucaugugcaucaucaaggaggaggugcuggccuacguggugcagcugccccuguacggcgugaucgacacccccugcuggaagcugcacaccagcccccugugcaccaccaacaccaaggagggcagcaacaucugccugaccagaaccgacagaggcugguacugcgacaacgccggcagcgugagcuucuucccccaggccgagaccugcaaggugcagagcaacagaguguucugcgacaccaugaacagccugacccugcccagcgaggugaaccugugcaacaucgacaucuucaaccccaaguacgacugcaagaucaugaccagcaagaccgacgugagcagcagcgugaucaccagccugggcgccaucgugagcugcuacggcaagaccaagugcaccgccagcaacaagaacagaggcaucaucaagaccuucagcaacggcugcgacuacgugagcaacaagggcguggacaccgugagcgugggcaacacccuguacugcgugaacaagcaggagggccagagccuguacgugaagggcgagcccaucaucaacuucuacgacccccugguguuccccagcgacgaguucgacgccagcaucagccaggugaacgagaagaucaaccagagccuggccuucaucagaaagagcgacgagcugcugcacaacgugaacgugggcaagagcaccaccaacaucaugaucaccaccaucaucaucgugaucaucgugauccugcugcugcugaucgccgugggccuguuccuguacugcaaggccagaugaggacuaguggaagcauuuuccuggcugauuaaaagaaauuacucagcuauggucaucuguuccuguuagaaggcuaugcagcauauuauauacuaugcgcauguuaugaaaugcauaauaaaaaauuuuaaaaaaucuaaaagaucuaaaaaaaaaaaaaaaaaaaaaaaaaaaaaaaaaaaaaaaaaaaaaaaaaaaaaaaaaaaaaaaaugcaucccccccccccccccccccccccccccccccaaaggcucuuuucagagccaccagaauu

SEQ ID NO: 15903 - RNA, 1916 nt, Artificial Sequence
  mRNA product Design c-4 comprising derived and/or modified sequence from HRSV(Memphis-37)__AIY60640.1__F-del_DSCav1_mut3 (opt5)
gggagaguccgcucagccagguugcagaagcggcuuagcguguguccuaaucuucucucugcguguagguaggccugugccgcaaacaagcuuaccauggagcugcccauccucaagaccaacgccauuacaacgauccuggcugccgugacccuuugcuucgcgagcucccagaauauuacagaagaguuuuaccaaucuaccuguagcgcugucuccaaaggcuaucugggggcccucagaacaggaugguacaccucuguuaucacaauugaacugagcaacaucaaggagaucaaaugcaauggcaccgacgccaaggugaaacuuauuaagcaggaacuggauaaguauaaaaacgcugugacggaccuccagcugcugaugcaguccaccccugccgcugggucuggaagcgccaucuguuccggcauugcggucugcaaggugcuccaccuggagggggagguuaauaaaaucaagaacgcccuucugagcacaaauaaagcuguggucucucucuccaacggagugagcguucugaccuucaaggugcuugaucugaagaauuacauugacaaacaacuccugccgauccugaacaagcagucuuguuccauucccaauaucgaaacagucaucgaguuucagcagaaaaacaaucggcuccuggaaauuacccgcgaguucagcgugaacgccggcgugacgacaccugucucuaccuauaugcuuacaaauuccgagcugcucagccugaucaacgauaugcccauuaccaacgaccaaaagaaacuuauguccaauaacguucagaucgugagacagcagucuuacagcauuaugugcaucaucaaggaagaggugcuggcuuaugucgugcaacucccucuguacggcguuauugauacccccuguuggaaacugcauacauccccucucugcacgaccaauacaaaggaagggagcaacaucugucugacccggacagaccgcggaugguacugcgauaaugccggcucuguguccuuuuucccgcaggcggagaccuguaagguccagagcaacagaguguuuugcgacacgaugaacucucuuacacugcccagcgaaguuaaucucugcaauauugauaucuucaacccuaaauaugacuguaagauuaugaccuccaaaaccgaugugucuagcuccgucaucacaagccugggggccaucgugucuugcuacggaaagaccaaauguacagcuuccaauaagaaccggggcauuaucaagacguuuagcaaugggugcgacuaugucucuaacaaaggaguggacaccguuuccgugggcaauacacuuuacugugucaacaagcaagagggccagagccuguaugugaaaggggagcccauuaucaacuucuacgauccucucguuuuucccuccgacgaguucgaugccucuauuagccaggugaaugaaaagaucaaccagucccuggcuuuuauucgcaaaucugacgaacugcuccacaaugucaacgugggaaagagcaccacaaauaucaugaucaccacgauuaucauugugaucauuguuauccugcuucugcucaucgccgucggccuguuccuguauugcaaggccagaugaggacuaguggaagcauuuuccuggcugauuaaaagaaauuacucagcuauggucaucuguuccuguuagaaggcuaugcagcauauuauauacuaugcgcauguuaugaaaugcauaauaaaaaauuuuaaaaaaucuaaaagaucuaaaaaaaaaaaaaaaaaaaaaaaaaaaaaaaaaaaaaaaaaaaaaaaaaaaaaaaaaaaaaaaaugcaucccccccccccccccccccccccccccccccaaaggcucuuuucagagccaccagaauu

SEQ ID NO: 15904 - RNA, 1916 nt, Artificial Sequence
  mRNA product Design c-4 comprising derived and/or modified sequence from HRSV(Memphis-37)__AIY60640.1__F-del_DSCav1_mut3 (opt6)
gggagaguccgcucagccagguugcagaagcggcuuagcguguguccuaaucuucucucugcguguagguaggccugugccgcaaacaagcuuaccauggaacuacccauccuaaaaacaaaugccauaaccacaauacucgccgcuguaacacuauguuucgcuaguucacaaaacauuacagaagaauuuuaccaauccacaugcucagcaguaucaaaaggauaccuaggugcacuaagaacaggaugguacacaagcguaauuacaauagaauuauccaauauuaaagaaauaaaauguaacggcacugacgcuaaaguaaaauuaaucaaacaagaacuagacaaauacaaaaacgcaguaacagaccuacaauuacucaugcaauccacacccgcagcaggaucaggcucagccauaugcucagguauagcaguaugcaaaguacuccaccuugaaggagaaguaaacaaaauaaaaaacgcauuacuaucaacaaacaaagcaguaguaucacuaucaaacggagucucugucuuaaccuuuaaaguauuagauuuaaaaaacuacauagacaaacaacuauuaccaauucuaaauaaacaaucauguucuauaccaaauauagaaacaguaauagaauuucaacaaaaaaacaaccgauuacuagaaaucacaagagaauuuucugucaacgccggcguaaccaccccagucucaacauauaugcuaacaaauagugaacucuuauccuuaauaaacgacaugccaauaacaaaugaccaaaaaaaauuaauguccaauaacguacaaauagucagacaacagucauacucaauaauguguaucaucaaagaagaaguauuagcauacguaguucaacuaccccuauacggcguaauagacacaccauguuggaaacuacacacaucacccuuaugcacaaccaauaccaaagaaggaucuaacauaugccuaaccagaacagacagaggcugguacugcgacaacgcagguucagucucauucuucccacaagccgaaacaugcaaaguccaauccaacagaguauuuugcgacacuaugaacucacuaacucuaccuucagaagucaaccuuuguaacauagacauauuuaacccaaaauacgauuguaaaauaaugaccagcaaaacagacgucucaucaagcguaauaacaucacuuggcgcaauagucuccugcuacggaaaaacaaaaugcacagcauccaacaaaaacagaggcaucauaaaaaccuucuccaacggcugcgacuauguaagcaacaaaggugucgauacaguaucaguaggaaacacacuauacugcguaaacaaacaagaaggacaaucacucuacguaaaaggugaaccaaucauaaacuucuacgacccauuaguuuucccaucagacgaauuugaugccuccauaucacaaguaaaugaaaaaauaaaucaaucccuagcauucauacgaaaaucugaugaauuacuucacaaugucaacgucggaaaaucaaccacuaacauaaugauaacaacaauuauaauaguaauaauaguaauacuccuacuauuaauagccgucggucuuuuccuauacugcaaagcacgauaaggacuaguggaagcauuuuccuggcugauuaaaagaaauuacucagcuauggucaucuguuccuguuagaaggcuaugcagcauauuauauacuaugcgcauguuaugaaaugcauaauaaaaaauuuuaaaaaaucuaaaagaucuaaaaaaaaaaaaaaaaaaaaaaaaaaaaaaaaaaaaaaaaaaaaaaaaaaaaaaaaaaaaaaaaugcaucccccccccccccccccccccccccccccccaaaggcucuuuucagagccaccagaauu

SEQ ID NO: 15905 - RNA, 1916 nt, Artificial Sequence
  mRNA product Design c-4 comprising derived and/or modified sequence from HRSV(Memphis-37)__AIY60640.1__F-del_DSCav1_mut3 (opt11)
gggagaguccgcucagccagguugcagaagcggcuuagcguguguccuaaucuucucucugcguguagguaggccugugccgcaaacaagcuuaccauggaacuacccauccucaaaaccaacgccaucaccacaauccuagcugccgucacccuaugcuucgcaagcagccaaaacaucacagaagaauuuuaccaaucaaccugcuccgccgucuccaaaggguaccuaggugcccuccgcaccggcugguacacgucugucauaaccaucgaacucuccaacaucaaagaaaucaaauguaacggaacagacgcaaaagucaaacuaaucaaacaagaacuagacaaauacaaaaacgccguaaccgaccuccaacugcucaugcaauccacccccgcugccggcuccgggagcgcaaucugcucuggaaucgccguaugcaaaguccuccaccucgaaggagaaguaaacaaaaucaaaaacgcgcuccucaguaccaacaaagccgucgucucucuaucaaacggcguaucgguccucaccuucaaaguccucgaccuaaagaacuacauagacaaacaacuccuccccauccuaaacaaacaauccugcucaaucccaaacaucgaaaccgugaucgaguuccaacagaaaaacaaccgccuacucgaaaucacccgagaguucucagucaacgcaggagucaccacccccgucucaacauacaugcuuaccaacagcgaacuccuaucccucaucaacgacaugccaaucacaaacgaccaaaagaaacucaugagcaacaacguccagaucguaagacaacaaagcuacagcaucaugugcaucaucaaagaagaaguacuagcauacgucguccaacucccccucuacggcgucaucgacacccccugcuggaaacuccacaccucaccccucugcacaaccaacaccaaagaaggcuccaauaucugccucacacgcaccgaccgcggcugguacugcgacaacgccggcuccgucuccuucuucccucaagccgaaaccugcaaaguccaguccaacagagucuucugcgacaccaugaacucccuaacacuuccaucagaagucaaccuuuguaacaucgacaucuucaaucccaaauacgacuguaaaauaaugaccucaaaaacugacgugucaagcucaguuaucaccucccuaggggccaucgucuccugcuacggcaaaacaaaaugcaccgcauccaacaaaaaucgcggaaucaucaaaacauucuccaacggaugcgacuacgucucaaacaagggaguagauaccguaagcguuggcaacacccucuacugcguaaacaaacaagaaggccaaucacucuacgucaaaggcgaacccauaaucaacuucuacgacccccucgucuucccuuccgaugaguucgacgccagcaucucccaagucaacgagaaaauaaaccagucacucgcauucauccgcaaaagcgacgaacuccuccacaacguaaacguaggcaaauccacaaccaauaucaugauaaccacaaucaucaucgugaucaucgucauccuccuccuccucauagcugucggacucuuccucuacuguaaagcacgcugaggacuaguggaagcauuuuccuggcugauuaaaagaaauuacucagcuauggucaucuguuccuguuagaaggcuaugcagcauauuauauacuaugcgcauguuaugaaaugcauaauaaaaaauuuuaaaaaaucuaaaagaucuaaaaaaaaaaaaaaaaaaaaaaaaaaaaaaaaaaaaaaaaaaaaaaaaaaaaaaaaaaaaaaaaugcaucccccccccccccccccccccccccccccccaaaggcucuuuucagagccaccagaauu

SEQ ID NO: 15906 - RNA, 1834 nt, Artificial Sequence
  mRNA product Design c-5 comprising derived and/or modified sequence from HRSV(Memphis-37)__AIY60640.1__F-del_DSCav1_mut3 (opt1)
gggagagcggcucggccauuuugucccagucaguccggaggcugcggcugcagaaguaccgccugcggaguaacugcaaagaagcuuaccauggagcugcccauccucaagaccaacgccaucaccacgauccuggccgcggugacccugugcuucgccagcucccagaacaucaccgaggaguucuaccagagcacgugcuccgccgucagcaagggcuaccucggcgcccugcgcaccgggugguacaccagcgugaucaccaucgagcuguccaacaucaaggagaucaagugcaacggcaccgacgccaaggugaagcucaucaagcaggagcuggacaaguacaagaacgcggucacggaccugcagcuccugaugcagagcaccccggccgccggcuccgggagcgcgaucugcuccggcaucgccgucugcaaggugcugcaccucgagggcgaggugaacaagaucaagaacgcccugcuguccaccaacaaggccgucgugagccucuccaacggggugagcguccugaccuucaaggugcuggaccucaagaacuacaucgacaagcagcugcugcccauccugaacaagcagagcugcuccauccccaacaucgagaccgucaucgaguuccagcagaagaacaaccgccuccuggagaucacgcgggaguucagcgugaacgcgggcgugaccacccccgucuccaccuacaugcugacgaacagcgagcuccugucccugaucaacgacaugccgaucaccaacgaccagaagaagcucaugagcaacaacgugcagaucgugcgccagcaguccuacagcaucaugugcaucaucaaggaggagguccuggccuacguggugcagcugccccucuacggggucaucgacacccccugcuggaagcugcacaccagcccccugugcacgaccaacaccaaggagggcuccaacaucugccucacccggacggaccgcgggugguacugcgacaacgccggcagcguguccuucuucccgcaggccgagaccugcaagguccagagcaaccggguguucugcgacaccaugaacucccugacccugcccagcgaggugaaccucugcaacaucgacaucuucaaccccaaguacgacugcaagaucaugacguccaagaccgacgucagcuccagcgugaucaccucccugggcgccaucgugagcugcuacgggaagaccaagugcacggcgagcaacaagaaccgcggcaucaucaagaccuucuccaacgggugcgacuacgucagcaacaagggcguggacaccguguccgucggcaacacccuguacugcgugaacaagcaggagggccagagccucuacgugaagggggagcccaucaucaacuucuacgacccgcuggucuuccccuccgacgaguucgacgccagcaucucccaggugaacgagaagaucaaccagagccuggccuucauccggaaguccgacgagcuccugcacaacgugaacgucggcaagagcaccacgaacaucaugaucaccaccaucaucaucgugaucaucgugauccugcugcuccugaucgccgucgggcuguuccucuacugcaaggcccgcugaggacuagucccuguucccagagcccacuuuuuuuucuuuuuuugaaauaaaauagccugucuuucagaucuaaaaaaaaaaaaaaaaaaaaaaaaaaaaaaaaaaaaaaaaaaaaaaaaaaaaaaaaaaaaaaaaugcaucccccccccccccccccccccccccccccccaaaggcucuuuucagagccaccagaauu

SEQ ID NO: 15907 - RNA, 1834 nt, Artificial Sequence
  mRNA product Design c-5 comprising derived and/or modified sequence from HRSV(Memphis-37)__AIY60640.1__F-del_DSCav1_mut3 (opt1)
gggagagcggcucggccauuuugucccagucaguccggaggcugcggcugcagaaguaccgccugcggaguaacugcaaagaagcuuaccauggagcugcccauccucaagaccaacgccaucaccacgauccuggccgcggugacccugugcuucgccagcucccagaacaucaccgaggaguucuaccagagcacgugcuccgccgucagcaagggcuaccucggggcccugcgcaccggcugguacaccuccgugaucaccaucgagcugagcaacaucaaggagaucaagugcaacgggaccgacgccaaggugaagcucaucaagcaggagcuggacaaguacaagaacgcggucacggaccugcagcuccugaugcaguccaccccggccgccggcagcggguccgccaucugcagcggcaucgcggugugcaaggugcugcaccucgagggcgaggucaacaagaucaagaacgcccugcuguccaccaacaaggccguggugagccucuccaacggggucagcgugcugaccuucaaggugcuggaccucaagaacuacaucgacaagcagcugcugcccauccucaacaagcaguccugcagcauccccaacaucgagacggucaucgaguuccagcagaagaacaaccggcugcuggagaucacccgcgaguucuccgugaacgccggcgugaccacccccgucagcacguacaugcucaccaacuccgagcugcugagccucaucaacgacaugccgaucaccaacgaccagaagaagcugaugagcaacaacgugcagaucgugcggcagcaguccuacagcaucaugugcaucaucaaggaggagguccuggccuacguggugcagcucccccuguacggggucaucgacacccccugcuggaagcugcacacgagcccccucugcaccaccaacaccaaggagggcuccaacaucugccugacgcgcaccgaccgggggugguacugcgacaacgcgggcuccgugagcuucuucccgcaggccgagaccugcaaggugcaguccaaccgcgucuucugcgacaccaugaacagccugacgcuccccuccgaggugaaccugugcaacaucgacaucuucaaccccaaguacgacugcaagaucaugaccagcaagaccgacgucuccagcuccgugaucaccagccugggcgccaucguguccugcuacgggaagacgaagugcaccgccagcaacaagaaccggggcaucaucaagaccuucuccaacgggugcgacuacgucagcaacaagggcguggacaccguguccgucggcaacacgcucuacugcgugaacaagcaggaggggcagagccuguacgugaagggcgagcccaucaucaacuucuacgacccgcuggucuuccccagcgacgaguucgacgccuccaucagccaggugaacgagaagaucaaccagucccucgcguucauccgcaagagcgacgagcugcugcacaacgugaacgucgggaaguccaccaccaacaucaugaucaccaccaucaucaucgugaucaucgugauccuccugcugcucaucgccgucggccuguuccuguacugcaaggcccggugaggacuagucccuguucccagagcccacuuuuuuuucuuuuuuugaaauaaaauagccugucuuucagaucuaaaaaaaaaaaaaaaaaaaaaaaaaaaaaaaaaaaaaaaaaaaaaaaaaaaaaaaaaaaaaaaaugcaucccccccccccccccccccccccccccccccaaaggcucuuuucagagccaccagaauu

SEQ ID NO: 15908 - RNA, 1834 nt, Artificial Sequence
  mRNA product Design c-5 comprising derived and/or modified sequence from HRSV(Memphis-37)__AIY60640.1__F-del_DSCav1_mut3 (opt2)
gggagagcggcucggccauuuugucccagucaguccggaggcugcggcugcagaaguaccgccugcggaguaacugcaaagaagcuuaccauggagcuccccauccucaagaccaacgccaucaccaccauccucgccgccgucacccucugcuucgccuccucccagaacaucaccgaggaguucuaccaguccaccugcuccgccgucuccaagggcuaccucggcgcccuccgcaccggcugguacaccuccgucaucaccaucgagcucuccaacaucaaggagaucaagugcaacggcaccgacgccaaggucaagcucaucaagcaggagcucgacaaguacaagaacgccgucaccgaccuccagcuccucaugcaguccacccccgccgccggcuccggcuccgccaucugcuccggcaucgccgucugcaagguccuccaccucgagggcgaggucaacaagaucaagaacgcccuccucuccaccaacaaggccgucgucucccucuccaacggcgucuccguccucaccuucaagguccucgaccucaagaacuacaucgacaagcagcuccuccccauccucaacaagcaguccugcuccauccccaacaucgagaccgucaucgaguuccagcagaagaacaaccgccuccucgagaucacccgcgaguucuccgucaacgccggcgucaccacccccgucuccaccuacaugcucaccaacuccgagcuccucucccucaucaacgacaugcccaucaccaacgaccagaagaagcucauguccaacaacguccagaucguccgccagcaguccuacuccaucaugugcaucaucaaggaggagguccucgccuacgucguccagcucccccucuacggcgucaucgacacccccugcuggaagcuccacaccuccccccucugcaccaccaacaccaaggagggcuccaacaucugccucacccgcaccgaccgcggcugguacugcgacaacgccggcuccgucuccuucuucccccaggccgagaccugcaagguccaguccaaccgcgucuucugcgacaccaugaacucccucacccuccccuccgaggucaaccucugcaacaucgacaucuucaaccccaaguacgacugcaagaucaugaccuccaagaccgacgucuccuccuccgucaucaccucccucggcgccaucgucuccugcuacggcaagaccaagugcaccgccuccaacaagaaccgcggcaucaucaagaccuucuccaacggcugcgacuacgucuccaacaagggcgucgacaccgucuccgucggcaacacccucuacugcgucaacaagcaggagggccagucccucuacgucaagggcgagcccaucaucaacuucuacgacccccucgucuuccccuccgacgaguucgacgccuccaucucccaggucaacgagaagaucaaccagucccucgccuucauccgcaaguccgacgagcuccuccacaacgucaacgucggcaaguccaccaccaacaucaugaucaccaccaucaucaucgucaucaucgucauccuccuccuccucaucgccgucggccucuuccucuacugcaaggcccgcugaggacuagucccuguucccagagcccacuuuuuuuucuuuuuuugaaauaaaauagccugucuuucagaucuaaaaaaaaaaaaaaaaaaaaaaaaaaaaaaaaaaaaaaaaaaaaaaaaaaaaaaaaaaaaaaaaugcaucccccccccccccccccccccccccccccccaaaggcucuuuucagagccaccagaauu

SEQ ID NO: 15909 - RNA, 1834 nt, Artificial Sequence
  mRNA product Design c-5 comprising derived and/or modified sequence from HRSV(Memphis-37)__AIY60640.1__F-del_DSCav1_mut3 (opt3)
gggagagcggcucggccauuuugucccagucaguccggaggcugcggcugcagaaguaccgccugcggaguaacugcaaagaagcuuaccauggagcugcccauccucaagaccaacgccauuacaacuauacuugcugcagugacgcugugcuucgccagcucccagaauaucaccgaagaguuuuaccaaucuacauguucagcggucaguaaaggcuauuugggggcuuuaagaacuggaugguacaccagcguuauuacaaucgaacuguccaacauuaaggagaucaaaugcaaugguaccgacgccaaggugaaacuaauaaagcaggaacucgauaaguauaaaaacgcaguaacugaccugcagcuucugaugcagucuacuccugccgcuggcucggggucagcaaucuguagcggaauugccgugugcaaggucuugcaccucgagggcgaggugaauaaaaucaagaacgcucugcugaguaccaauaaagccguugugucccucucuaacggugucagcguguuaacguucaagguacuggaucuuaagaauuacauugacaaacaauugcugccaauccuaaacaagcaguccuguucaauaccgaauauugaaacuguuaucgaguuucagcagaaaaacaauaggcuccuggaaauuacccgggaguucagugugaacgcgggggucacaacucccgugagcaccuauaugcuuacaaauucugagcuguugucccucaucaacgauaugccuaucaccaacgaccaaaagaaacugaugucaaauaacgugcagauuguccgccagcagagcuacaguauaaugugcaucauuaaggaagagguuuuagcauaugugguacaacugccacucuacggagugaucgauacgcccuguuggaaacuucauacuucuccucugugcacaaccaauacuaaggaaggcuccaacauauguuugacacgaaccgaccguggcugguacugcgauaaugccgggagcgucucguuuuucccacaggcugagacguguaaggugcagucuaacagaguuuucugcgacaccaugaacucccuaacacugcccucagaagugaaucucugcaauauugauaucuucaacccuaaauaugacuguaagaucaugacaaguaaaaccgaugucagcuccucugugauuacaagccugggagccaucguaucaugcuacgguaagacuaaauguaccgcaaguaauaagaacaggggcauuauaaagacauuuuccaaugggugcgacuauguuagcaacaaaggaguggacaccgucucugugggcaauacucuuuacugugucaacaagcaagagggucagucacuguaugugaaaggggagccaaucauuaacuucuacgauccguugguuuuucccagugacgaauuugaugcuagcaucucccaggugaaugagaagaucaaccagucucucgccuuuauucggaaaucggacgaacuguuacacaauguaaacgucggaaagagcacgacaaauauaaugaucaccacuauuaucauugugaucauaguuauccugcuacuccugauugcggugggccuuuucuuguauugcaaggcccgcugaggacuagucccuguucccagagcccacuuuuuuuucuuuuuuugaaauaaaauagccugucuuucagaucuaaaaaaaaaaaaaaaaaaaaaaaaaaaaaaaaaaaaaaaaaaaaaaaaaaaaaaaaaaaaaaaaugcaucccccccccccccccccccccccccccccccaaaggcucuuuucagagccaccagaauu

SEQ ID NO: 15910 - RNA, 1834 nt, Artificial Sequence
  mRNA product Design c-5 comprising derived and/or modified sequence from HRSV(Memphis-37)__AIY60640.1__F-del_DSCav1_mut3 (opt4)
gggagagcggcucggccauuuugucccagucaguccggaggcugcggcugcagaaguaccgccugcggaguaacugcaaagaagcuuaccauggagcugcccauccugaagaccaacgccaucaccaccauccuggccgccgugacccugugcuucgccagcagccagaacaucaccgaggaguucuaccagagcaccugcagcgccgugagcaagggcuaccugggcgcccugagaaccggcugguacaccagcgugaucaccaucgagcugagcaacaucaaggagaucaagugcaacggcaccgacgccaaggugaagcugaucaagcaggagcuggacaaguacaagaacgccgugaccgaccugcagcugcugaugcagagcacccccgccgccggcagcggcagcgccaucugcagcggcaucgccgugugcaaggugcugcaccuggagggcgaggugaacaagaucaagaacgcccugcugagcaccaacaaggccguggugagccugagcaacggcgugagcgugcugaccuucaaggugcuggaccugaagaacuacaucgacaagcagcugcugcccauccugaacaagcagagcugcagcauccccaacaucgagaccgugaucgaguuccagcagaagaacaacagacugcuggagaucaccagagaguucagcgugaacgccggcgugaccacccccgugagcaccuacaugcugaccaacagcgagcugcugagccugaucaacgacaugcccaucaccaacgaccagaagaagcugaugagcaacaacgugcagaucgugagacagcagagcuacagcaucaugugcaucaucaaggaggaggugcuggccuacguggugcagcugccccuguacggcgugaucgacacccccugcuggaagcugcacaccagcccccugugcaccaccaacaccaaggagggcagcaacaucugccugaccagaaccgacagaggcugguacugcgacaacgccggcagcgugagcuucuucccccaggccgagaccugcaaggugcagagcaacagaguguucugcgacaccaugaacagccugacccugcccagcgaggugaaccugugcaacaucgacaucuucaaccccaaguacgacugcaagaucaugaccagcaagaccgacgugagcagcagcgugaucaccagccugggcgccaucgugagcugcuacggcaagaccaagugcaccgccagcaacaagaacagaggcaucaucaagaccuucagcaacggcugcgacuacgugagcaacaagggcguggacaccgugagcgugggcaacacccuguacugcgugaacaagcaggagggccagagccuguacgugaagggcgagcccaucaucaacuucuacgacccccugguguuccccagcgacgaguucgacgccagcaucagccaggugaacgagaagaucaaccagagccuggccuucaucagaaagagcgacgagcugcugcacaacgugaacgugggcaagagcaccaccaacaucaugaucaccaccaucaucaucgugaucaucgugauccugcugcugcugaucgccgugggccuguuccuguacugcaaggccagaugaggacuagucccuguucccagagcccacuuuuuuuucuuuuuuugaaauaaaauagccugucuuucagaucuaaaaaaaaaaaaaaaaaaaaaaaaaaaaaaaaaaaaaaaaaaaaaaaaaaaaaaaaaaaaaaaaugcaucccccccccccccccccccccccccccccccaaaggcucuuuucagagccaccagaauu

SEQ ID NO: 15911 - RNA, 1834 nt, Artificial Sequence
  mRNA product Design c-5 comprising derived and/or modified sequence from HRSV(Memphis-37)__AIY60640.1__F-del_DSCav1_mut3 (opt5)
gggagagcggcucggccauuuugucccagucaguccggaggcugcggcugcagaaguaccgccugcggaguaacugcaaagaagcuuaccauggagcugcccauccucaagaccaacgccauuacaacgauccuggcugccgugacccuuugcuucgcgagcucccagaauauuacagaagaguuuuaccaaucuaccuguagcgcugucuccaaaggcuaucugggggcccucagaacaggaugguacaccucuguuaucacaauugaacugagcaacaucaaggagaucaaaugcaauggcaccgacgccaaggugaaacuuauuaagcaggaacuggauaaguauaaaaacgcugugacggaccuccagcugcugaugcaguccaccccugccgcugggucuggaagcgccaucuguuccggcauugcggucugcaaggugcuccaccuggagggggagguuaauaaaaucaagaacgcccuucugagcacaaauaaagcuguggucucucucuccaacggagugagcguucugaccuucaaggugcuugaucugaagaauuacauugacaaacaacuccugccgauccugaacaagcagucuuguuccauucccaauaucgaaacagucaucgaguuucagcagaaaaacaaucggcuccuggaaauuacccgcgaguucagcgugaacgccggcgugacgacaccugucucuaccuauaugcuuacaaauuccgagcugcucagccugaucaacgauaugcccauuaccaacgaccaaaagaaacuuauguccaauaacguucagaucgugagacagcagucuuacagcauuaugugcaucaucaaggaagaggugcuggcuuaugucgugcaacucccucuguacggcguuauugauacccccuguuggaaacugcauacauccccucucugcacgaccaauacaaaggaagggagcaacaucugucugacccggacagaccgcggaugguacugcgauaaugccggcucuguguccuuuuucccgcaggcggagaccuguaagguccagagcaacagaguguuuugcgacacgaugaacucucuuacacugcccagcgaaguuaaucucugcaauauugauaucuucaacccuaaauaugacuguaagauuaugaccuccaaaaccgaugugucuagcuccgucaucacaagccugggggccaucgugucuugcuacggaaagaccaaauguacagcuuccaauaagaaccggggcauuaucaagacguuuagcaaugggugcgacuaugucucuaacaaaggaguggacaccguuuccgugggcaauacacuuuacugugucaacaagcaagagggccagagccuguaugugaaaggggagcccauuaucaacuucuacgauccucucguuuuucccuccgacgaguucgaugccucuauuagccaggugaaugaaaagaucaaccagucccuggcuuuuauucgcaaaucugacgaacugcuccacaaugucaacgugggaaagagcaccacaaauaucaugaucaccacgauuaucauugugaucauuguuauccugcuucugcucaucgccgucggccuguuccuguauugcaaggccagaugaggacuagucccuguucccagagcccacuuuuuuuucuuuuuuugaaauaaaauagccugucuuucagaucuaaaaaaaaaaaaaaaaaaaaaaaaaaaaaaaaaaaaaaaaaaaaaaaaaaaaaaaaaaaaaaaaugcaucccccccccccccccccccccccccccccccaaaggcucuuuucagagccaccagaauu

SEQ ID NO: 15912 - RNA, 1834 nt, Artificial Sequence
  mRNA product Design c-5 comprising derived and/or modified sequence from HRSV(Memphis-37)__AIY60640.1__F-del_DSCav1_mut3 (opt6)
gggagagcggcucggccauuuugucccagucaguccggaggcugcggcugcagaaguaccgccugcggaguaacugcaaagaagcuuaccauggaacuacccauccuaaaaacaaaugccauaaccacaauacucgccgcuguaacacuauguuucgcuaguucacaaaacauuacagaagaauuuuaccaauccacaugcucagcaguaucaaaaggauaccuaggugcacuaagaacaggaugguacacaagcguaauuacaauagaauuauccaauauuaaagaaauaaaauguaacggcacugacgcuaaaguaaaauuaaucaaacaagaacuagacaaauacaaaaacgcaguaacagaccuacaauuacucaugcaauccacacccgcagcaggaucaggcucagccauaugcucagguauagcaguaugcaaaguacuccaccuugaaggagaaguaaacaaaauaaaaaacgcauuacuaucaacaaacaaagcaguaguaucacuaucaaacggagucucugucuuaaccuuuaaaguauuagauuuaaaaaacuacauagacaaacaacuauuaccaauucuaaauaaacaaucauguucuauaccaaauauagaaacaguaauagaauuucaacaaaaaaacaaccgauuacuagaaaucacaagagaauuuucugucaacgccggcguaaccaccccagucucaacauauaugcuaacaaauagugaacucuuauccuuaauaaacgacaugccaauaacaaaugaccaaaaaaaauuaauguccaauaacguacaaauagucagacaacagucauacucaauaauguguaucaucaaagaagaaguauuagcauacguaguucaacuaccccuauacggcguaauagacacaccauguuggaaacuacacacaucacccuuaugcacaaccaauaccaaagaaggaucuaacauaugccuaaccagaacagacagaggcugguacugcgacaacgcagguucagucucauucuucccacaagccgaaacaugcaaaguccaauccaacagaguauuuugcgacacuaugaacucacuaacucuaccuucagaagucaaccuuuguaacauagacauauuuaacccaaaauacgauuguaaaauaaugaccagcaaaacagacgucucaucaagcguaauaacaucacuuggcgcaauagucuccugcuacggaaaaacaaaaugcacagcauccaacaaaaacagaggcaucauaaaaaccuucuccaacggcugcgacuauguaagcaacaaaggugucgauacaguaucaguaggaaacacacuauacugcguaaacaaacaagaaggacaaucacucuacguaaaaggugaaccaaucauaaacuucuacgacccauuaguuuucccaucagacgaauuugaugccuccauaucacaaguaaaugaaaaaauaaaucaaucccuagcauucauacgaaaaucugaugaauuacuucacaaugucaacgucggaaaaucaaccacuaacauaaugauaacaacaauuauaauaguaauaauaguaauacuccuacuauuaauagccgucggucuuuuccuauacugcaaagcacgauaaggacuagucccuguucccagagcccacuuuuuuuucuuuuuuugaaauaaaauagccugucuuucagaucuaaaaaaaaaaaaaaaaaaaaaaaaaaaaaaaaaaaaaaaaaaaaaaaaaaaaaaaaaaaaaaaaugcaucccccccccccccccccccccccccccccccaaaggcucuuuucagagccaccagaauu

SEQ ID NO: 15913 - RNA, 1834 nt, Artificial Sequence
  mRNA product Design c-5 comprising derived and/or modified sequence from HRSV(Memphis-37)__AIY60640.1__F-del_DSCav1_mut3 (opt11)
gggagagcggcucggccauuuugucccagucaguccggaggcugcggcugcagaaguaccgccugcggaguaacugcaaagaagcuuaccauggaacuacccauccucaaaaccaacgccaucaccacaauccuagcugccgucacccuaugcuucgcaagcagccaaaacaucacagaagaauuuuaccaaucaaccugcuccgccgucuccaaaggguaccuaggugcccuccgcaccggcugguacacgucugucauaaccaucgaacucuccaacaucaaagaaaucaaauguaacggaacagacgcaaaagucaaacuaaucaaacaagaacuagacaaauacaaaaacgccguaaccgaccuccaacugcucaugcaauccacccccgcugccggcuccgggagcgcaaucugcucuggaaucgccguaugcaaaguccuccaccucgaaggagaaguaaacaaaaucaaaaacgcgcuccucaguaccaacaaagccgucgucucucuaucaaacggcguaucgguccucaccuucaaaguccucgaccuaaagaacuacauagacaaacaacuccuccccauccuaaacaaacaauccugcucaaucccaaacaucgaaaccgugaucgaguuccaacagaaaaacaaccgccuacucgaaaucacccgagaguucucagucaacgcaggagucaccacccccgucucaacauacaugcuuaccaacagcgaacuccuaucccucaucaacgacaugccaaucacaaacgaccaaaagaaacucaugagcaacaacguccagaucguaagacaacaaagcuacagcaucaugugcaucaucaaagaagaaguacuagcauacgucguccaacucccccucuacggcgucaucgacacccccugcuggaaacuccacaccucaccccucugcacaaccaacaccaaagaaggcuccaauaucugccucacacgcaccgaccgcggcugguacugcgacaacgccggcuccgucuccuucuucccucaagccgaaaccugcaaaguccaguccaacagagucuucugcgacaccaugaacucccuaacacuuccaucagaagucaaccuuuguaacaucgacaucuucaaucccaaauacgacuguaaaauaaugaccucaaaaacugacgugucaagcucaguuaucaccucccuaggggccaucgucuccugcuacggcaaaacaaaaugcaccgcauccaacaaaaaucgcggaaucaucaaaacauucuccaacggaugcgacuacgucucaaacaagggaguagauaccguaagcguuggcaacacccucuacugcguaaacaaacaagaaggccaaucacucuacgucaaaggcgaacccauaaucaacuucuacgacccccucgucuucccuuccgaugaguucgacgccagcaucucccaagucaacgagaaaauaaaccagucacucgcauucauccgcaaaagcgacgaacuccuccacaacguaaacguaggcaaauccacaaccaauaucaugauaaccacaaucaucaucgugaucaucgucauccuccuccuccucauagcugucggacucuuccucuacuguaaagcacgcugaggacuagucccuguucccagagcccacuuuuuuuucuuuuuuugaaauaaaauagccugucuuucagaucuaaaaaaaaaaaaaaaaaaaaaaaaaaaaaaaaaaaaaaaaaaaaaaaaaaaaaaaaaaaaaaaaugcaucccccccccccccccccccccccccccccccaaaggcucuuuucagagccaccagaauu

SEQ ID NO: 15914 - RNA, 1843 nt, Artificial Sequence
  mRNA product Design d-1 comprising derived and/or modified sequence from HRSV(Memphis-37)__AIY60640.1__F-del_DSCav1_mut3 (opt1)
gggagacccgugacccggaaguuguacggcuacgcgacuuucccucccacaaacccucgcgcccuuccuuuccuacuugggcccggcagaaagcuuaccauggagcugcccauccucaagaccaacgccaucaccacgauccuggccgcggugacccugugcuucgccagcucccagaacaucaccgaggaguucuaccagagcacgugcuccgccgucagcaagggcuaccucggcgcccugcgcaccgggugguacaccagcgugaucaccaucgagcuguccaacaucaaggagaucaagugcaacggcaccgacgccaaggugaagcucaucaagcaggagcuggacaaguacaagaacgcggucacggaccugcagcuccugaugcagagcaccccggccgccggcuccgggagcgcgaucugcuccggcaucgccgucugcaaggugcugcaccucgagggcgaggugaacaagaucaagaacgcccugcuguccaccaacaaggccgucgugagccucuccaacggggugagcguccugaccuucaaggugcuggaccucaagaacuacaucgacaagcagcugcugcccauccugaacaagcagagcugcuccauccccaacaucgagaccgucaucgaguuccagcagaagaacaaccgccuccuggagaucacgcgggaguucagcgugaacgcgggcgugaccacccccgucuccaccuacaugcugacgaacagcgagcuccugucccugaucaacgacaugccgaucaccaacgaccagaagaagcucaugagcaacaacgugcagaucgugcgccagcaguccuacagcaucaugugcaucaucaaggaggagguccuggccuacguggugcagcugccccucuacggggucaucgacacccccugcuggaagcugcacaccagcccccugugcacgaccaacaccaaggagggcuccaacaucugccucacccggacggaccgcgggugguacugcgacaacgccggcagcguguccuucuucccgcaggccgagaccugcaagguccagagcaaccggguguucugcgacaccaugaacucccugacccugcccagcgaggugaaccucugcaacaucgacaucuucaaccccaaguacgacugcaagaucaugacguccaagaccgacgucagcuccagcgugaucaccucccugggcgccaucgugagcugcuacgggaagaccaagugcacggcgagcaacaagaaccgcggcaucaucaagaccuucuccaacgggugcgacuacgucagcaacaagggcguggacaccguguccgucggcaacacccuguacugcgugaacaagcaggagggccagagccucuacgugaagggggagcccaucaucaacuucuacgacccgcuggucuuccccuccgacgaguucgacgccagcaucucccaggugaacgagaagaucaaccagagccuggccuucauccggaaguccgacgagcuccugcacaacgugaacgucggcaagagcaccacgaacaucaugaucaccaccaucaucaucgugaucaucgugauccugcugcuccugaucgccgucgggcuguuccucuacugcaaggcccgcugaggacuagucccuguucccagagcccacuuuuuuuucuuuuuuugaaauaaaauagccugucuuucagaucuaaaaaaaaaaaaaaaaaaaaaaaaaaaaaaaaaaaaaaaaaaaaaaaaaaaaaaaaaaaaaaaaugcaucccccccccccccccccccccccccccccccaaaggcucuuuucagagccaccagaauu

SEQ ID NO: 15915 - RNA, 1843 nt, Artificial Sequence
  mRNA product Design d-1 comprising derived and/or modified sequence from HRSV(Memphis-37)__AIY60640.1__F-del_DSCav1_mut3 (opt1)
gggagacccgugacccggaaguuguacggcuacgcgacuuucccucccacaaacccucgcgcccuuccuuuccuacuugggcccggcagaaagcuuaccauggagcugcccauccucaagaccaacgccaucaccacgauccuggccgcggugacccugugcuucgccagcucccagaacaucaccgaggaguucuaccagagcacgugcuccgccgucagcaagggcuaccucggggcccugcgcaccggcugguacaccuccgugaucaccaucgagcugagcaacaucaaggagaucaagugcaacgggaccgacgccaaggugaagcucaucaagcaggagcuggacaaguacaagaacgcggucacggaccugcagcuccugaugcaguccaccccggccgccggcagcggguccgccaucugcagcggcaucgcggugugcaaggugcugcaccucgagggcgaggucaacaagaucaagaacgcccugcuguccaccaacaaggccguggugagccucuccaacggggucagcgugcugaccuucaaggugcuggaccucaagaacuacaucgacaagcagcugcugcccauccucaacaagcaguccugcagcauccccaacaucgagacggucaucgaguuccagcagaagaacaaccggcugcuggagaucacccgcgaguucuccgugaacgccggcgugaccacccccgucagcacguacaugcucaccaacuccgagcugcugagccucaucaacgacaugccgaucaccaacgaccagaagaagcugaugagcaacaacgugcagaucgugcggcagcaguccuacagcaucaugugcaucaucaaggaggagguccuggccuacguggugcagcucccccuguacggggucaucgacacccccugcuggaagcugcacacgagcccccucugcaccaccaacaccaaggagggcuccaacaucugccugacgcgcaccgaccgggggugguacugcgacaacgcgggcuccgugagcuucuucccgcaggccgagaccugcaaggugcaguccaaccgcgucuucugcgacaccaugaacagccugacgcuccccuccgaggugaaccugugcaacaucgacaucuucaaccccaaguacgacugcaagaucaugaccagcaagaccgacgucuccagcuccgugaucaccagccugggcgccaucguguccugcuacgggaagacgaagugcaccgccagcaacaagaaccggggcaucaucaagaccuucuccaacgggugcgacuacgucagcaacaagggcguggacaccguguccgucggcaacacgcucuacugcgugaacaagcaggaggggcagagccuguacgugaagggcgagcccaucaucaacuucuacgacccgcuggucuuccccagcgacgaguucgacgccuccaucagccaggugaacgagaagaucaaccagucccucgcguucauccgcaagagcgacgagcugcugcacaacgugaacgucgggaaguccaccaccaacaucaugaucaccaccaucaucaucgugaucaucgugauccuccugcugcucaucgccgucggccuguuccuguacugcaaggcccggugaggacuagucccuguucccagagcccacuuuuuuuucuuuuuuugaaauaaaauagccugucuuucagaucuaaaaaaaaaaaaaaaaaaaaaaaaaaaaaaaaaaaaaaaaaaaaaaaaaaaaaaaaaaaaaaaaugcaucccccccccccccccccccccccccccccccaaaggcucuuuucagagccaccagaauu

SEQ ID NO: 15916 - RNA, 1843 nt, Artificial Sequence
  mRNA product Design d-1 comprising derived and/or modified sequence from HRSV(Memphis-37)__AIY60640.1__F-del_DSCav1_mut3 (opt2)
gggagacccgugacccggaaguuguacggcuacgcgacuuucccucccacaaacccucgcgcccuuccuuuccuacuugggcccggcagaaagcuuaccauggagcuccccauccucaagaccaacgccaucaccaccauccucgccgccgucacccucugcuucgccuccucccagaacaucaccgaggaguucuaccaguccaccugcuccgccgucuccaagggcuaccucggcgcccuccgcaccggcugguacaccuccgucaucaccaucgagcucuccaacaucaaggagaucaagugcaacggcaccgacgccaaggucaagcucaucaagcaggagcucgacaaguacaagaacgccgucaccgaccuccagcuccucaugcaguccacccccgccgccggcuccggcuccgccaucugcuccggcaucgccgucugcaagguccuccaccucgagggcgaggucaacaagaucaagaacgcccuccucuccaccaacaaggccgucgucucccucuccaacggcgucuccguccucaccuucaagguccucgaccucaagaacuacaucgacaagcagcuccuccccauccucaacaagcaguccugcuccauccccaacaucgagaccgucaucgaguuccagcagaagaacaaccgccuccucgagaucacccgcgaguucuccgucaacgccggcgucaccacccccgucuccaccuacaugcucaccaacuccgagcuccucucccucaucaacgacaugcccaucaccaacgaccagaagaagcucauguccaacaacguccagaucguccgccagcaguccuacuccaucaugugcaucaucaaggaggagguccucgccuacgucguccagcucccccucuacggcgucaucgacacccccugcuggaagcuccacaccuccccccucugcaccaccaacaccaaggagggcuccaacaucugccucacccgcaccgaccgcggcugguacugcgacaacgccggcuccgucuccuucuucccccaggccgagaccugcaagguccaguccaaccgcgucuucugcgacaccaugaacucccucacccuccccuccgaggucaaccucugcaacaucgacaucuucaaccccaaguacgacugcaagaucaugaccuccaagaccgacgucuccuccuccgucaucaccucccucggcgccaucgucuccugcuacggcaagaccaagugcaccgccuccaacaagaaccgcggcaucaucaagaccuucuccaacggcugcgacuacgucuccaacaagggcgucgacaccgucuccgucggcaacacccucuacugcgucaacaagcaggagggccagucccucuacgucaagggcgagcccaucaucaacuucuacgacccccucgucuuccccuccgacgaguucgacgccuccaucucccaggucaacgagaagaucaaccagucccucgccuucauccgcaaguccgacgagcuccuccacaacgucaacgucggcaaguccaccaccaacaucaugaucaccaccaucaucaucgucaucaucgucauccuccuccuccucaucgccgucggccucuuccucuacugcaaggcccgcugaggacuagucccuguucccagagcccacuuuuuuuucuuuuuuugaaauaaaauagccugucuuucagaucuaaaaaaaaaaaaaaaaaaaaaaaaaaaaaaaaaaaaaaaaaaaaaaaaaaaaaaaaaaaaaaaaugcaucccccccccccccccccccccccccccccccaaaggcucuuuucagagccaccagaauu

SEQ ID NO: 15917 - RNA, 1843 nt, Artificial Sequence
  mRNA product Design d-1 comprising derived and/or modified sequence from HRSV(Memphis-37)__AIY60640.1__F-del_DSCav1_mut3 (opt3)
gggagacccgugacccggaaguuguacggcuacgcgacuuucccucccacaaacccucgcgcccuuccuuuccuacuugggcccggcagaaagcuuaccauggagcugcccauccucaagaccaacgccauuacaacuauacuugcugcagugacgcugugcuucgccagcucccagaauaucaccgaagaguuuuaccaaucuacauguucagcggucaguaaaggcuauuugggggcuuuaagaacuggaugguacaccagcguuauuacaaucgaacuguccaacauuaaggagaucaaaugcaaugguaccgacgccaaggugaaacuaauaaagcaggaacucgauaaguauaaaaacgcaguaacugaccugcagcuucugaugcagucuacuccugccgcuggcucggggucagcaaucuguagcggaauugccgugugcaaggucuugcaccucgagggcgaggugaauaaaaucaagaacgcucugcugaguaccaauaaagccguugugucccucucuaacggugucagcguguuaacguucaagguacuggaucuuaagaauuacauugacaaacaauugcugccaauccuaaacaagcaguccuguucaauaccgaauauugaaacuguuaucgaguuucagcagaaaaacaauaggcuccuggaaauuacccgggaguucagugugaacgcgggggucacaacucccgugagcaccuauaugcuuacaaauucugagcuguugucccucaucaacgauaugccuaucaccaacgaccaaaagaaacugaugucaaauaacgugcagauuguccgccagcagagcuacaguauaaugugcaucauuaaggaagagguuuuagcauaugugguacaacugccacucuacggagugaucgauacgcccuguuggaaacuucauacuucuccucugugcacaaccaauacuaaggaaggcuccaacauauguuugacacgaaccgaccguggcugguacugcgauaaugccgggagcgucucguuuuucccacaggcugagacguguaaggugcagucuaacagaguuuucugcgacaccaugaacucccuaacacugcccucagaagugaaucucugcaauauugauaucuucaacccuaaauaugacuguaagaucaugacaaguaaaaccgaugucagcuccucugugauuacaagccugggagccaucguaucaugcuacgguaagacuaaauguaccgcaaguaauaagaacaggggcauuauaaagacauuuuccaaugggugcgacuauguuagcaacaaaggaguggacaccgucucugugggcaauacucuuuacugugucaacaagcaagagggucagucacuguaugugaaaggggagccaaucauuaacuucuacgauccguugguuuuucccagugacgaauuugaugcuagcaucucccaggugaaugagaagaucaaccagucucucgccuuuauucggaaaucggacgaacuguuacacaauguaaacgucggaaagagcacgacaaauauaaugaucaccacuauuaucauugugaucauaguuauccugcuacuccugauugcggugggccuuuucuuguauugcaaggcccgcugaggacuagucccuguucccagagcccacuuuuuuuucuuuuuuugaaauaaaauagccugucuuucagaucuaaaaaaaaaaaaaaaaaaaaaaaaaaaaaaaaaaaaaaaaaaaaaaaaaaaaaaaaaaaaaaaaugcaucccccccccccccccccccccccccccccccaaaggcucuuuucagagccaccagaauu

SEQ ID NO: 15918 - RNA, 1843 nt, Artificial Sequence
  mRNA product Design d-1 comprising derived and/or modified sequence from HRSV(Memphis-37)__AIY60640.1__F-del_DSCav1_mut3 (opt4)
gggagacccgugacccggaaguuguacggcuacgcgacuuucccucccacaaacccucgcgcccuuccuuuccuacuugggcccggcagaaagcuuaccauggagcugcccauccugaagaccaacgccaucaccaccauccuggccgccgugacccugugcuucgccagcagccagaacaucaccgaggaguucuaccagagcaccugcagcgccgugagcaagggcuaccugggcgcccugagaaccggcugguacaccagcgugaucaccaucgagcugagcaacaucaaggagaucaagugcaacggcaccgacgccaaggugaagcugaucaagcaggagcuggacaaguacaagaacgccgugaccgaccugcagcugcugaugcagagcacccccgccgccggcagcggcagcgccaucugcagcggcaucgccgugugcaaggugcugcaccuggagggcgaggugaacaagaucaagaacgcccugcugagcaccaacaaggccguggugagccugagcaacggcgugagcgugcugaccuucaaggugcuggaccugaagaacuacaucgacaagcagcugcugcccauccugaacaagcagagcugcagcauccccaacaucgagaccgugaucgaguuccagcagaagaacaacagacugcuggagaucaccagagaguucagcgugaacgccggcgugaccacccccgugagcaccuacaugcugaccaacagcgagcugcugagccugaucaacgacaugcccaucaccaacgaccagaagaagcugaugagcaacaacgugcagaucgugagacagcagagcuacagcaucaugugcaucaucaaggaggaggugcuggccuacguggugcagcugccccuguacggcgugaucgacacccccugcuggaagcugcacaccagcccccugugcaccaccaacaccaaggagggcagcaacaucugccugaccagaaccgacagaggcugguacugcgacaacgccggcagcgugagcuucuucccccaggccgagaccugcaaggugcagagcaacagaguguucugcgacaccaugaacagccugacccugcccagcgaggugaaccugugcaacaucgacaucuucaaccccaaguacgacugcaagaucaugaccagcaagaccgacgugagcagcagcgugaucaccagccugggcgccaucgugagcugcuacggcaagaccaagugcaccgccagcaacaagaacagaggcaucaucaagaccuucagcaacggcugcgacuacgugagcaacaagggcguggacaccgugagcgugggcaacacccuguacugcgugaacaagcaggagggccagagccuguacgugaagggcgagcccaucaucaacuucuacgacccccugguguuccccagcgacgaguucgacgccagcaucagccaggugaacgagaagaucaaccagagccuggccuucaucagaaagagcgacgagcugcugcacaacgugaacgugggcaagagcaccaccaacaucaugaucaccaccaucaucaucgugaucaucgugauccugcugcugcugaucgccgugggccuguuccuguacugcaaggccagaugaggacuagucccuguucccagagcccacuuuuuuuucuuuuuuugaaauaaaauagccugucuuucagaucuaaaaaaaaaaaaaaaaaaaaaaaaaaaaaaaaaaaaaaaaaaaaaaaaaaaaaaaaaaaaaaaaugcaucccccccccccccccccccccccccccccccaaaggcucuuuucagagccaccagaauu

SEQ ID NO: 15919 - RNA, 1843 nt, Artificial Sequence
  mRNA product Design d-1 comprising derived and/or modified sequence from HRSV(Memphis-37)__AIY60640.1__F-del_DSCav1_mut3 (opt5)
gggagacccgugacccggaaguuguacggcuacgcgacuuucccucccacaaacccucgcgcccuuccuuuccuacuugggcccggcagaaagcuuaccauggagcugcccauccucaagaccaacgccauuacaacgauccuggcugccgugacccuuugcuucgcgagcucccagaauauuacagaagaguuuuaccaaucuaccuguagcgcugucuccaaaggcuaucugggggcccucagaacaggaugguacaccucuguuaucacaauugaacugagcaacaucaaggagaucaaaugcaauggcaccgacgccaaggugaaacuuauuaagcaggaacuggauaaguauaaaaacgcugugacggaccuccagcugcugaugcaguccaccccugccgcugggucuggaagcgccaucuguuccggcauugcggucugcaaggugcuccaccuggagggggagguuaauaaaaucaagaacgcccuucugagcacaaauaaagcuguggucucucucuccaacggagugagcguucugaccuucaaggugcuugaucugaagaauuacauugacaaacaacuccugccgauccugaacaagcagucuuguuccauucccaauaucgaaacagucaucgaguuucagcagaaaaacaaucggcuccuggaaauuacccgcgaguucagcgugaacgccggcgugacgacaccugucucuaccuauaugcuuacaaauuccgagcugcucagccugaucaacgauaugcccauuaccaacgaccaaaagaaacuuauguccaauaacguucagaucgugagacagcagucuuacagcauuaugugcaucaucaaggaagaggugcuggcuuaugucgugcaacucccucuguacggcguuauugauacccccuguuggaaacugcauacauccccucucugcacgaccaauacaaaggaagggagcaacaucugucugacccggacagaccgcggaugguacugcgauaaugccggcucuguguccuuuuucccgcaggcggagaccuguaagguccagagcaacagaguguuuugcgacacgaugaacucucuuacacugcccagcgaaguuaaucucugcaauauugauaucuucaacccuaaauaugacuguaagauuaugaccuccaaaaccgaugugucuagcuccgucaucacaagccugggggccaucgugucuugcuacggaaagaccaaauguacagcuuccaauaagaaccggggcauuaucaagacguuuagcaaugggugcgacuaugucucuaacaaaggaguggacaccguuuccgugggcaauacacuuuacugugucaacaagcaagagggccagagccuguaugugaaaggggagcccauuaucaacuucuacgauccucucguuuuucccuccgacgaguucgaugccucuauuagccaggugaaugaaaagaucaaccagucccuggcuuuuauucgcaaaucugacgaacugcuccacaaugucaacgugggaaagagcaccacaaauaucaugaucaccacgauuaucauugugaucauuguuauccugcuucugcucaucgccgucggccuguuccuguauugcaaggccagaugaggacuagucccuguucccagagcccacuuuuuuuucuuuuuuugaaauaaaauagccugucuuucagaucuaaaaaaaaaaaaaaaaaaaaaaaaaaaaaaaaaaaaaaaaaaaaaaaaaaaaaaaaaaaaaaaaugcaucccccccccccccccccccccccccccccccaaaggcucuuuucagagccaccagaauu

SEQ ID NO: 15920 - RNA, 1843 nt, Artificial Sequence
  mRNA product Design d-1 comprising derived and/or modified sequence from HRSV(Memphis-37)__AIY60640.1__F-del_DSCav1_mut3 (opt6)
gggagacccgugacccggaaguuguacggcuacgcgacuuucccucccacaaacccucgcgcccuuccuuuccuacuugggcccggcagaaagcuuaccauggaacuacccauccuaaaaacaaaugccauaaccacaauacucgccgcuguaacacuauguuucgcuaguucacaaaacauuacagaagaauuuuaccaauccacaugcucagcaguaucaaaaggauaccuaggugcacuaagaacaggaugguacacaagcguaauuacaauagaauuauccaauauuaaagaaauaaaauguaacggcacugacgcuaaaguaaaauuaaucaaacaagaacuagacaaauacaaaaacgcaguaacagaccuacaauuacucaugcaauccacacccgcagcaggaucaggcucagccauaugcucagguauagcaguaugcaaaguacuccaccuugaaggagaaguaaacaaaauaaaaaacgcauuacuaucaacaaacaaagcaguaguaucacuaucaaacggagucucugucuuaaccuuuaaaguauuagauuuaaaaaacuacauagacaaacaacuauuaccaauucuaaauaaacaaucauguucuauaccaaauauagaaacaguaauagaauuucaacaaaaaaacaaccgauuacuagaaaucacaagagaauuuucugucaacgccggcguaaccaccccagucucaacauauaugcuaacaaauagugaacucuuauccuuaauaaacgacaugccaauaacaaaugaccaaaaaaaauuaauguccaauaacguacaaauagucagacaacagucauacucaauaauguguaucaucaaagaagaaguauuagcauacguaguucaacuaccccuauacggcguaauagacacaccauguuggaaacuacacacaucacccuuaugcacaaccaauaccaaagaaggaucuaacauaugccuaaccagaacagacagaggcugguacugcgacaacgcagguucagucucauucuucccacaagccgaaacaugcaaaguccaauccaacagaguauuuugcgacacuaugaacucacuaacucuaccuucagaagucaaccuuuguaacauagacauauuuaacccaaaauacgauuguaaaauaaugaccagcaaaacagacgucucaucaagcguaauaacaucacuuggcgcaauagucuccugcuacggaaaaacaaaaugcacagcauccaacaaaaacagaggcaucauaaaaaccuucuccaacggcugcgacuauguaagcaacaaaggugucgauacaguaucaguaggaaacacacuauacugcguaaacaaacaagaaggacaaucacucuacguaaaaggugaaccaaucauaaacuucuacgacccauuaguuuucccaucagacgaauuugaugccuccauaucacaaguaaaugaaaaaauaaaucaaucccuagcauucauacgaaaaucugaugaauuacuucacaaugucaacgucggaaaaucaaccacuaacauaaugauaacaacaauuauaauaguaauaauaguaauacuccuacuauuaauagccgucggucuuuuccuauacugcaaagcacgauaaggacuagucccuguucccagagcccacuuuuuuuucuuuuuuugaaauaaaauagccugucuuucagaucuaaaaaaaaaaaaaaaaaaaaaaaaaaaaaaaaaaaaaaaaaaaaaaaaaaaaaaaaaaaaaaaaugcaucccccccccccccccccccccccccccccccaaaggcucuuuucagagccaccagaauu

SEQ ID NO: 15921 - RNA, 1843 nt, Artificial Sequence
  mRNA product Design d-1 comprising derived and/or modified sequence from HRSV(Memphis-37)__AIY60640.1__F-del_DSCav1_mut3 (opt11)
gggagacccgugacccggaaguuguacggcuacgcgacuuucccucccacaaacccucgcgcccuuccuuuccuacuugggcccggcagaaagcuuaccauggaacuacccauccucaaaaccaacgccaucaccacaauccuagcugccgucacccuaugcuucgcaagcagccaaaacaucacagaagaauuuuaccaaucaaccugcuccgccgucuccaaaggguaccuaggugcccuccgcaccggcugguacacgucugucauaaccaucgaacucuccaacaucaaagaaaucaaauguaacggaacagacgcaaaagucaaacuaaucaaacaagaacuagacaaauacaaaaacgccguaaccgaccuccaacugcucaugcaauccacccccgcugccggcuccgggagcgcaaucugcucuggaaucgccguaugcaaaguccuccaccucgaaggagaaguaaacaaaaucaaaaacgcgcuccucaguaccaacaaagccgucgucucucuaucaaacggcguaucgguccucaccuucaaaguccucgaccuaaagaacuacauagacaaacaacuccuccccauccuaaacaaacaauccugcucaaucccaaacaucgaaaccgugaucgaguuccaacagaaaaacaaccgccuacucgaaaucacccgagaguucucagucaacgcaggagucaccacccccgucucaacauacaugcuuaccaacagcgaacuccuaucccucaucaacgacaugccaaucacaaacgaccaaaagaaacucaugagcaacaacguccagaucguaagacaacaaagcuacagcaucaugugcaucaucaaagaagaaguacuagcauacgucguccaacucccccucuacggcgucaucgacacccccugcuggaaacuccacaccucaccccucugcacaaccaacaccaaagaaggcuccaauaucugccucacacgcaccgaccgcggcugguacugcgacaacgccggcuccgucuccuucuucccucaagccgaaaccugcaaaguccaguccaacagagucuucugcgacaccaugaacucccuaacacuuccaucagaagucaaccuuuguaacaucgacaucuucaaucccaaauacgacuguaaaauaaugaccucaaaaacugacgugucaagcucaguuaucaccucccuaggggccaucgucuccugcuacggcaaaacaaaaugcaccgcauccaacaaaaaucgcggaaucaucaaaacauucuccaacggaugcgacuacgucucaaacaagggaguagauaccguaagcguuggcaacacccucuacugcguaaacaaacaagaaggccaaucacucuacgucaaaggcgaacccauaaucaacuucuacgacccccucgucuucccuuccgaugaguucgacgccagcaucucccaagucaacgagaaaauaaaccagucacucgcauucauccgcaaaagcgacgaacuccuccacaacguaaacguaggcaaauccacaaccaauaucaugauaaccacaaucaucaucgugaucaucgucauccuccuccuccucauagcugucggacucuuccucuacuguaaagcacgcugaggacuagucccuguucccagagcccacuuuuuuuucuuuuuuugaaauaaaauagccugucuuucagaucuaaaaaaaaaaaaaaaaaaaaaaaaaaaaaaaaaaaaaaaaaaaaaaaaaaaaaaaaaaaaaaaaugcaucccccccccccccccccccccccccccccccaaaggcucuuuucagagccaccagaauu

SEQ ID NO: 15922 - RNA, 1898 nt, Artificial Sequence
  mRNA product Design d-2 comprising derived and/or modified sequence from HRSV(Memphis-37)__AIY60640.1__F-del_DSCav1_mut3 (opt1)
gggagagcggcucggccauuuugucccagucaguccggaggcugcggcugcagaaguaccgccugcggaguaacugcaaagaagcuuaccauggagcugcccauccucaagaccaacgccaucaccacgauccuggccgcggugacccugugcuucgccagcucccagaacaucaccgaggaguucuaccagagcacgugcuccgccgucagcaagggcuaccucggcgcccugcgcaccgggugguacaccagcgugaucaccaucgagcuguccaacaucaaggagaucaagugcaacggcaccgacgccaaggugaagcucaucaagcaggagcuggacaaguacaagaacgcggucacggaccugcagcuccugaugcagagcaccccggccgccggcuccgggagcgcgaucugcuccggcaucgccgucugcaaggugcugcaccucgagggcgaggugaacaagaucaagaacgcccugcuguccaccaacaaggccgucgugagccucuccaacggggugagcguccugaccuucaaggugcuggaccucaagaacuacaucgacaagcagcugcugcccauccugaacaagcagagcugcuccauccccaacaucgagaccgucaucgaguuccagcagaagaacaaccgccuccuggagaucacgcgggaguucagcgugaacgcgggcgugaccacccccgucuccaccuacaugcugacgaacagcgagcuccugucccugaucaacgacaugccgaucaccaacgaccagaagaagcucaugagcaacaacgugcagaucgugcgccagcaguccuacagcaucaugugcaucaucaaggaggagguccuggccuacguggugcagcugccccucuacggggucaucgacacccccugcuggaagcugcacaccagcccccugugcacgaccaacaccaaggagggcuccaacaucugccucacccggacggaccgcgggugguacugcgacaacgccggcagcguguccuucuucccgcaggccgagaccugcaagguccagagcaaccggguguucugcgacaccaugaacucccugacccugcccagcgaggugaaccucugcaacaucgacaucuucaaccccaaguacgacugcaagaucaugacguccaagaccgacgucagcuccagcgugaucaccucccugggcgccaucgugagcugcuacgggaagaccaagugcacggcgagcaacaagaaccgcggcaucaucaagaccuucuccaacgggugcgacuacgucagcaacaagggcguggacaccguguccgucggcaacacccuguacugcgugaacaagcaggagggccagagccucuacgugaagggggagcccaucaucaacuucuacgacccgcuggucuuccccuccgacgaguucgacgccagcaucucccaggugaacgagaagaucaaccagagccuggccuucauccggaaguccgacgagcuccugcacaacgugaacgucggcaagagcaccacgaacaucaugaucaccaccaucaucaucgugaucaucgugauccugcugcuccugaucgccgucgggcuguuccucuacugcaaggcccgcugaggacuaguaauaaggaaacuguaugaaugucugugggcaggaagugaagagauccuucuguaaagguuuuuggaauuaugucugcugaauaauaaacuuuuuugaaauaauaaaucugguagaaaaaugagaucuaaaaaaaaaaaaaaaaaaaaaaaaaaaaaaaaaaaaaaaaaaaaaaaaaaaaaaaaaaaaaaaaugcaucccccccccccccccccccccccccccccccaaaggcucuuuucagagccaccagaauu

SEQ ID NO: 15923 - RNA, 1898 nt, Artificial Sequence
  mRNA product Design d-2 comprising derived and/or modified sequence from HRSV(Memphis-37)__AIY60640.1__F-del_DSCav1_mut3 (opt1)
gggagagcggcucggccauuuugucccagucaguccggaggcugcggcugcagaaguaccgccugcggaguaacugcaaagaagcuuaccauggagcugcccauccucaagaccaacgccaucaccacgauccuggccgcggugacccugugcuucgccagcucccagaacaucaccgaggaguucuaccagagcacgugcuccgccgucagcaagggcuaccucggggcccugcgcaccggcugguacaccuccgugaucaccaucgagcugagcaacaucaaggagaucaagugcaacgggaccgacgccaaggugaagcucaucaagcaggagcuggacaaguacaagaacgcggucacggaccugcagcuccugaugcaguccaccccggccgccggcagcggguccgccaucugcagcggcaucgcggugugcaaggugcugcaccucgagggcgaggucaacaagaucaagaacgcccugcuguccaccaacaaggccguggugagccucuccaacggggucagcgugcugaccuucaaggugcuggaccucaagaacuacaucgacaagcagcugcugcccauccucaacaagcaguccugcagcauccccaacaucgagacggucaucgaguuccagcagaagaacaaccggcugcuggagaucacccgcgaguucuccgugaacgccggcgugaccacccccgucagcacguacaugcucaccaacuccgagcugcugagccucaucaacgacaugccgaucaccaacgaccagaagaagcugaugagcaacaacgugcagaucgugcggcagcaguccuacagcaucaugugcaucaucaaggaggagguccuggccuacguggugcagcucccccuguacggggucaucgacacccccugcuggaagcugcacacgagcccccucugcaccaccaacaccaaggagggcuccaacaucugccugacgcgcaccgaccgggggugguacugcgacaacgcgggcuccgugagcuucuucccgcaggccgagaccugcaaggugcaguccaaccgcgucuucugcgacaccaugaacagccugacgcuccccuccgaggugaaccugugcaacaucgacaucuucaaccccaaguacgacugcaagaucaugaccagcaagaccgacgucuccagcuccgugaucaccagccugggcgccaucguguccugcuacgggaagacgaagugcaccgccagcaacaagaaccggggcaucaucaagaccuucuccaacgggugcgacuacgucagcaacaagggcguggacaccguguccgucggcaacacgcucuacugcgugaacaagcaggaggggcagagccuguacgugaagggcgagcccaucaucaacuucuacgacccgcuggucuuccccagcgacgaguucgacgccuccaucagccaggugaacgagaagaucaaccagucccucgcguucauccgcaagagcgacgagcugcugcacaacgugaacgucgggaaguccaccaccaacaucaugaucaccaccaucaucaucgugaucaucgugauccuccugcugcucaucgccgucggccuguuccuguacugcaaggcccggugaggacuaguaauaaggaaacuguaugaaugucugugggcaggaagugaagagauccuucuguaaagguuuuuggaauuaugucugcugaauaauaaacuuuuuugaaauaauaaaucugguagaaaaaugagaucuaaaaaaaaaaaaaaaaaaaaaaaaaaaaaaaaaaaaaaaaaaaaaaaaaaaaaaaaaaaaaaaaugcaucccccccccccccccccccccccccccccccaaaggcucuuuucagagccaccagaauu

SEQ ID NO: 15924 - RNA, 1898 nt, Artificial Sequence
  mRNA product Design d-2 comprising derived and/or modified sequence from HRSV(Memphis-37)__AIY60640.1__F-del_DSCav1_mut3 (opt2)
gggagagcggcucggccauuuugucccagucaguccggaggcugcggcugcagaaguaccgccugcggaguaacugcaaagaagcuuaccauggagcuccccauccucaagaccaacgccaucaccaccauccucgccgccgucacccucugcuucgccuccucccagaacaucaccgaggaguucuaccaguccaccugcuccgccgucuccaagggcuaccucggcgcccuccgcaccggcugguacaccuccgucaucaccaucgagcucuccaacaucaaggagaucaagugcaacggcaccgacgccaaggucaagcucaucaagcaggagcucgacaaguacaagaacgccgucaccgaccuccagcuccucaugcaguccacccccgccgccggcuccggcuccgccaucugcuccggcaucgccgucugcaagguccuccaccucgagggcgaggucaacaagaucaagaacgcccuccucuccaccaacaaggccgucgucucccucuccaacggcgucuccguccucaccuucaagguccucgaccucaagaacuacaucgacaagcagcuccuccccauccucaacaagcaguccugcuccauccccaacaucgagaccgucaucgaguuccagcagaagaacaaccgccuccucgagaucacccgcgaguucuccgucaacgccggcgucaccacccccgucuccaccuacaugcucaccaacuccgagcuccucucccucaucaacgacaugcccaucaccaacgaccagaagaagcucauguccaacaacguccagaucguccgccagcaguccuacuccaucaugugcaucaucaaggaggagguccucgccuacgucguccagcucccccucuacggcgucaucgacacccccugcuggaagcuccacaccuccccccucugcaccaccaacaccaaggagggcuccaacaucugccucacccgcaccgaccgcggcugguacugcgacaacgccggcuccgucuccuucuucccccaggccgagaccugcaagguccaguccaaccgcgucuucugcgacaccaugaacucccucacccuccccuccgaggucaaccucugcaacaucgacaucuucaaccccaaguacgacugcaagaucaugaccuccaagaccgacgucuccuccuccgucaucaccucccucggcgccaucgucuccugcuacggcaagaccaagugcaccgccuccaacaagaaccgcggcaucaucaagaccuucuccaacggcugcgacuacgucuccaacaagggcgucgacaccgucuccgucggcaacacccucuacugcgucaacaagcaggagggccagucccucuacgucaagggcgagcccaucaucaacuucuacgacccccucgucuuccccuccgacgaguucgacgccuccaucucccaggucaacgagaagaucaaccagucccucgccuucauccgcaaguccgacgagcuccuccacaacgucaacgucggcaaguccaccaccaacaucaugaucaccaccaucaucaucgucaucaucgucauccuccuccuccucaucgccgucggccucuuccucuacugcaaggcccgcugaggacuaguaauaaggaaacuguaugaaugucugugggcaggaagugaagagauccuucuguaaagguuuuuggaauuaugucugcugaauaauaaacuuuuuugaaauaauaaaucugguagaaaaaugagaucuaaaaaaaaaaaaaaaaaaaaaaaaaaaaaaaaaaaaaaaaaaaaaaaaaaaaaaaaaaaaaaaaugcaucccccccccccccccccccccccccccccccaaaggcucuuuucagagccaccagaauu

SEQ ID NO: 15925 - RNA, 1898 nt, Artificial Sequence
  mRNA product Design d-2 comprising derived and/or modified sequence from HRSV(Memphis-37)__AIY60640.1__F-del_DSCav1_mut3 (opt3)
gggagagcggcucggccauuuugucccagucaguccggaggcugcggcugcagaaguaccgccugcggaguaacugcaaagaagcuuaccauggagcugcccauccucaagaccaacgccauuacaacuauacuugcugcagugacgcugugcuucgccagcucccagaauaucaccgaagaguuuuaccaaucuacauguucagcggucaguaaaggcuauuugggggcuuuaagaacuggaugguacaccagcguuauuacaaucgaacuguccaacauuaaggagaucaaaugcaaugguaccgacgccaaggugaaacuaauaaagcaggaacucgauaaguauaaaaacgcaguaacugaccugcagcuucugaugcagucuacuccugccgcuggcucggggucagcaaucuguagcggaauugccgugugcaaggucuugcaccucgagggcgaggugaauaaaaucaagaacgcucugcugaguaccaauaaagccguugugucccucucuaacggugucagcguguuaacguucaagguacuggaucuuaagaauuacauugacaaacaauugcugccaauccuaaacaagcaguccuguucaauaccgaauauugaaacuguuaucgaguuucagcagaaaaacaauaggcuccuggaaauuacccgggaguucagugugaacgcgggggucacaacucccgugagcaccuauaugcuuacaaauucugagcuguugucccucaucaacgauaugccuaucaccaacgaccaaaagaaacugaugucaaauaacgugcagauuguccgccagcagagcuacaguauaaugugcaucauuaaggaagagguuuuagcauaugugguacaacugccacucuacggagugaucgauacgcccuguuggaaacuucauacuucuccucugugcacaaccaauacuaaggaaggcuccaacauauguuugacacgaaccgaccguggcugguacugcgauaaugccgggagcgucucguuuuucccacaggcugagacguguaaggugcagucuaacagaguuuucugcgacaccaugaacucccuaacacugcccucagaagugaaucucugcaauauugauaucuucaacccuaaauaugacuguaagaucaugacaaguaaaaccgaugucagcuccucugugauuacaagccugggagccaucguaucaugcuacgguaagacuaaauguaccgcaaguaauaagaacaggggcauuauaaagacauuuuccaaugggugcgacuauguuagcaacaaaggaguggacaccgucucugugggcaauacucuuuacugugucaacaagcaagagggucagucacuguaugugaaaggggagccaaucauuaacuucuacgauccguugguuuuucccagugacgaauuugaugcuagcaucucccaggugaaugagaagaucaaccagucucucgccuuuauucggaaaucggacgaacuguuacacaauguaaacgucggaaagagcacgacaaauauaaugaucaccacuauuaucauugugaucauaguuauccugcuacuccugauugcggugggccuuuucuuguauugcaaggcccgcugaggacuaguaauaaggaaacuguaugaaugucugugggcaggaagugaagagauccuucuguaaagguuuuuggaauuaugucugcugaauaauaaacuuuuuugaaauaauaaaucugguagaaaaaugagaucuaaaaaaaaaaaaaaaaaaaaaaaaaaaaaaaaaaaaaaaaaaaaaaaaaaaaaaaaaaaaaaaaugcaucccccccccccccccccccccccccccccccaaaggcucuuuucagagccaccagaauu

SEQ ID NO: 15926 - RNA, 1898 nt, Artificial Sequence
  mRNA product Design d-2 comprising derived and/or modified sequence from HRSV(Memphis-37)__AIY60640.1__F-del_DSCav1_mut3 (opt4)
gggagagcggcucggccauuuugucccagucaguccggaggcugcggcugcagaaguaccgccugcggaguaacugcaaagaagcuuaccauggagcugcccauccugaagaccaacgccaucaccaccauccuggccgccgugacccugugcuucgccagcagccagaacaucaccgaggaguucuaccagagcaccugcagcgccgugagcaagggcuaccugggcgcccugagaaccggcugguacaccagcgugaucaccaucgagcugagcaacaucaaggagaucaagugcaacggcaccgacgccaaggugaagcugaucaagcaggagcuggacaaguacaagaacgccgugaccgaccugcagcugcugaugcagagcacccccgccgccggcagcggcagcgccaucugcagcggcaucgccgugugcaaggugcugcaccuggagggcgaggugaacaagaucaagaacgcccugcugagcaccaacaaggccguggugagccugagcaacggcgugagcgugcugaccuucaaggugcuggaccugaagaacuacaucgacaagcagcugcugcccauccugaacaagcagagcugcagcauccccaacaucgagaccgugaucgaguuccagcagaagaacaacagacugcuggagaucaccagagaguucagcgugaacgccggcgugaccacccccgugagcaccuacaugcugaccaacagcgagcugcugagccugaucaacgacaugcccaucaccaacgaccagaagaagcugaugagcaacaacgugcagaucgugagacagcagagcuacagcaucaugugcaucaucaaggaggaggugcuggccuacguggugcagcugccccuguacggcgugaucgacacccccugcuggaagcugcacaccagcccccugugcaccaccaacaccaaggagggcagcaacaucugccugaccagaaccgacagaggcugguacugcgacaacgccggcagcgugagcuucuucccccaggccgagaccugcaaggugcagagcaacagaguguucugcgacaccaugaacagccugacccugcccagcgaggugaaccugugcaacaucgacaucuucaaccccaaguacgacugcaagaucaugaccagcaagaccgacgugagcagcagcgugaucaccagccugggcgccaucgugagcugcuacggcaagaccaagugcaccgccagcaacaagaacagaggcaucaucaagaccuucagcaacggcugcgacuacgugagcaacaagggcguggacaccgugagcgugggcaacacccuguacugcgugaacaagcaggagggccagagccuguacgugaagggcgagcccaucaucaacuucuacgacccccugguguuccccagcgacgaguucgacgccagcaucagccaggugaacgagaagaucaaccagagccuggccuucaucagaaagagcgacgagcugcugcacaacgugaacgugggcaagagcaccaccaacaucaugaucaccaccaucaucaucgugaucaucgugauccugcugcugcugaucgccgugggccuguuccuguacugcaaggccagaugaggacuaguaauaaggaaacuguaugaaugucugugggcaggaagugaagagauccuucuguaaagguuuuuggaauuaugucugcugaauaauaaacuuuuuugaaauaauaaaucugguagaaaaaugagaucuaaaaaaaaaaaaaaaaaaaaaaaaaaaaaaaaaaaaaaaaaaaaaaaaaaaaaaaaaaaaaaaaugcaucccccccccccccccccccccccccccccccaaaggcucuuuucagagccaccagaauu

SEQ ID NO: 15927 - RNA, 1898 nt, Artificial Sequence
  mRNA product Design d-2 comprising derived and/or modified sequence from HRSV(Memphis-37)__AIY60640.1__F-del_DSCav1_mut3 (opt5)
gggagagcggcucggccauuuugucccagucaguccggaggcugcggcugcagaaguaccgccugcggaguaacugcaaagaagcuuaccauggagcugcccauccucaagaccaacgccauuacaacgauccuggcugccgugacccuuugcuucgcgagcucccagaauauuacagaagaguuuuaccaaucuaccuguagcgcugucuccaaaggcuaucugggggcccucagaacaggaugguacaccucuguuaucacaauugaacugagcaacaucaaggagaucaaaugcaauggcaccgacgccaaggugaaacuuauuaagcaggaacuggauaaguauaaaaacgcugugacggaccuccagcugcugaugcaguccaccccugccgcugggucuggaagcgccaucuguuccggcauugcggucugcaaggugcuccaccuggagggggagguuaauaaaaucaagaacgcccuucugagcacaaauaaagcuguggucucucucuccaacggagugagcguucugaccuucaaggugcuugaucugaagaauuacauugacaaacaacuccugccgauccugaacaagcagucuuguuccauucccaauaucgaaacagucaucgaguuucagcagaaaaacaaucggcuccuggaaauuacccgcgaguucagcgugaacgccggcgugacgacaccugucucuaccuauaugcuuacaaauuccgagcugcucagccugaucaacgauaugcccauuaccaacgaccaaaagaaacuuauguccaauaacguucagaucgugagacagcagucuuacagcauuaugugcaucaucaaggaagaggugcuggcuuaugucgugcaacucccucuguacggcguuauugauacccccuguuggaaacugcauacauccccucucugcacgaccaauacaaaggaagggagcaacaucugucugacccggacagaccgcggaugguacugcgauaaugccggcucuguguccuuuuucccgcaggcggagaccuguaagguccagagcaacagaguguuuugcgacacgaugaacucucuuacacugcccagcgaaguuaaucucugcaauauugauaucuucaacccuaaauaugacuguaagauuaugaccuccaaaaccgaugugucuagcuccgucaucacaagccugggggccaucgugucuugcuacggaaagaccaaauguacagcuuccaauaagaaccggggcauuaucaagacguuuagcaaugggugcgacuaugucucuaacaaaggaguggacaccguuuccgugggcaauacacuuuacugugucaacaagcaagagggccagagccuguaugugaaaggggagcccauuaucaacuucuacgauccucucguuuuucccuccgacgaguucgaugccucuauuagccaggugaaugaaaagaucaaccagucccuggcuuuuauucgcaaaucugacgaacugcuccacaaugucaacgugggaaagagcaccacaaauaucaugaucaccacgauuaucauugugaucauuguuauccugcuucugcucaucgccgucggccuguuccuguauugcaaggccagaugaggacuaguaauaaggaaacuguaugaaugucugugggcaggaagugaagagauccuucuguaaagguuuuuggaauuaugucugcugaauaauaaacuuuuuugaaauaauaaaucugguagaaaaaugagaucuaaaaaaaaaaaaaaaaaaaaaaaaaaaaaaaaaaaaaaaaaaaaaaaaaaaaaaaaaaaaaaaaugcaucccccccccccccccccccccccccccccccaaaggcucuuuucagagccaccagaauu

SEQ ID NO: 15928 - RNA, 1898 nt, Artificial Sequence
  mRNA product Design d-2 comprising derived and/or modified sequence from HRSV(Memphis-37)__AIY60640.1__F-del_DSCav1_mut3 (opt6)
gggagagcggcucggccauuuugucccagucaguccggaggcugcggcugcagaaguaccgccugcggaguaacugcaaagaagcuuaccauggaacuacccauccuaaaaacaaaugccauaaccacaauacucgccgcuguaacacuauguuucgcuaguucacaaaacauuacagaagaauuuuaccaauccacaugcucagcaguaucaaaaggauaccuaggugcacuaagaacaggaugguacacaagcguaauuacaauagaauuauccaauauuaaagaaauaaaauguaacggcacugacgcuaaaguaaaauuaaucaaacaagaacuagacaaauacaaaaacgcaguaacagaccuacaauuacucaugcaauccacacccgcagcaggaucaggcucagccauaugcucagguauagcaguaugcaaaguacuccaccuugaaggagaaguaaacaaaauaaaaaacgcauuacuaucaacaaacaaagcaguaguaucacuaucaaacggagucucugucuuaaccuuuaaaguauuagauuuaaaaaacuacauagacaaacaacuauuaccaauucuaaauaaacaaucauguucuauaccaaauauagaaacaguaauagaauuucaacaaaaaaacaaccgauuacuagaaaucacaagagaauuuucugucaacgccggcguaaccaccccagucucaacauauaugcuaacaaauagugaacucuuauccuuaauaaacgacaugccaauaacaaaugaccaaaaaaaauuaauguccaauaacguacaaauagucagacaacagucauacucaauaauguguaucaucaaagaagaaguauuagcauacguaguucaacuaccccuauacggcguaauagacacaccauguuggaaacuacacacaucacccuuaugcacaaccaauaccaaagaaggaucuaacauaugccuaaccagaacagacagaggcugguacugcgacaacgcagguucagucucauucuucccacaagccgaaacaugcaaaguccaauccaacagaguauuuugcgacacuaugaacucacuaacucuaccuucagaagucaaccuuuguaacauagacauauuuaacccaaaauacgauuguaaaauaaugaccagcaaaacagacgucucaucaagcguaauaacaucacuuggcgcaauagucuccugcuacggaaaaacaaaaugcacagcauccaacaaaaacagaggcaucauaaaaaccuucuccaacggcugcgacuauguaagcaacaaaggugucgauacaguaucaguaggaaacacacuauacugcguaaacaaacaagaaggacaaucacucuacguaaaaggugaaccaaucauaaacuucuacgacccauuaguuuucccaucagacgaauuugaugccuccauaucacaaguaaaugaaaaaauaaaucaaucccuagcauucauacgaaaaucugaugaauuacuucacaaugucaacgucggaaaaucaaccacuaacauaaugauaacaacaauuauaauaguaauaauaguaauacuccuacuauuaauagccgucggucuuuuccuauacugcaaagcacgauaaggacuaguaauaaggaaacuguaugaaugucugugggcaggaagugaagagauccuucuguaaagguuuuuggaauuaugucugcugaauaauaaacuuuuuugaaauaauaaaucugguagaaaaaugagaucuaaaaaaaaaaaaaaaaaaaaaaaaaaaaaaaaaaaaaaaaaaaaaaaaaaaaaaaaaaaaaaaaugcaucccccccccccccccccccccccccccccccaaaggcucuuuucagagccaccagaauu

SEQ ID NO: 15929 - RNA, 1898 nt, Artificial Sequence
  mRNA product Design d-2 comprising derived and/or modified sequence from HRSV(Memphis-37)__AIY60640.1__F-del_DSCav1_mut3 (opt11)
gggagagcggcucggccauuuugucccagucaguccggaggcugcggcugcagaaguaccgccugcggaguaacugcaaagaagcuuaccauggaacuacccauccucaaaaccaacgccaucaccacaauccuagcugccgucacccuaugcuucgcaagcagccaaaacaucacagaagaauuuuaccaaucaaccugcuccgccgucuccaaaggguaccuaggugcccuccgcaccggcugguacacgucugucauaaccaucgaacucuccaacaucaaagaaaucaaauguaacggaacagacgcaaaagucaaacuaaucaaacaagaacuagacaaauacaaaaacgccguaaccgaccuccaacugcucaugcaauccacccccgcugccggcuccgggagcgcaaucugcucuggaaucgccguaugcaaaguccuccaccucgaaggagaaguaaacaaaaucaaaaacgcgcuccucaguaccaacaaagccgucgucucucuaucaaacggcguaucgguccucaccuucaaaguccucgaccuaaagaacuacauagacaaacaacuccuccccauccuaaacaaacaauccugcucaaucccaaacaucgaaaccgugaucgaguuccaacagaaaaacaaccgccuacucgaaaucacccgagaguucucagucaacgcaggagucaccacccccgucucaacauacaugcuuaccaacagcgaacuccuaucccucaucaacgacaugccaaucacaaacgaccaaaagaaacucaugagcaacaacguccagaucguaagacaacaaagcuacagcaucaugugcaucaucaaagaagaaguacuagcauacgucguccaacucccccucuacggcgucaucgacacccccugcuggaaacuccacaccucaccccucugcacaaccaacaccaaagaaggcuccaauaucugccucacacgcaccgaccgcggcugguacugcgacaacgccggcuccgucuccuucuucccucaagccgaaaccugcaaaguccaguccaacagagucuucugcgacaccaugaacucccuaacacuuccaucagaagucaaccuuuguaacaucgacaucuucaaucccaaauacgacuguaaaauaaugaccucaaaaacugacgugucaagcucaguuaucaccucccuaggggccaucgucuccugcuacggcaaaacaaaaugcaccgcauccaacaaaaaucgcggaaucaucaaaacauucuccaacggaugcgacuacgucucaaacaagggaguagauaccguaagcguuggcaacacccucuacugcguaaacaaacaagaaggccaaucacucuacgucaaaggcgaacccauaaucaacuucuacgacccccucgucuucccuuccgaugaguucgacgccagcaucucccaagucaacgagaaaauaaaccagucacucgcauucauccgcaaaagcgacgaacuccuccacaacguaaacguaggcaaauccacaaccaauaucaugauaaccacaaucaucaucgugaucaucgucauccuccuccuccucauagcugucggacucuuccucuacuguaaagcacgcugaggacuaguaauaaggaaacuguaugaaugucugugggcaggaagugaagagauccuucuguaaagguuuuuggaauuaugucugcugaauaauaaacuuuuuugaaauaauaaaucugguagaaaaaugagaucuaaaaaaaaaaaaaaaaaaaaaaaaaaaaaaaaaaaaaaaaaaaaaaaaaaaaaaaaaaaaaaaaugcaucccccccccccccccccccccccccccccccaaaggcucuuuucagagccaccagaauu

SEQ ID NO: 15930 - RNA, 2214 nt, Artificial Sequence
  mRNA product Design d-3 comprising derived and/or modified sequence from HRSV(Memphis-37)__AIY60640.1__F-del_DSCav1_mut3 (opt1)
gggagagggcgcuuggcuugcaaggacccugagcugcggcauugaagcacacccaacccaacucgacugaagucagccucacugaaccggaucugagaaucuucucucucugggcuugccagggcucuccgaaccuagcuagcauccucuucaauuccaacuagaaagcuuaccauggagcugcccauccucaagaccaacgccaucaccacgauccuggccgcggugacccugugcuucgccagcucccagaacaucaccgaggaguucuaccagagcacgugcuccgccgucagcaagggcuaccucggcgcccugcgcaccgggugguacaccagcgugaucaccaucgagcuguccaacaucaaggagaucaagugcaacggcaccgacgccaaggugaagcucaucaagcaggagcuggacaaguacaagaacgcggucacggaccugcagcuccugaugcagagcaccccggccgccggcuccgggagcgcgaucugcuccggcaucgccgucugcaaggugcugcaccucgagggcgaggugaacaagaucaagaacgcccugcuguccaccaacaaggccgucgugagccucuccaacggggugagcguccugaccuucaaggugcuggaccucaagaacuacaucgacaagcagcugcugcccauccugaacaagcagagcugcuccauccccaacaucgagaccgucaucgaguuccagcagaagaacaaccgccuccuggagaucacgcgggaguucagcgugaacgcgggcgugaccacccccgucuccaccuacaugcugacgaacagcgagcuccugucccugaucaacgacaugccgaucaccaacgaccagaagaagcucaugagcaacaacgugcagaucgugcgccagcaguccuacagcaucaugugcaucaucaaggaggagguccuggccuacguggugcagcugccccucuacggggucaucgacacccccugcuggaagcugcacaccagcccccugugcacgaccaacaccaaggagggcuccaacaucugccucacccggacggaccgcgggugguacugcgacaacgccggcagcguguccuucuucccgcaggccgagaccugcaagguccagagcaaccggguguucugcgacaccaugaacucccugacccugcccagcgaggugaaccucugcaacaucgacaucuucaaccccaaguacgacugcaagaucaugacguccaagaccgacgucagcuccagcgugaucaccucccugggcgccaucgugagcugcuacgggaagaccaagugcacggcgagcaacaagaaccgcggcaucaucaagaccuucuccaacgggugcgacuacgucagcaacaagggcguggacaccguguccgucggcaacacccuguacugcgugaacaagcaggagggccagagccucuacgugaagggggagcccaucaucaacuucuacgacccgcuggucuuccccuccgacgaguucgacgccagcaucucccaggugaacgagaagaucaaccagagccuggccuucauccggaaguccgacgagcuccugcacaacgugaacgucggcaagagcaccacgaacaucaugaucaccaccaucaucaucgugaucaucgugauccugcugcuccugaucgccgucgggcuguuccucuacugcaaggcccgcugaggacuagugaagggaacacccaaauuuaauucagccuuaagcacaauuaauuaagagugaaacguaauuguacaagcaguuggucacccaccauagggcaugaucaacaccgcaaccuuuccuuuuucccccagugauucugaaaaaccccucuucccuucagcuugcuuagauguuccaaauuuaguaagcuuaaggcggccuacagaagaaaaagaaaaaaaaggccacaaaaguucccucucacuuucaguaaauaaaauaaaagcagcaacagaaauaaagaaauaaaugaaauucaaaaugaaauaaauauuguguugugcagcauuaaaaaaucaauaaaaauuaaaaaugagcaagaucuaaaaaaaaaaaaaaaaaaaaaaaaaaaaaaaaaaaaaaaaaaaaaaaaaaaaaaaaaaaaaaaaugcaucccccccccccccccccccccccccccccccaaaggcucuuuucagagccaccagaauu

SEQ ID NO: 15931 - RNA, 2214 nt, Artificial Sequence
  mRNA product Design d-3 comprising derived and/or modified sequence from HRSV(Memphis-37)__AIY60640.1__F-del_DSCav1_mut3 (opt1)
gggagagggcgcuuggcuugcaaggacccugagcugcggcauugaagcacacccaacccaacucgacugaagucagccucacugaaccggaucugagaaucuucucucucugggcuugccagggcucuccgaaccuagcuagcauccucuucaauuccaacuagaaagcuuaccauggagcugcccauccucaagaccaacgccaucaccacgauccuggccgcggugacccugugcuucgccagcucccagaacaucaccgaggaguucuaccagagcacgugcuccgccgucagcaagggcuaccucggggcccugcgcaccggcugguacaccuccgugaucaccaucgagcugagcaacaucaaggagaucaagugcaacgggaccgacgccaaggugaagcucaucaagcaggagcuggacaaguacaagaacgcggucacggaccugcagcuccugaugcaguccaccccggccgccggcagcggguccgccaucugcagcggcaucgcggugugcaaggugcugcaccucgagggcgaggucaacaagaucaagaacgcccugcuguccaccaacaaggccguggugagccucuccaacggggucagcgugcugaccuucaaggugcuggaccucaagaacuacaucgacaagcagcugcugcccauccucaacaagcaguccugcagcauccccaacaucgagacggucaucgaguuccagcagaagaacaaccggcugcuggagaucacccgcgaguucuccgugaacgccggcgugaccacccccgucagcacguacaugcucaccaacuccgagcugcugagccucaucaacgacaugccgaucaccaacgaccagaagaagcugaugagcaacaacgugcagaucgugcggcagcaguccuacagcaucaugugcaucaucaaggaggagguccuggccuacguggugcagcucccccuguacggggucaucgacacccccugcuggaagcugcacacgagcccccucugcaccaccaacaccaaggagggcuccaacaucugccugacgcgcaccgaccgggggugguacugcgacaacgcgggcuccgugagcuucuucccgcaggccgagaccugcaaggugcaguccaaccgcgucuucugcgacaccaugaacagccugacgcuccccuccgaggugaaccugugcaacaucgacaucuucaaccccaaguacgacugcaagaucaugaccagcaagaccgacgucuccagcuccgugaucaccagccugggcgccaucguguccugcuacgggaagacgaagugcaccgccagcaacaagaaccggggcaucaucaagaccuucuccaacgggugcgacuacgucagcaacaagggcguggacaccguguccgucggcaacacgcucuacugcgugaacaagcaggaggggcagagccuguacgugaagggcgagcccaucaucaacuucuacgacccgcuggucuuccccagcgacgaguucgacgccuccaucagccaggugaacgagaagaucaaccagucccucgcguucauccgcaagagcgacgagcugcugcacaacgugaacgucgggaaguccaccaccaacaucaugaucaccaccaucaucaucgugaucaucgugauccuccugcugcucaucgccgucggccuguuccuguacugcaaggcccggugaggacuagugaagggaacacccaaauuuaauucagccuuaagcacaauuaauuaagagugaaacguaauuguacaagcaguuggucacccaccauagggcaugaucaacaccgcaaccuuuccuuuuucccccagugauucugaaaaaccccucuucccuucagcuugcuuagauguuccaaauuuaguaagcuuaaggcggccuacagaagaaaaagaaaaaaaaggccacaaaaguucccucucacuuucaguaaauaaaauaaaagcagcaacagaaauaaagaaauaaaugaaauucaaaaugaaauaaauauuguguugugcagcauuaaaaaaucaauaaaaauuaaaaaugagcaagaucuaaaaaaaaaaaaaaaaaaaaaaaaaaaaaaaaaaaaaaaaaaaaaaaaaaaaaaaaaaaaaaaaugcaucccccccccccccccccccccccccccccccaaaggcucuuuucagagccaccagaauu

SEQ ID NO: 15932 - RNA, 2214 nt, Artificial Sequence
  mRNA product Design d-3 comprising derived and/or modified sequence from HRSV(Memphis-37)__AIY60640.1__F-del_DSCav1_mut3 (opt2)
gggagagggcgcuuggcuugcaaggacccugagcugcggcauugaagcacacccaacccaacucgacugaagucagccucacugaaccggaucugagaaucuucucucucugggcuugccagggcucuccgaaccuagcuagcauccucuucaauuccaacuagaaagcuuaccauggagcuccccauccucaagaccaacgccaucaccaccauccucgccgccgucacccucugcuucgccuccucccagaacaucaccgaggaguucuaccaguccaccugcuccgccgucuccaagggcuaccucggcgcccuccgcaccggcugguacaccuccgucaucaccaucgagcucuccaacaucaaggagaucaagugcaacggcaccgacgccaaggucaagcucaucaagcaggagcucgacaaguacaagaacgccgucaccgaccuccagcuccucaugcaguccacccccgccgccggcuccggcuccgccaucugcuccggcaucgccgucugcaagguccuccaccucgagggcgaggucaacaagaucaagaacgcccuccucuccaccaacaaggccgucgucucccucuccaacggcgucuccguccucaccuucaagguccucgaccucaagaacuacaucgacaagcagcuccuccccauccucaacaagcaguccugcuccauccccaacaucgagaccgucaucgaguuccagcagaagaacaaccgccuccucgagaucacccgcgaguucuccgucaacgccggcgucaccacccccgucuccaccuacaugcucaccaacuccgagcuccucucccucaucaacgacaugcccaucaccaacgaccagaagaagcucauguccaacaacguccagaucguccgccagcaguccuacuccaucaugugcaucaucaaggaggagguccucgccuacgucguccagcucccccucuacggcgucaucgacacccccugcuggaagcuccacaccuccccccucugcaccaccaacaccaaggagggcuccaacaucugccucacccgcaccgaccgcggcugguacugcgacaacgccggcuccgucuccuucuucccccaggccgagaccugcaagguccaguccaaccgcgucuucugcgacaccaugaacucccucacccuccccuccgaggucaaccucugcaacaucgacaucuucaaccccaaguacgacugcaagaucaugaccuccaagaccgacgucuccuccuccgucaucaccucccucggcgccaucgucuccugcuacggcaagaccaagugcaccgccuccaacaagaaccgcggcaucaucaagaccuucuccaacggcugcgacuacgucuccaacaagggcgucgacaccgucuccgucggcaacacccucuacugcgucaacaagcaggagggccagucccucuacgucaagggcgagcccaucaucaacuucuacgacccccucgucuuccccuccgacgaguucgacgccuccaucucccaggucaacgagaagaucaaccagucccucgccuucauccgcaaguccgacgagcuccuccacaacgucaacgucggcaaguccaccaccaacaucaugaucaccaccaucaucaucgucaucaucgucauccuccuccuccucaucgccgucggccucuuccucuacugcaaggcccgcugaggacuagugaagggaacacccaaauuuaauucagccuuaagcacaauuaauuaagagugaaacguaauuguacaagcaguuggucacccaccauagggcaugaucaacaccgcaaccuuuccuuuuucccccagugauucugaaaaaccccucuucccuucagcuugcuuagauguuccaaauuuaguaagcuuaaggcggccuacagaagaaaaagaaaaaaaaggccacaaaaguucccucucacuuucaguaaauaaaauaaaagcagcaacagaaauaaagaaauaaaugaaauucaaaaugaaauaaauauuguguugugcagcauuaaaaaaucaauaaaaauuaaaaaugagcaagaucuaaaaaaaaaaaaaaaaaaaaaaaaaaaaaaaaaaaaaaaaaaaaaaaaaaaaaaaaaaaaaaaaugcaucccccccccccccccccccccccccccccccaaaggcucuuuucagagccaccagaauu

SEQ ID NO: 15933 - RNA, 2214 nt, Artificial Sequence
  mRNA product Design d-3 comprising derived and/or modified sequence from HRSV(Memphis-37)__AIY60640.1__F-del_DSCav1_mut3 (opt3)
gggagagggcgcuuggcuugcaaggacccugagcugcggcauugaagcacacccaacccaacucgacugaagucagccucacugaaccggaucugagaaucuucucucucugggcuugccagggcucuccgaaccuagcuagcauccucuucaauuccaacuagaaagcuuaccauggagcugcccauccucaagaccaacgccauuacaacuauacuugcugcagugacgcugugcuucgccagcucccagaauaucaccgaagaguuuuaccaaucuacauguucagcggucaguaaaggcuauuugggggcuuuaagaacuggaugguacaccagcguuauuacaaucgaacuguccaacauuaaggagaucaaaugcaaugguaccgacgccaaggugaaacuaauaaagcaggaacucgauaaguauaaaaacgcaguaacugaccugcagcuucugaugcagucuacuccugccgcuggcucggggucagcaaucuguagcggaauugccgugugcaaggucuugcaccucgagggcgaggugaauaaaaucaagaacgcucugcugaguaccaauaaagccguugugucccucucuaacggugucagcguguuaacguucaagguacuggaucuuaagaauuacauugacaaacaauugcugccaauccuaaacaagcaguccuguucaauaccgaauauugaaacuguuaucgaguuucagcagaaaaacaauaggcuccuggaaauuacccgggaguucagugugaacgcgggggucacaacucccgugagcaccuauaugcuuacaaauucugagcuguugucccucaucaacgauaugccuaucaccaacgaccaaaagaaacugaugucaaauaacgugcagauuguccgccagcagagcuacaguauaaugugcaucauuaaggaagagguuuuagcauaugugguacaacugccacucuacggagugaucgauacgcccuguuggaaacuucauacuucuccucugugcacaaccaauacuaaggaaggcuccaacauauguuugacacgaaccgaccguggcugguacugcgauaaugccgggagcgucucguuuuucccacaggcugagacguguaaggugcagucuaacagaguuuucugcgacaccaugaacucccuaacacugcccucagaagugaaucucugcaauauugauaucuucaacccuaaauaugacuguaagaucaugacaaguaaaaccgaugucagcuccucugugauuacaagccugggagccaucguaucaugcuacgguaagacuaaauguaccgcaaguaauaagaacaggggcauuauaaagacauuuuccaaugggugcgacuauguuagcaacaaaggaguggacaccgucucugugggcaauacucuuuacugugucaacaagcaagagggucagucacuguaugugaaaggggagccaaucauuaacuucuacgauccguugguuuuucccagugacgaauuugaugcuagcaucucccaggugaaugagaagaucaaccagucucucgccuuuauucggaaaucggacgaacuguuacacaauguaaacgucggaaagagcacgacaaauauaaugaucaccacuauuaucauugugaucauaguuauccugcuacuccugauugcggugggccuuuucuuguauugcaaggcccgcugaggacuagugaagggaacacccaaauuuaauucagccuuaagcacaauuaauuaagagugaaacguaauuguacaagcaguuggucacccaccauagggcaugaucaacaccgcaaccuuuccuuuuucccccagugauucugaaaaaccccucuucccuucagcuugcuuagauguuccaaauuuaguaagcuuaaggcggccuacagaagaaaaagaaaaaaaaggccacaaaaguucccucucacuuucaguaaauaaaauaaaagcagcaacagaaauaaagaaauaaaugaaauucaaaaugaaauaaauauuguguugugcagcauuaaaaaaucaauaaaaauuaaaaaugagcaagaucuaaaaaaaaaaaaaaaaaaaaaaaaaaaaaaaaaaaaaaaaaaaaaaaaaaaaaaaaaaaaaaaaugcaucccccccccccccccccccccccccccccccaaaggcucuuuucagagccaccagaauu

SEQ ID NO: 15934 - RNA, 2214 nt, Artificial Sequence
  mRNA product Design d-3 comprising derived and/or modified sequence from HRSV(Memphis-37)__AIY60640.1__F-del_DSCav1_mut3 (opt4)
gggagagggcgcuuggcuugcaaggacccugagcugcggcauugaagcacacccaacccaacucgacugaagucagccucacugaaccggaucugagaaucuucucucucugggcuugccagggcucuccgaaccuagcuagcauccucuucaauuccaacuagaaagcuuaccauggagcugcccauccugaagaccaacgccaucaccaccauccuggccgccgugacccugugcuucgccagcagccagaacaucaccgaggaguucuaccagagcaccugcagcgccgugagcaagggcuaccugggcgcccugagaaccggcugguacaccagcgugaucaccaucgagcugagcaacaucaaggagaucaagugcaacggcaccgacgccaaggugaagcugaucaagcaggagcuggacaaguacaagaacgccgugaccgaccugcagcugcugaugcagagcacccccgccgccggcagcggcagcgccaucugcagcggcaucgccgugugcaaggugcugcaccuggagggcgaggugaacaagaucaagaacgcccugcugagcaccaacaaggccguggugagccugagcaacggcgugagcgugcugaccuucaaggugcuggaccugaagaacuacaucgacaagcagcugcugcccauccugaacaagcagagcugcagcauccccaacaucgagaccgugaucgaguuccagcagaagaacaacagacugcuggagaucaccagagaguucagcgugaacgccggcgugaccacccccgugagcaccuacaugcugaccaacagcgagcugcugagccugaucaacgacaugcccaucaccaacgaccagaagaagcugaugagcaacaacgugcagaucgugagacagcagagcuacagcaucaugugcaucaucaaggaggaggugcuggccuacguggugcagcugccccuguacggcgugaucgacacccccugcuggaagcugcacaccagcccccugugcaccaccaacaccaaggagggcagcaacaucugccugaccagaaccgacagaggcugguacugcgacaacgccggcagcgugagcuucuucccccaggccgagaccugcaaggugcagagcaacagaguguucugcgacaccaugaacagccugacccugcccagcgaggugaaccugugcaacaucgacaucuucaaccccaaguacgacugcaagaucaugaccagcaagaccgacgugagcagcagcgugaucaccagccugggcgccaucgugagcugcuacggcaagaccaagugcaccgccagcaacaagaacagaggcaucaucaagaccuucagcaacggcugcgacuacgugagcaacaagggcguggacaccgugagcgugggcaacacccuguacugcgugaacaagcaggagggccagagccuguacgugaagggcgagcccaucaucaacuucuacgacccccugguguuccccagcgacgaguucgacgccagcaucagccaggugaacgagaagaucaaccagagccuggccuucaucagaaagagcgacgagcugcugcacaacgugaacgugggcaagagcaccaccaacaucaugaucaccaccaucaucaucgugaucaucgugauccugcugcugcugaucgccgugggccuguuccuguacugcaaggccagaugaggacuagugaagggaacacccaaauuuaauucagccuuaagcacaauuaauuaagagugaaacguaauuguacaagcaguuggucacccaccauagggcaugaucaacaccgcaaccuuuccuuuuucccccagugauucugaaaaaccccucuucccuucagcuugcuuagauguuccaaauuuaguaagcuuaaggcggccuacagaagaaaaagaaaaaaaaggccacaaaaguucccucucacuuucaguaaauaaaauaaaagcagcaacagaaauaaagaaauaaaugaaauucaaaaugaaauaaauauuguguugugcagcauuaaaaaaucaauaaaaauuaaaaaugagcaagaucuaaaaaaaaaaaaaaaaaaaaaaaaaaaaaaaaaaaaaaaaaaaaaaaaaaaaaaaaaaaaaaaaugcaucccccccccccccccccccccccccccccccaaaggcucuuuucagagccaccagaauu

SEQ ID NO: 15935 - RNA, 2214 nt, Artificial Sequence
  mRNA product Design d-3 comprising derived and/or modified sequence from HRSV(Memphis-37)__AIY60640.1__F-del_DSCav1_mut3 (opt5)
gggagagggcgcuuggcuugcaaggacccugagcugcggcauugaagcacacccaacccaacucgacugaagucagccucacugaaccggaucugagaaucuucucucucugggcuugccagggcucuccgaaccuagcuagcauccucuucaauuccaacuagaaagcuuaccauggagcugcccauccucaagaccaacgccauuacaacgauccuggcugccgugacccuuugcuucgcgagcucccagaauauuacagaagaguuuuaccaaucuaccuguagcgcugucuccaaaggcuaucugggggcccucagaacaggaugguacaccucuguuaucacaauugaacugagcaacaucaaggagaucaaaugcaauggcaccgacgccaaggugaaacuuauuaagcaggaacuggauaaguauaaaaacgcugugacggaccuccagcugcugaugcaguccaccccugccgcugggucuggaagcgccaucuguuccggcauugcggucugcaaggugcuccaccuggagggggagguuaauaaaaucaagaacgcccuucugagcacaaauaaagcuguggucucucucuccaacggagugagcguucugaccuucaaggugcuugaucugaagaauuacauugacaaacaacuccugccgauccugaacaagcagucuuguuccauucccaauaucgaaacagucaucgaguuucagcagaaaaacaaucggcuccuggaaauuacccgcgaguucagcgugaacgccggcgugacgacaccugucucuaccuauaugcuuacaaauuccgagcugcucagccugaucaacgauaugcccauuaccaacgaccaaaagaaacuuauguccaauaacguucagaucgugagacagcagucuuacagcauuaugugcaucaucaaggaagaggugcuggcuuaugucgugcaacucccucuguacggcguuauugauacccccuguuggaaacugcauacauccccucucugcacgaccaauacaaaggaagggagcaacaucugucugacccggacagaccgcggaugguacugcgauaaugccggcucuguguccuuuuucccgcaggcggagaccuguaagguccagagcaacagaguguuuugcgacacgaugaacucucuuacacugcccagcgaaguuaaucucugcaauauugauaucuucaacccuaaauaugacuguaagauuaugaccuccaaaaccgaugugucuagcuccgucaucacaagccugggggccaucgugucuugcuacggaaagaccaaauguacagcuuccaauaagaaccggggcauuaucaagacguuuagcaaugggugcgacuaugucucuaacaaaggaguggacaccguuuccgugggcaauacacuuuacugugucaacaagcaagagggccagagccuguaugugaaaggggagcccauuaucaacuucuacgauccucucguuuuucccuccgacgaguucgaugccucuauuagccaggugaaugaaaagaucaaccagucccuggcuuuuauucgcaaaucugacgaacugcuccacaaugucaacgugggaaagagcaccacaaauaucaugaucaccacgauuaucauugugaucauuguuauccugcuucugcucaucgccgucggccuguuccuguauugcaaggccagaugaggacuagugaagggaacacccaaauuuaauucagccuuaagcacaauuaauuaagagugaaacguaauuguacaagcaguuggucacccaccauagggcaugaucaacaccgcaaccuuuccuuuuucccccagugauucugaaaaaccccucuucccuucagcuugcuuagauguuccaaauuuaguaagcuuaaggcggccuacagaagaaaaagaaaaaaaaggccacaaaaguucccucucacuuucaguaaauaaaauaaaagcagcaacagaaauaaagaaauaaaugaaauucaaaaugaaauaaauauuguguugugcagcauuaaaaaaucaauaaaaauuaaaaaugagcaagaucuaaaaaaaaaaaaaaaaaaaaaaaaaaaaaaaaaaaaaaaaaaaaaaaaaaaaaaaaaaaaaaaaugcaucccccccccccccccccccccccccccccccaaaggcucuuuucagagccaccagaauu

SEQ ID NO: 15936 - RNA, 2214 nt, Artificial Sequence
  mRNA product Design d-3 comprising derived and/or modified sequence from HRSV(Memphis-37)__AIY60640.1__F-del_DSCav1_mut3 (opt6)
gggagagggcgcuuggcuugcaaggacccugagcugcggcauugaagcacacccaacccaacucgacugaagucagccucacugaaccggaucugagaaucuucucucucugggcuugccagggcucuccgaaccuagcuagcauccucuucaauuccaacuagaaagcuuaccauggaacuacccauccuaaaaacaaaugccauaaccacaauacucgccgcuguaacacuauguuucgcuaguucacaaaacauuacagaagaauuuuaccaauccacaugcucagcaguaucaaaaggauaccuaggugcacuaagaacaggaugguacacaagcguaauuacaauagaauuauccaauauuaaagaaauaaaauguaacggcacugacgcuaaaguaaaauuaaucaaacaagaacuagacaaauacaaaaacgcaguaacagaccuacaauuacucaugcaauccacacccgcagcaggaucaggcucagccauaugcucagguauagcaguaugcaaaguacuccaccuugaaggagaaguaaacaaaauaaaaaacgcauuacuaucaacaaacaaagcaguaguaucacuaucaaacggagucucugucuuaaccuuuaaaguauuagauuuaaaaaacuacauagacaaacaacuauuaccaauucuaaauaaacaaucauguucuauaccaaauauagaaacaguaauagaauuucaacaaaaaaacaaccgauuacuagaaaucacaagagaauuuucugucaacgccggcguaaccaccccagucucaacauauaugcuaacaaauagugaacucuuauccuuaauaaacgacaugccaauaacaaaugaccaaaaaaaauuaauguccaauaacguacaaauagucagacaacagucauacucaauaauguguaucaucaaagaagaaguauuagcauacguaguucaacuaccccuauacggcguaauagacacaccauguuggaaacuacacacaucacccuuaugcacaaccaauaccaaagaaggaucuaacauaugccuaaccagaacagacagaggcugguacugcgacaacgcagguucagucucauucuucccacaagccgaaacaugcaaaguccaauccaacagaguauuuugcgacacuaugaacucacuaacucuaccuucagaagucaaccuuuguaacauagacauauuuaacccaaaauacgauuguaaaauaaugaccagcaaaacagacgucucaucaagcguaauaacaucacuuggcgcaauagucuccugcuacggaaaaacaaaaugcacagcauccaacaaaaacagaggcaucauaaaaaccuucuccaacggcugcgacuauguaagcaacaaaggugucgauacaguaucaguaggaaacacacuauacugcguaaacaaacaagaaggacaaucacucuacguaaaaggugaaccaaucauaaacuucuacgacccauuaguuuucccaucagacgaauuugaugccuccauaucacaaguaaaugaaaaaauaaaucaaucccuagcauucauacgaaaaucugaugaauuacuucacaaugucaacgucggaaaaucaaccacuaacauaaugauaacaacaauuauaauaguaauaauaguaauacuccuacuauuaauagccgucggucuuuuccuauacugcaaagcacgauaaggacuagugaagggaacacccaaauuuaauucagccuuaagcacaauuaauuaagagugaaacguaauuguacaagcaguuggucacccaccauagggcaugaucaacaccgcaaccuuuccuuuuucccccagugauucugaaaaaccccucuucccuucagcuugcuuagauguuccaaauuuaguaagcuuaaggcggccuacagaagaaaaagaaaaaaaaggccacaaaaguucccucucacuuucaguaaauaaaauaaaagcagcaacagaaauaaagaaauaaaugaaauucaaaaugaaauaaauauuguguugugcagcauuaaaaaaucaauaaaaauuaaaaaugagcaagaucuaaaaaaaaaaaaaaaaaaaaaaaaaaaaaaaaaaaaaaaaaaaaaaaaaaaaaaaaaaaaaaaaugcaucccccccccccccccccccccccccccccccaaaggcucuuuucagagccaccagaauu

SEQ ID NO: 15937 - RNA, 2214 nt, Artificial Sequence
  mRNA product Design d-3 comprising derived and/or modified sequence from HRSV(Memphis-37)__AIY60640.1__F-del_DSCav1_mut3 (opt11)
gggagagggcgcuuggcuugcaaggacccugagcugcggcauugaagcacacccaacccaacucgacugaagucagccucacugaaccggaucugagaaucuucucucucugggcuugccagggcucuccgaaccuagcuagcauccucuucaauuccaacuagaaagcuuaccauggaacuacccauccucaaaaccaacgccaucaccacaauccuagcugccgucacccuaugcuucgcaagcagccaaaacaucacagaagaauuuuaccaaucaaccugcuccgccgucuccaaaggguaccuaggugcccuccgcaccggcugguacacgucugucauaaccaucgaacucuccaacaucaaagaaaucaaauguaacggaacagacgcaaaagucaaacuaaucaaacaagaacuagacaaauacaaaaacgccguaaccgaccuccaacugcucaugcaauccacccccgcugccggcuccgggagcgcaaucugcucuggaaucgccguaugcaaaguccuccaccucgaaggagaaguaaacaaaaucaaaaacgcgcuccucaguaccaacaaagccgucgucucucuaucaaacggcguaucgguccucaccuucaaaguccucgaccuaaagaacuacauagacaaacaacuccuccccauccuaaacaaacaauccugcucaaucccaaacaucgaaaccgugaucgaguuccaacagaaaaacaaccgccuacucgaaaucacccgagaguucucagucaacgcaggagucaccacccccgucucaacauacaugcuuaccaacagcgaacuccuaucccucaucaacgacaugccaaucacaaacgaccaaaagaaacucaugagcaacaacguccagaucguaagacaacaaagcuacagcaucaugugcaucaucaaagaagaaguacuagcauacgucguccaacucccccucuacggcgucaucgacacccccugcuggaaacuccacaccucaccccucugcacaaccaacaccaaagaaggcuccaauaucugccucacacgcaccgaccgcggcugguacugcgacaacgccggcuccgucuccuucuucccucaagccgaaaccugcaaaguccaguccaacagagucuucugcgacaccaugaacucccuaacacuuccaucagaagucaaccuuuguaacaucgacaucuucaaucccaaauacgacuguaaaauaaugaccucaaaaacugacgugucaagcucaguuaucaccucccuaggggccaucgucuccugcuacggcaaaacaaaaugcaccgcauccaacaaaaaucgcggaaucaucaaaacauucuccaacggaugcgacuacgucucaaacaagggaguagauaccguaagcguuggcaacacccucuacugcguaaacaaacaagaaggccaaucacucuacgucaaaggcgaacccauaaucaacuucuacgacccccucgucuucccuuccgaugaguucgacgccagcaucucccaagucaacgagaaaauaaaccagucacucgcauucauccgcaaaagcgacgaacuccuccacaacguaaacguaggcaaauccacaaccaauaucaugauaaccacaaucaucaucgugaucaucgucauccuccuccuccucauagcugucggacucuuccucuacuguaaagcacgcugaggacuagugaagggaacacccaaauuuaauucagccuuaagcacaauuaauuaagagugaaacguaauuguacaagcaguuggucacccaccauagggcaugaucaacaccgcaaccuuuccuuuuucccccagugauucugaaaaaccccucuucccuucagcuugcuuagauguuccaaauuuaguaagcuuaaggcggccuacagaagaaaaagaaaaaaaaggccacaaaaguucccucucacuuucaguaaauaaaauaaaagcagcaacagaaauaaagaaauaaaugaaauucaaaaugaaauaaauauuguguugugcagcauuaaaaaaucaauaaaaauuaaaaaugagcaagaucuaaaaaaaaaaaaaaaaaaaaaaaaaaaaaaaaaaaaaaaaaaaaaaaaaaaaaaaaaaaaaaaaugcaucccccccccccccccccccccccccccccccaaaggcucuuuucagagccaccagaauu

SEQ ID NO: 15938 - RNA, 1897 nt, Artificial Sequence
  mRNA product Design d-4 comprising derived and/or modified sequence from HRSV(Memphis-37)__AIY60640.1__F-del_DSCav1_mut3 (opt1)
gggagagucccgcagucggcguccagcggcucugcuuguucgugugugugucguugcaggccuuauucaagcuuaccauggagcugcccauccucaagaccaacgccaucaccacgauccuggccgcggugacccugugcuucgccagcucccagaacaucaccgaggaguucuaccagagcacgugcuccgccgucagcaagggcuaccucggcgcccugcgcaccgggugguacaccagcgugaucaccaucgagcuguccaacaucaaggagaucaagugcaacggcaccgacgccaaggugaagcucaucaagcaggagcuggacaaguacaagaacgcggucacggaccugcagcuccugaugcagagcaccccggccgccggcuccgggagcgcgaucugcuccggcaucgccgucugcaaggugcugcaccucgagggcgaggugaacaagaucaagaacgcccugcuguccaccaacaaggccgucgugagccucuccaacggggugagcguccugaccuucaaggugcuggaccucaagaacuacaucgacaagcagcugcugcccauccugaacaagcagagcugcuccauccccaacaucgagaccgucaucgaguuccagcagaagaacaaccgccuccuggagaucacgcgggaguucagcgugaacgcgggcgugaccacccccgucuccaccuacaugcugacgaacagcgagcuccugucccugaucaacgacaugccgaucaccaacgaccagaagaagcucaugagcaacaacgugcagaucgugcgccagcaguccuacagcaucaugugcaucaucaaggaggagguccuggccuacguggugcagcugccccucuacggggucaucgacacccccugcuggaagcugcacaccagcccccugugcacgaccaacaccaaggagggcuccaacaucugccucacccggacggaccgcgggugguacugcgacaacgccggcagcguguccuucuucccgcaggccgagaccugcaagguccagagcaaccggguguucugcgacaccaugaacucccugacccugcccagcgaggugaaccucugcaacaucgacaucuucaaccccaaguacgacugcaagaucaugacguccaagaccgacgucagcuccagcgugaucaccucccugggcgccaucgugagcugcuacgggaagaccaagugcacggcgagcaacaagaaccgcggcaucaucaagaccuucuccaacgggugcgacuacgucagcaacaagggcguggacaccguguccgucggcaacacccuguacugcgugaacaagcaggagggccagagccucuacgugaagggggagcccaucaucaacuucuacgacccgcuggucuuccccuccgacgaguucgacgccagcaucucccaggugaacgagaagaucaaccagagccuggccuucauccggaaguccgacgagcuccugcacaacgugaacgucggcaagagcaccacgaacaucaugaucaccaccaucaucaucgugaucaucgugauccugcugcuccugaucgccgucgggcuguuccucuacugcaaggcccgcugaggacuaguggaagcauuuuccuggcugauuaaaagaaauuacucagcuauggucaucuguuccuguuagaaggcuaugcagcauauuauauacuaugcgcauguuaugaaaugcauaauaaaaaauuuuaaaaaaucuaaaagaucuaaaaaaaaaaaaaaaaaaaaaaaaaaaaaaaaaaaaaaaaaaaaaaaaaaaaaaaaaaaaaaaaugcaucccccccccccccccccccccccccccccccaaaggcucuuuucagagccaccagaauu

SEQ ID NO: 15939 - RNA, 1897 nt, Artificial Sequence
  mRNA product Design d-4 comprising derived and/or modified sequence from HRSV(Memphis-37)__AIY60640.1__F-del_DSCav1_mut3 (opt1)
gggagagucccgcagucggcguccagcggcucugcuuguucgugugugugucguugcaggccuuauucaagcuuaccauggagcugcccauccucaagaccaacgccaucaccacgauccuggccgcggugacccugugcuucgccagcucccagaacaucaccgaggaguucuaccagagcacgugcuccgccgucagcaagggcuaccucggggcccugcgcaccggcugguacaccuccgugaucaccaucgagcugagcaacaucaaggagaucaagugcaacgggaccgacgccaaggugaagcucaucaagcaggagcuggacaaguacaagaacgcggucacggaccugcagcuccugaugcaguccaccccggccgccggcagcggguccgccaucugcagcggcaucgcggugugcaaggugcugcaccucgagggcgaggucaacaagaucaagaacgcccugcuguccaccaacaaggccguggugagccucuccaacggggucagcgugcugaccuucaaggugcuggaccucaagaacuacaucgacaagcagcugcugcccauccucaacaagcaguccugcagcauccccaacaucgagacggucaucgaguuccagcagaagaacaaccggcugcuggagaucacccgcgaguucuccgugaacgccggcgugaccacccccgucagcacguacaugcucaccaacuccgagcugcugagccucaucaacgacaugccgaucaccaacgaccagaagaagcugaugagcaacaacgugcagaucgugcggcagcaguccuacagcaucaugugcaucaucaaggaggagguccuggccuacguggugcagcucccccuguacggggucaucgacacccccugcuggaagcugcacacgagcccccucugcaccaccaacaccaaggagggcuccaacaucugccugacgcgcaccgaccgggggugguacugcgacaacgcgggcuccgugagcuucuucccgcaggccgagaccugcaaggugcaguccaaccgcgucuucugcgacaccaugaacagccugacgcuccccuccgaggugaaccugugcaacaucgacaucuucaaccccaaguacgacugcaagaucaugaccagcaagaccgacgucuccagcuccgugaucaccagccugggcgccaucguguccugcuacgggaagacgaagugcaccgccagcaacaagaaccggggcaucaucaagaccuucuccaacgggugcgacuacgucagcaacaagggcguggacaccguguccgucggcaacacgcucuacugcgugaacaagcaggaggggcagagccuguacgugaagggcgagcccaucaucaacuucuacgacccgcuggucuuccccagcgacgaguucgacgccuccaucagccaggugaacgagaagaucaaccagucccucgcguucauccgcaagagcgacgagcugcugcacaacgugaacgucgggaaguccaccaccaacaucaugaucaccaccaucaucaucgugaucaucgugauccuccugcugcucaucgccgucggccuguuccuguacugcaaggcccggugaggacuaguggaagcauuuuccuggcugauuaaaagaaauuacucagcuauggucaucuguuccuguuagaaggcuaugcagcauauuauauacuaugcgcauguuaugaaaugcauaauaaaaaauuuuaaaaaaucuaaaagaucuaaaaaaaaaaaaaaaaaaaaaaaaaaaaaaaaaaaaaaaaaaaaaaaaaaaaaaaaaaaaaaaaugcaucccccccccccccccccccccccccccccccaaaggcucuuuucagagccaccagaauu

SEQ ID NO: 15940 - RNA, 1897 nt, Artificial Sequence
  mRNA product Design d-4 comprising derived and/or modified sequence from HRSV(Memphis-37)__AIY60640.1__F-del_DSCav1_mut3 (opt2)
gggagagucccgcagucggcguccagcggcucugcuuguucgugugugugucguugcaggccuuauucaagcuuaccauggagcuccccauccucaagaccaacgccaucaccaccauccucgccgccgucacccucugcuucgccuccucccagaacaucaccgaggaguucuaccaguccaccugcuccgccgucuccaagggcuaccucggcgcccuccgcaccggcugguacaccuccgucaucaccaucgagcucuccaacaucaaggagaucaagugcaacggcaccgacgccaaggucaagcucaucaagcaggagcucgacaaguacaagaacgccgucaccgaccuccagcuccucaugcaguccacccccgccgccggcuccggcuccgccaucugcuccggcaucgccgucugcaagguccuccaccucgagggcgaggucaacaagaucaagaacgcccuccucuccaccaacaaggccgucgucucccucuccaacggcgucuccguccucaccuucaagguccucgaccucaagaacuacaucgacaagcagcuccuccccauccucaacaagcaguccugcuccauccccaacaucgagaccgucaucgaguuccagcagaagaacaaccgccuccucgagaucacccgcgaguucuccgucaacgccggcgucaccacccccgucuccaccuacaugcucaccaacuccgagcuccucucccucaucaacgacaugcccaucaccaacgaccagaagaagcucauguccaacaacguccagaucguccgccagcaguccuacuccaucaugugcaucaucaaggaggagguccucgccuacgucguccagcucccccucuacggcgucaucgacacccccugcuggaagcuccacaccuccccccucugcaccaccaacaccaaggagggcuccaacaucugccucacccgcaccgaccgcggcugguacugcgacaacgccggcuccgucuccuucuucccccaggccgagaccugcaagguccaguccaaccgcgucuucugcgacaccaugaacucccucacccuccccuccgaggucaaccucugcaacaucgacaucuucaaccccaaguacgacugcaagaucaugaccuccaagaccgacgucuccuccuccgucaucaccucccucggcgccaucgucuccugcuacggcaagaccaagugcaccgccuccaacaagaaccgcggcaucaucaagaccuucuccaacggcugcgacuacgucuccaacaagggcgucgacaccgucuccgucggcaacacccucuacugcgucaacaagcaggagggccagucccucuacgucaagggcgagcccaucaucaacuucuacgacccccucgucuuccccuccgacgaguucgacgccuccaucucccaggucaacgagaagaucaaccagucccucgccuucauccgcaaguccgacgagcuccuccacaacgucaacgucggcaaguccaccaccaacaucaugaucaccaccaucaucaucgucaucaucgucauccuccuccuccucaucgccgucggccucuuccucuacugcaaggcccgcugaggacuaguggaagcauuuuccuggcugauuaaaagaaauuacucagcuauggucaucuguuccuguuagaaggcuaugcagcauauuauauacuaugcgcauguuaugaaaugcauaauaaaaaauuuuaaaaaaucuaaaagaucuaaaaaaaaaaaaaaaaaaaaaaaaaaaaaaaaaaaaaaaaaaaaaaaaaaaaaaaaaaaaaaaaugcaucccccccccccccccccccccccccccccccaaaggcucuuuucagagccaccagaauu

SEQ ID NO: 15941 - RNA, 1897 nt, Artificial Sequence
  mRNA product Design d-4 comprising derived and/or modified sequence from HRSV(Memphis-37)__AIY60640.1__F-del_DSCav1_mut3 (opt3)
gggagagucccgcagucggcguccagcggcucugcuuguucgugugugugucguugcaggccuuauucaagcuuaccauggagcugcccauccucaagaccaacgccauuacaacuauacuugcugcagugacgcugugcuucgccagcucccagaauaucaccgaagaguuuuaccaaucuacauguucagcggucaguaaaggcuauuugggggcuuuaagaacuggaugguacaccagcguuauuacaaucgaacuguccaacauuaaggagaucaaaugcaaugguaccgacgccaaggugaaacuaauaaagcaggaacucgauaaguauaaaaacgcaguaacugaccugcagcuucugaugcagucuacuccugccgcuggcucggggucagcaaucuguagcggaauugccgugugcaaggucuugcaccucgagggcgaggugaauaaaaucaagaacgcucugcugaguaccaauaaagccguugugucccucucuaacggugucagcguguuaacguucaagguacuggaucuuaagaauuacauugacaaacaauugcugccaauccuaaacaagcaguccuguucaauaccgaauauugaaacuguuaucgaguuucagcagaaaaacaauaggcuccuggaaauuacccgggaguucagugugaacgcgggggucacaacucccgugagcaccuauaugcuuacaaauucugagcuguugucccucaucaacgauaugccuaucaccaacgaccaaaagaaacugaugucaaauaacgugcagauuguccgccagcagagcuacaguauaaugugcaucauuaaggaagagguuuuagcauaugugguacaacugccacucuacggagugaucgauacgcccuguuggaaacuucauacuucuccucugugcacaaccaauacuaaggaaggcuccaacauauguuugacacgaaccgaccguggcugguacugcgauaaugccgggagcgucucguuuuucccacaggcugagacguguaaggugcagucuaacagaguuuucugcgacaccaugaacucccuaacacugcccucagaagugaaucucugcaauauugauaucuucaacccuaaauaugacuguaagaucaugacaaguaaaaccgaugucagcuccucugugauuacaagccugggagccaucguaucaugcuacgguaagacuaaauguaccgcaaguaauaagaacaggggcauuauaaagacauuuuccaaugggugcgacuauguuagcaacaaaggaguggacaccgucucugugggcaauacucuuuacugugucaacaagcaagagggucagucacuguaugugaaaggggagccaaucauuaacuucuacgauccguugguuuuucccagugacgaauuugaugcuagcaucucccaggugaaugagaagaucaaccagucucucgccuuuauucggaaaucggacgaacuguuacacaauguaaacgucggaaagagcacgacaaauauaaugaucaccacuauuaucauugugaucauaguuauccugcuacuccugauugcggugggccuuuucuuguauugcaaggcccgcugaggacuaguggaagcauuuuccuggcugauuaaaagaaauuacucagcuauggucaucuguuccuguuagaaggcuaugcagcauauuauauacuaugcgcauguuaugaaaugcauaauaaaaaauuuuaaaaaaucuaaaagaucuaaaaaaaaaaaaaaaaaaaaaaaaaaaaaaaaaaaaaaaaaaaaaaaaaaaaaaaaaaaaaaaaugcaucccccccccccccccccccccccccccccccaaaggcucuuuucagagccaccagaauu

SEQ ID NO: 15942 - RNA, 1897 nt, Artificial Sequence
  mRNA product Design d-4 comprising derived and/or modified sequence from HRSV(Memphis-37)__AIY60640.1__F-del_DSCav1_mut3 (opt4)
gggagagucccgcagucggcguccagcggcucugcuuguucgugugugugucguugcaggccuuauucaagcuuaccauggagcugcccauccugaagaccaacgccaucaccaccauccuggccgccgugacccugugcuucgccagcagccagaacaucaccgaggaguucuaccagagcaccugcagcgccgugagcaagggcuaccugggcgcccugagaaccggcugguacaccagcgugaucaccaucgagcugagcaacaucaaggagaucaagugcaacggcaccgacgccaaggugaagcugaucaagcaggagcuggacaaguacaagaacgccgugaccgaccugcagcugcugaugcagagcacccccgccgccggcagcggcagcgccaucugcagcggcaucgccgugugcaaggugcugcaccuggagggcgaggugaacaagaucaagaacgcccugcugagcaccaacaaggccguggugagccugagcaacggcgugagcgugcugaccuucaaggugcuggaccugaagaacuacaucgacaagcagcugcugcccauccugaacaagcagagcugcagcauccccaacaucgagaccgugaucgaguuccagcagaagaacaacagacugcuggagaucaccagagaguucagcgugaacgccggcgugaccacccccgugagcaccuacaugcugaccaacagcgagcugcugagccugaucaacgacaugcccaucaccaacgaccagaagaagcugaugagcaacaacgugcagaucgugagacagcagagcuacagcaucaugugcaucaucaaggaggaggugcuggccuacguggugcagcugccccuguacggcgugaucgacacccccugcuggaagcugcacaccagcccccugugcaccaccaacaccaaggagggcagcaacaucugccugaccagaaccgacagaggcugguacugcgacaacgccggcagcgugagcuucuucccccaggccgagaccugcaaggugcagagcaacagaguguucugcgacaccaugaacagccugacccugcccagcgaggugaaccugugcaacaucgacaucuucaaccccaaguacgacugcaagaucaugaccagcaagaccgacgugagcagcagcgugaucaccagccugggcgccaucgugagcugcuacggcaagaccaagugcaccgccagcaacaagaacagaggcaucaucaagaccuucagcaacggcugcgacuacgugagcaacaagggcguggacaccgugagcgugggcaacacccuguacugcgugaacaagcaggagggccagagccuguacgugaagggcgagcccaucaucaacuucuacgacccccugguguuccccagcgacgaguucgacgccagcaucagccaggugaacgagaagaucaaccagagccuggccuucaucagaaagagcgacgagcugcugcacaacgugaacgugggcaagagcaccaccaacaucaugaucaccaccaucaucaucgugaucaucgugauccugcugcugcugaucgccgugggccuguuccuguacugcaaggccagaugaggacuaguggaagcauuuuccuggcugauuaaaagaaauuacucagcuauggucaucuguuccuguuagaaggcuaugcagcauauuauauacuaugcgcauguuaugaaaugcauaauaaaaaauuuuaaaaaaucuaaaagaucuaaaaaaaaaaaaaaaaaaaaaaaaaaaaaaaaaaaaaaaaaaaaaaaaaaaaaaaaaaaaaaaaugcaucccccccccccccccccccccccccccccccaaaggcucuuuucagagccaccagaauu

SEQ ID NO: 15943 - RNA, 1897 nt, Artificial Sequence
  mRNA product Design d-4 comprising derived and/or modified sequence from HRSV(Memphis-37)__AIY60640.1__F-del_DSCav1_mut3 (opt5)
gggagagucccgcagucggcguccagcggcucugcuuguucgugugugugucguugcaggccuuauucaagcuuaccauggagcugcccauccucaagaccaacgccauuacaacgauccuggcugccgugacccuuugcuucgcgagcucccagaauauuacagaagaguuuuaccaaucuaccuguagcgcugucuccaaaggcuaucugggggcccucagaacaggaugguacaccucuguuaucacaauugaacugagcaacaucaaggagaucaaaugcaauggcaccgacgccaaggugaaacuuauuaagcaggaacuggauaaguauaaaaacgcugugacggaccuccagcugcugaugcaguccaccccugccgcugggucuggaagcgccaucuguuccggcauugcggucugcaaggugcuccaccuggagggggagguuaauaaaaucaagaacgcccuucugagcacaaauaaagcuguggucucucucuccaacggagugagcguucugaccuucaaggugcuugaucugaagaauuacauugacaaacaacuccugccgauccugaacaagcagucuuguuccauucccaauaucgaaacagucaucgaguuucagcagaaaaacaaucggcuccuggaaauuacccgcgaguucagcgugaacgccggcgugacgacaccugucucuaccuauaugcuuacaaauuccgagcugcucagccugaucaacgauaugcccauuaccaacgaccaaaagaaacuuauguccaauaacguucagaucgugagacagcagucuuacagcauuaugugcaucaucaaggaagaggugcuggcuuaugucgugcaacucccucuguacggcguuauugauacccccuguuggaaacugcauacauccccucucugcacgaccaauacaaaggaagggagcaacaucugucugacccggacagaccgcggaugguacugcgauaaugccggcucuguguccuuuuucccgcaggcggagaccuguaagguccagagcaacagaguguuuugcgacacgaugaacucucuuacacugcccagcgaaguuaaucucugcaauauugauaucuucaacccuaaauaugacuguaagauuaugaccuccaaaaccgaugugucuagcuccgucaucacaagccugggggccaucgugucuugcuacggaaagaccaaauguacagcuuccaauaagaaccggggcauuaucaagacguuuagcaaugggugcgacuaugucucuaacaaaggaguggacaccguuuccgugggcaauacacuuuacugugucaacaagcaagagggccagagccuguaugugaaaggggagcccauuaucaacuucuacgauccucucguuuuucccuccgacgaguucgaugccucuauuagccaggugaaugaaaagaucaaccagucccuggcuuuuauucgcaaaucugacgaacugcuccacaaugucaacgugggaaagagcaccacaaauaucaugaucaccacgauuaucauugugaucauuguuauccugcuucugcucaucgccgucggccuguuccuguauugcaaggccagaugaggacuaguggaagcauuuuccuggcugauuaaaagaaauuacucagcuauggucaucuguuccuguuagaaggcuaugcagcauauuauauacuaugcgcauguuaugaaaugcauaauaaaaaauuuuaaaaaaucuaaaagaucuaaaaaaaaaaaaaaaaaaaaaaaaaaaaaaaaaaaaaaaaaaaaaaaaaaaaaaaaaaaaaaaaugcaucccccccccccccccccccccccccccccccaaaggcucuuuucagagccaccagaauu

SEQ ID NO: 15944 - RNA, 1897 nt, Artificial Sequence
  mRNA product Design d-4 comprising derived and/or modified sequence from HRSV(Memphis-37)__AIY60640.1__F-del_DSCav1_mut3 (opt6)
gggagagucccgcagucggcguccagcggcucugcuuguucgugugugugucguugcaggccuuauucaagcuuaccauggaacuacccauccuaaaaacaaaugccauaaccacaauacucgccgcuguaacacuauguuucgcuaguucacaaaacauuacagaagaauuuuaccaauccacaugcucagcaguaucaaaaggauaccuaggugcacuaagaacaggaugguacacaagcguaauuacaauagaauuauccaauauuaaagaaauaaaauguaacggcacugacgcuaaaguaaaauuaaucaaacaagaacuagacaaauacaaaaacgcaguaacagaccuacaauuacucaugcaauccacacccgcagcaggaucaggcucagccauaugcucagguauagcaguaugcaaaguacuccaccuugaaggagaaguaaacaaaauaaaaaacgcauuacuaucaacaaacaaagcaguaguaucacuaucaaacggagucucugucuuaaccuuuaaaguauuagauuuaaaaaacuacauagacaaacaacuauuaccaauucuaaauaaacaaucauguucuauaccaaauauagaaacaguaauagaauuucaacaaaaaaacaaccgauuacuagaaaucacaagagaauuuucugucaacgccggcguaaccaccccagucucaacauauaugcuaacaaauagugaacucuuauccuuaauaaacgacaugccaauaacaaaugaccaaaaaaaauuaauguccaauaacguacaaauagucagacaacagucauacucaauaauguguaucaucaaagaagaaguauuagcauacguaguucaacuaccccuauacggcguaauagacacaccauguuggaaacuacacacaucacccuuaugcacaaccaauaccaaagaaggaucuaacauaugccuaaccagaacagacagaggcugguacugcgacaacgcagguucagucucauucuucccacaagccgaaacaugcaaaguccaauccaacagaguauuuugcgacacuaugaacucacuaacucuaccuucagaagucaaccuuuguaacauagacauauuuaacccaaaauacgauuguaaaauaaugaccagcaaaacagacgucucaucaagcguaauaacaucacuuggcgcaauagucuccugcuacggaaaaacaaaaugcacagcauccaacaaaaacagaggcaucauaaaaaccuucuccaacggcugcgacuauguaagcaacaaaggugucgauacaguaucaguaggaaacacacuauacugcguaaacaaacaagaaggacaaucacucuacguaaaaggugaaccaaucauaaacuucuacgacccauuaguuuucccaucagacgaauuugaugccuccauaucacaaguaaaugaaaaaauaaaucaaucccuagcauucauacgaaaaucugaugaauuacuucacaaugucaacgucggaaaaucaaccacuaacauaaugauaacaacaauuauaauaguaauaauaguaauacuccuacuauuaauagccgucggucuuuuccuauacugcaaagcacgauaaggacuaguggaagcauuuuccuggcugauuaaaagaaauuacucagcuauggucaucuguuccuguuagaaggcuaugcagcauauuauauacuaugcgcauguuaugaaaugcauaauaaaaaauuuuaaaaaaucuaaaagaucuaaaaaaaaaaaaaaaaaaaaaaaaaaaaaaaaaaaaaaaaaaaaaaaaaaaaaaaaaaaaaaaaugcaucccccccccccccccccccccccccccccccaaaggcucuuuucagagccaccagaauu

SEQ ID NO: 15945 - RNA, 1897 nt, Artificial Sequence
  mRNA product Design d-4 comprising derived and/or modified sequence from HRSV(Memphis-37)__AIY60640.1__F-del_DSCav1_mut3 (opt11)
gggagagucccgcagucggcguccagcggcucugcuuguucgugugugugucguugcaggccuuauucaagcuuaccauggaacuacccauccucaaaaccaacgccaucaccacaauccuagcugccgucacccuaugcuucgcaagcagccaaaacaucacagaagaauuuuaccaaucaaccugcuccgccgucuccaaaggguaccuaggugcccuccgcaccggcugguacacgucugucauaaccaucgaacucuccaacaucaaagaaaucaaauguaacggaacagacgcaaaagucaaacuaaucaaacaagaacuagacaaauacaaaaacgccguaaccgaccuccaacugcucaugcaauccacccccgcugccggcuccgggagcgcaaucugcucuggaaucgccguaugcaaaguccuccaccucgaaggagaaguaaacaaaaucaaaaacgcgcuccucaguaccaacaaagccgucgucucucuaucaaacggcguaucgguccucaccuucaaaguccucgaccuaaagaacuacauagacaaacaacuccuccccauccuaaacaaacaauccugcucaaucccaaacaucgaaaccgugaucgaguuccaacagaaaaacaaccgccuacucgaaaucacccgagaguucucagucaacgcaggagucaccacccccgucucaacauacaugcuuaccaacagcgaacuccuaucccucaucaacgacaugccaaucacaaacgaccaaaagaaacucaugagcaacaacguccagaucguaagacaacaaagcuacagcaucaugugcaucaucaaagaagaaguacuagcauacgucguccaacucccccucuacggcgucaucgacacccccugcuggaaacuccacaccucaccccucugcacaaccaacaccaaagaaggcuccaauaucugccucacacgcaccgaccgcggcugguacugcgacaacgccggcuccgucuccuucuucccucaagccgaaaccugcaaaguccaguccaacagagucuucugcgacaccaugaacucccuaacacuuccaucagaagucaaccuuuguaacaucgacaucuucaaucccaaauacgacuguaaaauaaugaccucaaaaacugacgugucaagcucaguuaucaccucccuaggggccaucgucuccugcuacggcaaaacaaaaugcaccgcauccaacaaaaaucgcggaaucaucaaaacauucuccaacggaugcgacuacgucucaaacaagggaguagauaccguaagcguuggcaacacccucuacugcguaaacaaacaagaaggccaaucacucuacgucaaaggcgaacccauaaucaacuucuacgacccccucgucuucccuuccgaugaguucgacgccagcaucucccaagucaacgagaaaauaaaccagucacucgcauucauccgcaaaagcgacgaacuccuccacaacguaaacguaggcaaauccacaaccaauaucaugauaaccacaaucaucaucgugaucaucgucauccuccuccuccucauagcugucggacucuuccucuacuguaaagcacgcugaggacuaguggaagcauuuuccuggcugauuaaaagaaauuacucagcuauggucaucuguuccuguuagaaggcuaugcagcauauuauauacuaugcgcauguuaugaaaugcauaauaaaaaauuuuaaaaaaucuaaaagaucuaaaaaaaaaaaaaaaaaaaaaaaaaaaaaaaaaaaaaaaaaaaaaaaaaaaaaaaaaaaaaaaaugcaucccccccccccccccccccccccccccccccaaaggcucuuuucagagccaccagaauu

SEQ ID NO: 15946 - RNA, 1994 nt, Artificial Sequence
  mRNA product Design d-5 comprising derived and/or modified sequence from HRSV(Memphis-37)__AIY60640.1__F-del_DSCav1_mut3 (opt1)
gggagagggcgcuuggcuugcaaggacccugagcugcggcauugaagcacacccaacccaacucgacugaagucagccucacugaaccggaucugagaaucuucucucucugggcuugccagggcucuccgaaccuagcuagcauccucuucaauuccaacuagaaagcuuaccauggagcugcccauccucaagaccaacgccaucaccacgauccuggccgcggugacccugugcuucgccagcucccagaacaucaccgaggaguucuaccagagcacgugcuccgccgucagcaagggcuaccucggcgcccugcgcaccgggugguacaccagcgugaucaccaucgagcuguccaacaucaaggagaucaagugcaacggcaccgacgccaaggugaagcucaucaagcaggagcuggacaaguacaagaacgcggucacggaccugcagcuccugaugcagagcaccccggccgccggcuccgggagcgcgaucugcuccggcaucgccgucugcaaggugcugcaccucgagggcgaggugaacaagaucaagaacgcccugcuguccaccaacaaggccgucgugagccucuccaacggggugagcguccugaccuucaaggugcuggaccucaagaacuacaucgacaagcagcugcugcccauccugaacaagcagagcugcuccauccccaacaucgagaccgucaucgaguuccagcagaagaacaaccgccuccuggagaucacgcgggaguucagcgugaacgcgggcgugaccacccccgucuccaccuacaugcugacgaacagcgagcuccugucccugaucaacgacaugccgaucaccaacgaccagaagaagcucaugagcaacaacgugcagaucgugcgccagcaguccuacagcaucaugugcaucaucaaggaggagguccuggccuacguggugcagcugccccucuacggggucaucgacacccccugcuggaagcugcacaccagcccccugugcacgaccaacaccaaggagggcuccaacaucugccucacccggacggaccgcgggugguacugcgacaacgccggcagcguguccuucuucccgcaggccgagaccugcaagguccagagcaaccggguguucugcgacaccaugaacucccugacccugcccagcgaggugaaccucugcaacaucgacaucuucaaccccaaguacgacugcaagaucaugacguccaagaccgacgucagcuccagcgugaucaccucccugggcgccaucgugagcugcuacgggaagaccaagugcacggcgagcaacaagaaccgcggcaucaucaagaccuucuccaacgggugcgacuacgucagcaacaagggcguggacaccguguccgucggcaacacccuguacugcgugaacaagcaggagggccagagccucuacgugaagggggagcccaucaucaacuucuacgacccgcuggucuuccccuccgacgaguucgacgccagcaucucccaggugaacgagaagaucaaccagagccuggccuucauccggaaguccgacgagcuccugcacaacgugaacgucggcaagagcaccacgaacaucaugaucaccaccaucaucaucgugaucaucgugauccugcugcuccugaucgccgucgggcuguuccucuacugcaaggcccgcugaggacuaguggaagcauuuuccuggcugauuaaaagaaauuacucagcuauggucaucuguuccuguuagaaggcuaugcagcauauuauauacuaugcgcauguuaugaaaugcauaauaaaaaauuuuaaaaaaucuaaaagaucuaaaaaaaaaaaaaaaaaaaaaaaaaaaaaaaaaaaaaaaaaaaaaaaaaaaaaaaaaaaaaaaaugcaucccccccccccccccccccccccccccccccaaaggcucuuuucagagccaccagaauu

SEQ ID NO: 15947 - RNA, 1994 nt, Artificial Sequence
  mRNA product Design d-5 comprising derived and/or modified sequence from HRSV(Memphis-37)__AIY60640.1__F-del_DSCav1_mut3 (opt1)
gggagagggcgcuuggcuugcaaggacccugagcugcggcauugaagcacacccaacccaacucgacugaagucagccucacugaaccggaucugagaaucuucucucucugggcuugccagggcucuccgaaccuagcuagcauccucuucaauuccaacuagaaagcuuaccauggagcugcccauccucaagaccaacgccaucaccacgauccuggccgcggugacccugugcuucgccagcucccagaacaucaccgaggaguucuaccagagcacgugcuccgccgucagcaagggcuaccucggggcccugcgcaccggcugguacaccuccgugaucaccaucgagcugagcaacaucaaggagaucaagugcaacgggaccgacgccaaggugaagcucaucaagcaggagcuggacaaguacaagaacgcggucacggaccugcagcuccugaugcaguccaccccggccgccggcagcggguccgccaucugcagcggcaucgcggugugcaaggugcugcaccucgagggcgaggucaacaagaucaagaacgcccugcuguccaccaacaaggccguggugagccucuccaacggggucagcgugcugaccuucaaggugcuggaccucaagaacuacaucgacaagcagcugcugcccauccucaacaagcaguccugcagcauccccaacaucgagacggucaucgaguuccagcagaagaacaaccggcugcuggagaucacccgcgaguucuccgugaacgccggcgugaccacccccgucagcacguacaugcucaccaacuccgagcugcugagccucaucaacgacaugccgaucaccaacgaccagaagaagcugaugagcaacaacgugcagaucgugcggcagcaguccuacagcaucaugugcaucaucaaggaggagguccuggccuacguggugcagcucccccuguacggggucaucgacacccccugcuggaagcugcacacgagcccccucugcaccaccaacaccaaggagggcuccaacaucugccugacgcgcaccgaccgggggugguacugcgacaacgcgggcuccgugagcuucuucccgcaggccgagaccugcaaggugcaguccaaccgcgucuucugcgacaccaugaacagccugacgcuccccuccgaggugaaccugugcaacaucgacaucuucaaccccaaguacgacugcaagaucaugaccagcaagaccgacgucuccagcuccgugaucaccagccugggcgccaucguguccugcuacgggaagacgaagugcaccgccagcaacaagaaccggggcaucaucaagaccuucuccaacgggugcgacuacgucagcaacaagggcguggacaccguguccgucggcaacacgcucuacugcgugaacaagcaggaggggcagagccuguacgugaagggcgagcccaucaucaacuucuacgacccgcuggucuuccccagcgacgaguucgacgccuccaucagccaggugaacgagaagaucaaccagucccucgcguucauccgcaagagcgacgagcugcugcacaacgugaacgucgggaaguccaccaccaacaucaugaucaccaccaucaucaucgugaucaucgugauccuccugcugcucaucgccgucggccuguuccuguacugcaaggcccggugaggacuaguggaagcauuuuccuggcugauuaaaagaaauuacucagcuauggucaucuguuccuguuagaaggcuaugcagcauauuauauacuaugcgcauguuaugaaaugcauaauaaaaaauuuuaaaaaaucuaaaagaucuaaaaaaaaaaaaaaaaaaaaaaaaaaaaaaaaaaaaaaaaaaaaaaaaaaaaaaaaaaaaaaaaugcaucccccccccccccccccccccccccccccccaaaggcucuuuucagagccaccagaauu

SEQ ID NO: 15948 - RNA, 1994 nt, Artificial Sequence
  mRNA product Design d-5 comprising derived and/or modified sequence from HRSV(Memphis-37)__AIY60640.1__F-del_DSCav1_mut3 (opt2)
gggagagggcgcuuggcuugcaaggacccugagcugcggcauugaagcacacccaacccaacucgacugaagucagccucacugaaccggaucugagaaucuucucucucugggcuugccagggcucuccgaaccuagcuagcauccucuucaauuccaacuagaaagcuuaccauggagcuccccauccucaagaccaacgccaucaccaccauccucgccgccgucacccucugcuucgccuccucccagaacaucaccgaggaguucuaccaguccaccugcuccgccgucuccaagggcuaccucggcgcccuccgcaccggcugguacaccuccgucaucaccaucgagcucuccaacaucaaggagaucaagugcaacggcaccgacgccaaggucaagcucaucaagcaggagcucgacaaguacaagaacgccgucaccgaccuccagcuccucaugcaguccacccccgccgccggcuccggcuccgccaucugcuccggcaucgccgucugcaagguccuccaccucgagggcgaggucaacaagaucaagaacgcccuccucuccaccaacaaggccgucgucucccucuccaacggcgucuccguccucaccuucaagguccucgaccucaagaacuacaucgacaagcagcuccuccccauccucaacaagcaguccugcuccauccccaacaucgagaccgucaucgaguuccagcagaagaacaaccgccuccucgagaucacccgcgaguucuccgucaacgccggcgucaccacccccgucuccaccuacaugcucaccaacuccgagcuccucucccucaucaacgacaugcccaucaccaacgaccagaagaagcucauguccaacaacguccagaucguccgccagcaguccuacuccaucaugugcaucaucaaggaggagguccucgccuacgucguccagcucccccucuacggcgucaucgacacccccugcuggaagcuccacaccuccccccucugcaccaccaacaccaaggagggcuccaacaucugccucacccgcaccgaccgcggcugguacugcgacaacgccggcuccgucuccuucuucccccaggccgagaccugcaagguccaguccaaccgcgucuucugcgacaccaugaacucccucacccuccccuccgaggucaaccucugcaacaucgacaucuucaaccccaaguacgacugcaagaucaugaccuccaagaccgacgucuccuccuccgucaucaccucccucggcgccaucgucuccugcuacggcaagaccaagugcaccgccuccaacaagaaccgcggcaucaucaagaccuucuccaacggcugcgacuacgucuccaacaagggcgucgacaccgucuccgucggcaacacccucuacugcgucaacaagcaggagggccagucccucuacgucaagggcgagcccaucaucaacuucuacgacccccucgucuuccccuccgacgaguucgacgccuccaucucccaggucaacgagaagaucaaccagucccucgccuucauccgcaaguccgacgagcuccuccacaacgucaacgucggcaaguccaccaccaacaucaugaucaccaccaucaucaucgucaucaucgucauccuccuccuccucaucgccgucggccucuuccucuacugcaaggcccgcugaggacuaguggaagcauuuuccuggcugauuaaaagaaauuacucagcuauggucaucuguuccuguuagaaggcuaugcagcauauuauauacuaugcgcauguuaugaaaugcauaauaaaaaauuuuaaaaaaucuaaaagaucuaaaaaaaaaaaaaaaaaaaaaaaaaaaaaaaaaaaaaaaaaaaaaaaaaaaaaaaaaaaaaaaaugcaucccccccccccccccccccccccccccccccaaaggcucuuuucagagccaccagaauu

SEQ ID NO: 15949 - RNA, 1994 nt, Artificial Sequence
  mRNA product Design d-5 comprising derived and/or modified sequence from HRSV(Memphis-37)__AIY60640.1__F-del_DSCav1_mut3 (opt3)
gggagagggcgcuuggcuugcaaggacccugagcugcggcauugaagcacacccaacccaacucgacugaagucagccucacugaaccggaucugagaaucuucucucucugggcuugccagggcucuccgaaccuagcuagcauccucuucaauuccaacuagaaagcuuaccauggagcugcccauccucaagaccaacgccauuacaacuauacuugcugcagugacgcugugcuucgccagcucccagaauaucaccgaagaguuuuaccaaucuacauguucagcggucaguaaaggcuauuugggggcuuuaagaacuggaugguacaccagcguuauuacaaucgaacuguccaacauuaaggagaucaaaugcaaugguaccgacgccaaggugaaacuaauaaagcaggaacucgauaaguauaaaaacgcaguaacugaccugcagcuucugaugcagucuacuccugccgcuggcucggggucagcaaucuguagcggaauugccgugugcaaggucuugcaccucgagggcgaggugaauaaaaucaagaacgcucugcugaguaccaauaaagccguugugucccucucuaacggugucagcguguuaacguucaagguacuggaucuuaagaauuacauugacaaacaauugcugccaauccuaaacaagcaguccuguucaauaccgaauauugaaacuguuaucgaguuucagcagaaaaacaauaggcuccuggaaauuacccgggaguucagugugaacgcgggggucacaacucccgugagcaccuauaugcuuacaaauucugagcuguugucccucaucaacgauaugccuaucaccaacgaccaaaagaaacugaugucaaauaacgugcagauuguccgccagcagagcuacaguauaaugugcaucauuaaggaagagguuuuagcauaugugguacaacugccacucuacggagugaucgauacgcccuguuggaaacuucauacuucuccucugugcacaaccaauacuaaggaaggcuccaacauauguuugacacgaaccgaccguggcugguacugcgauaaugccgggagcgucucguuuuucccacaggcugagacguguaaggugcagucuaacagaguuuucugcgacaccaugaacucccuaacacugcccucagaagugaaucucugcaauauugauaucuucaacccuaaauaugacuguaagaucaugacaaguaaaaccgaugucagcuccucugugauuacaagccugggagccaucguaucaugcuacgguaagacuaaauguaccgcaaguaauaagaacaggggcauuauaaagacauuuuccaaugggugcgacuauguuagcaacaaaggaguggacaccgucucugugggcaauacucuuuacugugucaacaagcaagagggucagucacuguaugugaaaggggagccaaucauuaacuucuacgauccguugguuuuucccagugacgaauuugaugcuagcaucucccaggugaaugagaagaucaaccagucucucgccuuuauucggaaaucggacgaacuguuacacaauguaaacgucggaaagagcacgacaaauauaaugaucaccacuauuaucauugugaucauaguuauccugcuacuccugauugcggugggccuuuucuuguauugcaaggcccgcugaggacuaguggaagcauuuuccuggcugauuaaaagaaauuacucagcuauggucaucuguuccuguuagaaggcuaugcagcauauuauauacuaugcgcauguuaugaaaugcauaauaaaaaauuuuaaaaaaucuaaaagaucuaaaaaaaaaaaaaaaaaaaaaaaaaaaaaaaaaaaaaaaaaaaaaaaaaaaaaaaaaaaaaaaaugcaucccccccccccccccccccccccccccccccaaaggcucuuuucagagccaccagaauu

SEQ ID NO: 15950 - RNA, 1994 nt, Artificial Sequence
  mRNA product Design d-5 comprising derived and/or modified sequence from HRSV(Memphis-37)__AIY60640.1__F-del_DSCav1_mut3 (opt4)
gggagagggcgcuuggcuugcaaggacccugagcugcggcauugaagcacacccaacccaacucgacugaagucagccucacugaaccggaucugagaaucuucucucucugggcuugccagggcucuccgaaccuagcuagcauccucuucaauuccaacuagaaagcuuaccauggagcugcccauccugaagaccaacgccaucaccaccauccuggccgccgugacccugugcuucgccagcagccagaacaucaccgaggaguucuaccagagcaccugcagcgccgugagcaagggcuaccugggcgcccugagaaccggcugguacaccagcgugaucaccaucgagcugagcaacaucaaggagaucaagugcaacggcaccgacgccaaggugaagcugaucaagcaggagcuggacaaguacaagaacgccgugaccgaccugcagcugcugaugcagagcacccccgccgccggcagcggcagcgccaucugcagcggcaucgccgugugcaaggugcugcaccuggagggcgaggugaacaagaucaagaacgcccugcugagcaccaacaaggccguggugagccugagcaacggcgugagcgugcugaccuucaaggugcuggaccugaagaacuacaucgacaagcagcugcugcccauccugaacaagcagagcugcagcauccccaacaucgagaccgugaucgaguuccagcagaagaacaacagacugcuggagaucaccagagaguucagcgugaacgccggcgugaccacccccgugagcaccuacaugcugaccaacagcgagcugcugagccugaucaacgacaugcccaucaccaacgaccagaagaagcugaugagcaacaacgugcagaucgugagacagcagagcuacagcaucaugugcaucaucaaggaggaggugcuggccuacguggugcagcugccccuguacggcgugaucgacacccccugcuggaagcugcacaccagcccccugugcaccaccaacaccaaggagggcagcaacaucugccugaccagaaccgacagaggcugguacugcgacaacgccggcagcgugagcuucuucccccaggccgagaccugcaaggugcagagcaacagaguguucugcgacaccaugaacagccugacccugcccagcgaggugaaccugugcaacaucgacaucuucaaccccaaguacgacugcaagaucaugaccagcaagaccgacgugagcagcagcgugaucaccagccugggcgccaucgugagcugcuacggcaagaccaagugcaccgccagcaacaagaacagaggcaucaucaagaccuucagcaacggcugcgacuacgugagcaacaagggcguggacaccgugagcgugggcaacacccuguacugcgugaacaagcaggagggccagagccuguacgugaagggcgagcccaucaucaacuucuacgacccccugguguuccccagcgacgaguucgacgccagcaucagccaggugaacgagaagaucaaccagagccuggccuucaucagaaagagcgacgagcugcugcacaacgugaacgugggcaagagcaccaccaacaucaugaucaccaccaucaucaucgugaucaucgugauccugcugcugcugaucgccgugggccuguuccuguacugcaaggccagaugaggacuaguggaagcauuuuccuggcugauuaaaagaaauuacucagcuauggucaucuguuccuguuagaaggcuaugcagcauauuauauacuaugcgcauguuaugaaaugcauaauaaaaaauuuuaaaaaaucuaaaagaucuaaaaaaaaaaaaaaaaaaaaaaaaaaaaaaaaaaaaaaaaaaaaaaaaaaaaaaaaaaaaaaaaugcaucccccccccccccccccccccccccccccccaaaggcucuuuucagagccaccagaauu

SEQ ID NO: 15951 - RNA, 1994 nt, Artificial Sequence
  mRNA product Design d-5 comprising derived and/or modified sequence from HRSV(Memphis-37)__AIY60640.1__F-del_DSCav1_mut3 (opt5)
gggagagggcgcuuggcuugcaaggacccugagcugcggcauugaagcacacccaacccaacucgacugaagucagccucacugaaccggaucugagaaucuucucucucugggcuugccagggcucuccgaaccuagcuagcauccucuucaauuccaacuagaaagcuuaccauggagcugcccauccucaagaccaacgccauuacaacgauccuggcugccgugacccuuugcuucgcgagcucccagaauauuacagaagaguuuuaccaaucuaccuguagcgcugucuccaaaggcuaucugggggcccucagaacaggaugguacaccucuguuaucacaauugaacugagcaacaucaaggagaucaaaugcaauggcaccgacgccaaggugaaacuuauuaagcaggaacuggauaaguauaaaaacgcugugacggaccuccagcugcugaugcaguccaccccugccgcugggucuggaagcgccaucuguuccggcauugcggucugcaaggugcuccaccuggagggggagguuaauaaaaucaagaacgcccuucugagcacaaauaaagcuguggucucucucuccaacggagugagcguucugaccuucaaggugcuugaucugaagaauuacauugacaaacaacuccugccgauccugaacaagcagucuuguuccauucccaauaucgaaacagucaucgaguuucagcagaaaaacaaucggcuccuggaaauuacccgcgaguucagcgugaacgccggcgugacgacaccugucucuaccuauaugcuuacaaauuccgagcugcucagccugaucaacgauaugcccauuaccaacgaccaaaagaaacuuauguccaauaacguucagaucgugagacagcagucuuacagcauuaugugcaucaucaaggaagaggugcuggcuuaugucgugcaacucccucuguacggcguuauugauacccccuguuggaaacugcauacauccccucucugcacgaccaauacaaaggaagggagcaacaucugucugacccggacagaccgcggaugguacugcgauaaugccggcucuguguccuuuuucccgcaggcggagaccuguaagguccagagcaacagaguguuuugcgacacgaugaacucucuuacacugcccagcgaaguuaaucucugcaauauugauaucuucaacccuaaauaugacuguaagauuaugaccuccaaaaccgaugugucuagcuccgucaucacaagccugggggccaucgugucuugcuacggaaagaccaaauguacagcuuccaauaagaaccggggcauuaucaagacguuuagcaaugggugcgacuaugucucuaacaaaggaguggacaccguuuccgugggcaauacacuuuacugugucaacaagcaagagggccagagccuguaugugaaaggggagcccauuaucaacuucuacgauccucucguuuuucccuccgacgaguucgaugccucuauuagccaggugaaugaaaagaucaaccagucccuggcuuuuauucgcaaaucugacgaacugcuccacaaugucaacgugggaaagagcaccacaaauaucaugaucaccacgauuaucauugugaucauuguuauccugcuucugcucaucgccgucggccuguuccuguauugcaaggccagaugaggacuaguggaagcauuuuccuggcugauuaaaagaaauuacucagcuauggucaucuguuccuguuagaaggcuaugcagcauauuauauacuaugcgcauguuaugaaaugcauaauaaaaaauuuuaaaaaaucuaaaagaucuaaaaaaaaaaaaaaaaaaaaaaaaaaaaaaaaaaaaaaaaaaaaaaaaaaaaaaaaaaaaaaaaugcaucccccccccccccccccccccccccccccccaaaggcucuuuucagagccaccagaauu

SEQ ID NO: 15952 - RNA, 1994 nt, Artificial Sequence
  mRNA product Design d-5 comprising derived and/or modified sequence from HRSV(Memphis-37)__AIY60640.1__F-del_DSCav1_mut3 (opt6)
gggagagggcgcuuggcuugcaaggacccugagcugcggcauugaagcacacccaacccaacucgacugaagucagccucacugaaccggaucugagaaucuucucucucugggcuugccagggcucuccgaaccuagcuagcauccucuucaauuccaacuagaaagcuuaccauggaacuacccauccuaaaaacaaaugccauaaccacaauacucgccgcuguaacacuauguuucgcuaguucacaaaacauuacagaagaauuuuaccaauccacaugcucagcaguaucaaaaggauaccuaggugcacuaagaacaggaugguacacaagcguaauuacaauagaauuauccaauauuaaagaaauaaaauguaacggcacugacgcuaaaguaaaauuaaucaaacaagaacuagacaaauacaaaaacgcaguaacagaccuacaauuacucaugcaauccacacccgcagcaggaucaggcucagccauaugcucagguauagcaguaugcaaaguacuccaccuugaaggagaaguaaacaaaauaaaaaacgcauuacuaucaacaaacaaagcaguaguaucacuaucaaacggagucucugucuuaaccuuuaaaguauuagauuuaaaaaacuacauagacaaacaacuauuaccaauucuaaauaaacaaucauguucuauaccaaauauagaaacaguaauagaauuucaacaaaaaaacaaccgauuacuagaaaucacaagagaauuuucugucaacgccggcguaaccaccccagucucaacauauaugcuaacaaauagugaacucuuauccuuaauaaacgacaugccaauaacaaaugaccaaaaaaaauuaauguccaauaacguacaaauagucagacaacagucauacucaauaauguguaucaucaaagaagaaguauuagcauacguaguucaacuaccccuauacggcguaauagacacaccauguuggaaacuacacacaucacccuuaugcacaaccaauaccaaagaaggaucuaacauaugccuaaccagaacagacagaggcugguacugcgacaacgcagguucagucucauucuucccacaagccgaaacaugcaaaguccaauccaacagaguauuuugcgacacuaugaacucacuaacucuaccuucagaagucaaccuuuguaacauagacauauuuaacccaaaauacgauuguaaaauaaugaccagcaaaacagacgucucaucaagcguaauaacaucacuuggcgcaauagucuccugcuacggaaaaacaaaaugcacagcauccaacaaaaacagaggcaucauaaaaaccuucuccaacggcugcgacuauguaagcaacaaaggugucgauacaguaucaguaggaaacacacuauacugcguaaacaaacaagaaggacaaucacucuacguaaaaggugaaccaaucauaaacuucuacgacccauuaguuuucccaucagacgaauuugaugccuccauaucacaaguaaaugaaaaaauaaaucaaucccuagcauucauacgaaaaucugaugaauuacuucacaaugucaacgucggaaaaucaaccacuaacauaaugauaacaacaauuauaauaguaauaauaguaauacuccuacuauuaauagccgucggucuuuuccuauacugcaaagcacgauaaggacuaguggaagcauuuuccuggcugauuaaaagaaauuacucagcuauggucaucuguuccuguuagaaggcuaugcagcauauuauauacuaugcgcauguuaugaaaugcauaauaaaaaauuuuaaaaaaucuaaaagaucuaaaaaaaaaaaaaaaaaaaaaaaaaaaaaaaaaaaaaaaaaaaaaaaaaaaaaaaaaaaaaaaaugcaucccccccccccccccccccccccccccccccaaaggcucuuuucagagccaccagaauu

SEQ ID NO: 15953 - RNA, 1994 nt, Artificial Sequence
  mRNA product Design d-5 comprising derived and/or modified sequence from HRSV(Memphis-37)__AIY60640.1__F-del_DSCav1_mut3 (opt11)
gggagagggcgcuuggcuugcaaggacccugagcugcggcauugaagcacacccaacccaacucgacugaagucagccucacugaaccggaucugagaaucuucucucucugggcuugccagggcucuccgaaccuagcuagcauccucuucaauuccaacuagaaagcuuaccauggaacuacccauccucaaaaccaacgccaucaccacaauccuagcugccgucacccuaugcuucgcaagcagccaaaacaucacagaagaauuuuaccaaucaaccugcuccgccgucuccaaaggguaccuaggugcccuccgcaccggcugguacacgucugucauaaccaucgaacucuccaacaucaaagaaaucaaauguaacggaacagacgcaaaagucaaacuaaucaaacaagaacuagacaaauacaaaaacgccguaaccgaccuccaacugcucaugcaauccacccccgcugccggcuccgggagcgcaaucugcucuggaaucgccguaugcaaaguccuccaccucgaaggagaaguaaacaaaaucaaaaacgcgcuccucaguaccaacaaagccgucgucucucuaucaaacggcguaucgguccucaccuucaaaguccucgaccuaaagaacuacauagacaaacaacuccuccccauccuaaacaaacaauccugcucaaucccaaacaucgaaaccgugaucgaguuccaacagaaaaacaaccgccuacucgaaaucacccgagaguucucagucaacgcaggagucaccacccccgucucaacauacaugcuuaccaacagcgaacuccuaucccucaucaacgacaugccaaucacaaacgaccaaaagaaacucaugagcaacaacguccagaucguaagacaacaaagcuacagcaucaugugcaucaucaaagaagaaguacuagcauacgucguccaacucccccucuacggcgucaucgacacccccugcuggaaacuccacaccucaccccucugcacaaccaacaccaaagaaggcuccaauaucugccucacacgcaccgaccgcggcugguacugcgacaacgccggcuccgucuccuucuucccucaagccgaaaccugcaaaguccaguccaacagagucuucugcgacaccaugaacucccuaacacuuccaucagaagucaaccuuuguaacaucgacaucuucaaucccaaauacgacuguaaaauaaugaccucaaaaacugacgugucaagcucaguuaucaccucccuaggggccaucgucuccugcuacggcaaaacaaaaugcaccgcauccaacaaaaaucgcggaaucaucaaaacauucuccaacggaugcgacuacgucucaaacaagggaguagauaccguaagcguuggcaacacccucuacugcguaaacaaacaagaaggccaaucacucuacgucaaaggcgaacccauaaucaacuucuacgacccccucgucuucccuuccgaugaguucgacgccagcaucucccaagucaacgagaaaauaaaccagucacucgcauucauccgcaaaagcgacgaacuccuccacaacguaaacguaggcaaauccacaaccaauaucaugauaaccacaaucaucaucgugaucaucgucauccuccuccuccucauagcugucggacucuuccucuacuguaaagcacgcugaggacuaguggaagcauuuuccuggcugauuaaaagaaauuacucagcuauggucaucuguuccuguuagaaggcuaugcagcauauuauauacuaugcgcauguuaugaaaugcauaauaaaaaauuuuaaaaaaucuaaaagaucuaaaaaaaaaaaaaaaaaaaaaaaaaaaaaaaaaaaaaaaaaaaaaaaaaaaaaaaaaaaaaaaaugcaucccccccccccccccccccccccccccccccaaaggcucuuuucagagccaccagaauu

SEQ ID NO: 15954 - RNA, 1874 nt, Artificial Sequence
  mRNA product Design e-1 comprising derived and/or modified sequence from HRSV(Memphis-37)__AIY60640.1__F-del_DSCav1_mut3 (opt1)
gggagaauauaagcguuggcggagcgucgguuguagcacucugcgcgcccgcucuucugcugcuguuugucuacuuccuccugcuuccccgccgccgccgccgccaucaagcuuaccauggagcugcccauccucaagaccaacgccaucaccacgauccuggccgcggugacccugugcuucgccagcucccagaacaucaccgaggaguucuaccagagcacgugcuccgccgucagcaagggcuaccucggcgcccugcgcaccgggugguacaccagcgugaucaccaucgagcuguccaacaucaaggagaucaagugcaacggcaccgacgccaaggugaagcucaucaagcaggagcuggacaaguacaagaacgcggucacggaccugcagcuccugaugcagagcaccccggccgccggcuccgggagcgcgaucugcuccggcaucgccgucugcaaggugcugcaccucgagggcgaggugaacaagaucaagaacgcccugcuguccaccaacaaggccgucgugagccucuccaacggggugagcguccugaccuucaaggugcuggaccucaagaacuacaucgacaagcagcugcugcccauccugaacaagcagagcugcuccauccccaacaucgagaccgucaucgaguuccagcagaagaacaaccgccuccuggagaucacgcgggaguucagcgugaacgcgggcgugaccacccccgucuccaccuacaugcugacgaacagcgagcuccugucccugaucaacgacaugccgaucaccaacgaccagaagaagcucaugagcaacaacgugcagaucgugcgccagcaguccuacagcaucaugugcaucaucaaggaggagguccuggccuacguggugcagcugccccucuacggggucaucgacacccccugcuggaagcugcacaccagcccccugugcacgaccaacaccaaggagggcuccaacaucugccucacccggacggaccgcgggugguacugcgacaacgccggcagcguguccuucuucccgcaggccgagaccugcaagguccagagcaaccggguguucugcgacaccaugaacucccugacccugcccagcgaggugaaccucugcaacaucgacaucuucaaccccaaguacgacugcaagaucaugacguccaagaccgacgucagcuccagcgugaucaccucccugggcgccaucgugagcugcuacgggaagaccaagugcacggcgagcaacaagaaccgcggcaucaucaagaccuucuccaacgggugcgacuacgucagcaacaagggcguggacaccguguccgucggcaacacccuguacugcgugaacaagcaggagggccagagccucuacgugaagggggagcccaucaucaacuucuacgacccgcuggucuuccccuccgacgaguucgacgccagcaucucccaggugaacgagaagaucaaccagagccuggccuucauccggaaguccgacgagcuccugcacaacgugaacgucggcaagagcaccacgaacaucaugaucaccaccaucaucaucgugaucaucgugauccugcugcuccugaucgccgucgggcuguuccucuacugcaaggcccgcugaggacuaguguccaccugucccuccugggcugcuggauugucucguuuuccugccaaauaaacaggaucagcgcuuuacagaucuaaaaaaaaaaaaaaaaaaaaaaaaaaaaaaaaaaaaaaaaaaaaaaaaaaaaaaaaaaaaaaaaugcaucccccccccccccccccccccccccccccccaaaggcucuuuucagagccaccagaauu

SEQ ID NO: 15955 - RNA, 1874 nt, Artificial Sequence
  mRNA product Design e-1 comprising derived and/or modified sequence from HRSV(Memphis-37)__AIY60640.1__F-del_DSCav1_mut3 (opt1)
gggagaauauaagcguuggcggagcgucgguuguagcacucugcgcgcccgcucuucugcugcuguuugucuacuuccuccugcuuccccgccgccgccgccgccaucaagcuuaccauggagcugcccauccucaagaccaacgccaucaccacgauccuggccgcggugacccugugcuucgccagcucccagaacaucaccgaggaguucuaccagagcacgugcuccgccgucagcaagggcuaccucggggcccugcgcaccggcugguacaccuccgugaucaccaucgagcugagcaacaucaaggagaucaagugcaacgggaccgacgccaaggugaagcucaucaagcaggagcuggacaaguacaagaacgcggucacggaccugcagcuccugaugcaguccaccccggccgccggcagcggguccgccaucugcagcggcaucgcggugugcaaggugcugcaccucgagggcgaggucaacaagaucaagaacgcccugcuguccaccaacaaggccguggugagccucuccaacggggucagcgugcugaccuucaaggugcuggaccucaagaacuacaucgacaagcagcugcugcccauccucaacaagcaguccugcagcauccccaacaucgagacggucaucgaguuccagcagaagaacaaccggcugcuggagaucacccgcgaguucuccgugaacgccggcgugaccacccccgucagcacguacaugcucaccaacuccgagcugcugagccucaucaacgacaugccgaucaccaacgaccagaagaagcugaugagcaacaacgugcagaucgugcggcagcaguccuacagcaucaugugcaucaucaaggaggagguccuggccuacguggugcagcucccccuguacggggucaucgacacccccugcuggaagcugcacacgagcccccucugcaccaccaacaccaaggagggcuccaacaucugccugacgcgcaccgaccgggggugguacugcgacaacgcgggcuccgugagcuucuucccgcaggccgagaccugcaaggugcaguccaaccgcgucuucugcgacaccaugaacagccugacgcuccccuccgaggugaaccugugcaacaucgacaucuucaaccccaaguacgacugcaagaucaugaccagcaagaccgacgucuccagcuccgugaucaccagccugggcgccaucguguccugcuacgggaagacgaagugcaccgccagcaacaagaaccggggcaucaucaagaccuucuccaacgggugcgacuacgucagcaacaagggcguggacaccguguccgucggcaacacgcucuacugcgugaacaagcaggaggggcagagccuguacgugaagggcgagcccaucaucaacuucuacgacccgcuggucuuccccagcgacgaguucgacgccuccaucagccaggugaacgagaagaucaaccagucccucgcguucauccgcaagagcgacgagcugcugcacaacgugaacgucgggaaguccaccaccaacaucaugaucaccaccaucaucaucgugaucaucgugauccuccugcugcucaucgccgucggccuguuccuguacugcaaggcccggugaggacuaguguccaccugucccuccugggcugcuggauugucucguuuuccugccaaauaaacaggaucagcgcuuuacagaucuaaaaaaaaaaaaaaaaaaaaaaaaaaaaaaaaaaaaaaaaaaaaaaaaaaaaaaaaaaaaaaaaugcaucccccccccccccccccccccccccccccccaaaggcucuuuucagagccaccagaauu

SEQ ID NO: 15956 - RNA, 1874 nt, Artificial Sequence
  mRNA product Design e-1 comprising derived and/or modified sequence from HRSV(Memphis-37)__AIY60640.1__F-del_DSCav1_mut3 (opt2)
gggagaauauaagcguuggcggagcgucgguuguagcacucugcgcgcccgcucuucugcugcuguuugucuacuuccuccugcuuccccgccgccgccgccgccaucaagcuuaccauggagcuccccauccucaagaccaacgccaucaccaccauccucgccgccgucacccucugcuucgccuccucccagaacaucaccgaggaguucuaccaguccaccugcuccgccgucuccaagggcuaccucggcgcccuccgcaccggcugguacaccuccgucaucaccaucgagcucuccaacaucaaggagaucaagugcaacggcaccgacgccaaggucaagcucaucaagcaggagcucgacaaguacaagaacgccgucaccgaccuccagcuccucaugcaguccacccccgccgccggcuccggcuccgccaucugcuccggcaucgccgucugcaagguccuccaccucgagggcgaggucaacaagaucaagaacgcccuccucuccaccaacaaggccgucgucucccucuccaacggcgucuccguccucaccuucaagguccucgaccucaagaacuacaucgacaagcagcuccuccccauccucaacaagcaguccugcuccauccccaacaucgagaccgucaucgaguuccagcagaagaacaaccgccuccucgagaucacccgcgaguucuccgucaacgccggcgucaccacccccgucuccaccuacaugcucaccaacuccgagcuccucucccucaucaacgacaugcccaucaccaacgaccagaagaagcucauguccaacaacguccagaucguccgccagcaguccuacuccaucaugugcaucaucaaggaggagguccucgccuacgucguccagcucccccucuacggcgucaucgacacccccugcuggaagcuccacaccuccccccucugcaccaccaacaccaaggagggcuccaacaucugccucacccgcaccgaccgcggcugguacugcgacaacgccggcuccgucuccuucuucccccaggccgagaccugcaagguccaguccaaccgcgucuucugcgacaccaugaacucccucacccuccccuccgaggucaaccucugcaacaucgacaucuucaaccccaaguacgacugcaagaucaugaccuccaagaccgacgucuccuccuccgucaucaccucccucggcgccaucgucuccugcuacggcaagaccaagugcaccgccuccaacaagaaccgcggcaucaucaagaccuucuccaacggcugcgacuacgucuccaacaagggcgucgacaccgucuccgucggcaacacccucuacugcgucaacaagcaggagggccagucccucuacgucaagggcgagcccaucaucaacuucuacgacccccucgucuuccccuccgacgaguucgacgccuccaucucccaggucaacgagaagaucaaccagucccucgccuucauccgcaaguccgacgagcuccuccacaacgucaacgucggcaaguccaccaccaacaucaugaucaccaccaucaucaucgucaucaucgucauccuccuccuccucaucgccgucggccucuuccucuacugcaaggcccgcugaggacuaguguccaccugucccuccugggcugcuggauugucucguuuuccugccaaauaaacaggaucagcgcuuuacagaucuaaaaaaaaaaaaaaaaaaaaaaaaaaaaaaaaaaaaaaaaaaaaaaaaaaaaaaaaaaaaaaaaugcaucccccccccccccccccccccccccccccccaaaggcucuuuucagagccaccagaauu

SEQ ID NO: 15957 - RNA, 1874 nt, Artificial Sequence
  mRNA product Design e-1 comprising derived and/or modified sequence from HRSV(Memphis-37)__AIY60640.1__F-del_DSCav1_mut3 (opt3)
gggagaauauaagcguuggcggagcgucgguuguagcacucugcgcgcccgcucuucugcugcuguuugucuacuuccuccugcuuccccgccgccgccgccgccaucaagcuuaccauggagcugcccauccucaagaccaacgccauuacaacuauacuugcugcagugacgcugugcuucgccagcucccagaauaucaccgaagaguuuuaccaaucuacauguucagcggucaguaaaggcuauuugggggcuuuaagaacuggaugguacaccagcguuauuacaaucgaacuguccaacauuaaggagaucaaaugcaaugguaccgacgccaaggugaaacuaauaaagcaggaacucgauaaguauaaaaacgcaguaacugaccugcagcuucugaugcagucuacuccugccgcuggcucggggucagcaaucuguagcggaauugccgugugcaaggucuugcaccucgagggcgaggugaauaaaaucaagaacgcucugcugaguaccaauaaagccguugugucccucucuaacggugucagcguguuaacguucaagguacuggaucuuaagaauuacauugacaaacaauugcugccaauccuaaacaagcaguccuguucaauaccgaauauugaaacuguuaucgaguuucagcagaaaaacaauaggcuccuggaaauuacccgggaguucagugugaacgcgggggucacaacucccgugagcaccuauaugcuuacaaauucugagcuguugucccucaucaacgauaugccuaucaccaacgaccaaaagaaacugaugucaaauaacgugcagauuguccgccagcagagcuacaguauaaugugcaucauuaaggaagagguuuuagcauaugugguacaacugccacucuacggagugaucgauacgcccuguuggaaacuucauacuucuccucugugcacaaccaauacuaaggaaggcuccaacauauguuugacacgaaccgaccguggcugguacugcgauaaugccgggagcgucucguuuuucccacaggcugagacguguaaggugcagucuaacagaguuuucugcgacaccaugaacucccuaacacugcccucagaagugaaucucugcaauauugauaucuucaacccuaaauaugacuguaagaucaugacaaguaaaaccgaugucagcuccucugugauuacaagccugggagccaucguaucaugcuacgguaagacuaaauguaccgcaaguaauaagaacaggggcauuauaaagacauuuuccaaugggugcgacuauguuagcaacaaaggaguggacaccgucucugugggcaauacucuuuacugugucaacaagcaagagggucagucacuguaugugaaaggggagccaaucauuaacuucuacgauccguugguuuuucccagugacgaauuugaugcuagcaucucccaggugaaugagaagaucaaccagucucucgccuuuauucggaaaucggacgaacuguuacacaauguaaacgucggaaagagcacgacaaauauaaugaucaccacuauuaucauugugaucauaguuauccugcuacuccugauugcggugggccuuuucuuguauugcaaggcccgcugaggacuaguguccaccugucccuccugggcugcuggauugucucguuuuccugccaaauaaacaggaucagcgcuuuacagaucuaaaaaaaaaaaaaaaaaaaaaaaaaaaaaaaaaaaaaaaaaaaaaaaaaaaaaaaaaaaaaaaaugcaucccccccccccccccccccccccccccccccaaaggcucuuuucagagccaccagaauu

SEQ ID NO: 15958 - RNA, 1874 nt, Artificial Sequence
  mRNA product Design e-1 comprising derived and/or modified sequence from HRSV(Memphis-37)__AIY60640.1__F-del_DSCav1_mut3 (opt4)
gggagaauauaagcguuggcggagcgucgguuguagcacucugcgcgcccgcucuucugcugcuguuugucuacuuccuccugcuuccccgccgccgccgccgccaucaagcuuaccauggagcugcccauccugaagaccaacgccaucaccaccauccuggccgccgugacccugugcuucgccagcagccagaacaucaccgaggaguucuaccagagcaccugcagcgccgugagcaagggcuaccugggcgcccugagaaccggcugguacaccagcgugaucaccaucgagcugagcaacaucaaggagaucaagugcaacggcaccgacgccaaggugaagcugaucaagcaggagcuggacaaguacaagaacgccgugaccgaccugcagcugcugaugcagagcacccccgccgccggcagcggcagcgccaucugcagcggcaucgccgugugcaaggugcugcaccuggagggcgaggugaacaagaucaagaacgcccugcugagcaccaacaaggccguggugagccugagcaacggcgugagcgugcugaccuucaaggugcuggaccugaagaacuacaucgacaagcagcugcugcccauccugaacaagcagagcugcagcauccccaacaucgagaccgugaucgaguuccagcagaagaacaacagacugcuggagaucaccagagaguucagcgugaacgccggcgugaccacccccgugagcaccuacaugcugaccaacagcgagcugcugagccugaucaacgacaugcccaucaccaacgaccagaagaagcugaugagcaacaacgugcagaucgugagacagcagagcuacagcaucaugugcaucaucaaggaggaggugcuggccuacguggugcagcugccccuguacggcgugaucgacacccccugcuggaagcugcacaccagcccccugugcaccaccaacaccaaggagggcagcaacaucugccugaccagaaccgacagaggcugguacugcgacaacgccggcagcgugagcuucuucccccaggccgagaccugcaaggugcagagcaacagaguguucugcgacaccaugaacagccugacccugcccagcgaggugaaccugugcaacaucgacaucuucaaccccaaguacgacugcaagaucaugaccagcaagaccgacgugagcagcagcgugaucaccagccugggcgccaucgugagcugcuacggcaagaccaagugcaccgccagcaacaagaacagaggcaucaucaagaccuucagcaacggcugcgacuacgugagcaacaagggcguggacaccgugagcgugggcaacacccuguacugcgugaacaagcaggagggccagagccuguacgugaagggcgagcccaucaucaacuucuacgacccccugguguuccccagcgacgaguucgacgccagcaucagccaggugaacgagaagaucaaccagagccuggccuucaucagaaagagcgacgagcugcugcacaacgugaacgugggcaagagcaccaccaacaucaugaucaccaccaucaucaucgugaucaucgugauccugcugcugcugaucgccgugggccuguuccuguacugcaaggccagaugaggacuaguguccaccugucccuccugggcugcuggauugucucguuuuccugccaaauaaacaggaucagcgcuuuacagaucuaaaaaaaaaaaaaaaaaaaaaaaaaaaaaaaaaaaaaaaaaaaaaaaaaaaaaaaaaaaaaaaaugcaucccccccccccccccccccccccccccccccaaaggcucuuuucagagccaccagaauu

SEQ ID NO: 15959 - RNA, 1874 nt, Artificial Sequence
  mRNA product Design e-1 comprising derived and/or modified sequence from HRSV(Memphis-37)__AIY60640.1__F-del_DSCav1_mut3 (opt5)
gggagaauauaagcguuggcggagcgucgguuguagcacucugcgcgcccgcucuucugcugcuguuugucuacuuccuccugcuuccccgccgccgccgccgccaucaagcuuaccauggagcugcccauccucaagaccaacgccauuacaacgauccuggcugccgugacccuuugcuucgcgagcucccagaauauuacagaagaguuuuaccaaucuaccuguagcgcugucuccaaaggcuaucugggggcccucagaacaggaugguacaccucuguuaucacaauugaacugagcaacaucaaggagaucaaaugcaauggcaccgacgccaaggugaaacuuauuaagcaggaacuggauaaguauaaaaacgcugugacggaccuccagcugcugaugcaguccaccccugccgcugggucuggaagcgccaucuguuccggcauugcggucugcaaggugcuccaccuggagggggagguuaauaaaaucaagaacgcccuucugagcacaaauaaagcuguggucucucucuccaacggagugagcguucugaccuucaaggugcuugaucugaagaauuacauugacaaacaacuccugccgauccugaacaagcagucuuguuccauucccaauaucgaaacagucaucgaguuucagcagaaaaacaaucggcuccuggaaauuacccgcgaguucagcgugaacgccggcgugacgacaccugucucuaccuauaugcuuacaaauuccgagcugcucagccugaucaacgauaugcccauuaccaacgaccaaaagaaacuuauguccaauaacguucagaucgugagacagcagucuuacagcauuaugugcaucaucaaggaagaggugcuggcuuaugucgugcaacucccucuguacggcguuauugauacccccuguuggaaacugcauacauccccucucugcacgaccaauacaaaggaagggagcaacaucugucugacccggacagaccgcggaugguacugcgauaaugccggcucuguguccuuuuucccgcaggcggagaccuguaagguccagagcaacagaguguuuugcgacacgaugaacucucuuacacugcccagcgaaguuaaucucugcaauauugauaucuucaacccuaaauaugacuguaagauuaugaccuccaaaaccgaugugucuagcuccgucaucacaagccugggggccaucgugucuugcuacggaaagaccaaauguacagcuuccaauaagaaccggggcauuaucaagacguuuagcaaugggugcgacuaugucucuaacaaaggaguggacaccguuuccgugggcaauacacuuuacugugucaacaagcaagagggccagagccuguaugugaaaggggagcccauuaucaacuucuacgauccucucguuuuucccuccgacgaguucgaugccucuauuagccaggugaaugaaaagaucaaccagucccuggcuuuuauucgcaaaucugacgaacugcuccacaaugucaacgugggaaagagcaccacaaauaucaugaucaccacgauuaucauugugaucauuguuauccugcuucugcucaucgccgucggccuguuccuguauugcaaggccagaugaggacuaguguccaccugucccuccugggcugcuggauugucucguuuuccugccaaauaaacaggaucagcgcuuuacagaucuaaaaaaaaaaaaaaaaaaaaaaaaaaaaaaaaaaaaaaaaaaaaaaaaaaaaaaaaaaaaaaaaugcaucccccccccccccccccccccccccccccccaaaggcucuuuucagagccaccagaauu

SEQ ID NO: 15960 - RNA, 1874 nt, Artificial Sequence
  mRNA product Design e-1 comprising derived and/or modified sequence from HRSV(Memphis-37)__AIY60640.1__F-del_DSCav1_mut3 (opt6)
gggagaauauaagcguuggcggagcgucgguuguagcacucugcgcgcccgcucuucugcugcuguuugucuacuuccuccugcuuccccgccgccgccgccgccaucaagcuuaccauggaacuacccauccuaaaaacaaaugccauaaccacaauacucgccgcuguaacacuauguuucgcuaguucacaaaacauuacagaagaauuuuaccaauccacaugcucagcaguaucaaaaggauaccuaggugcacuaagaacaggaugguacacaagcguaauuacaauagaauuauccaauauuaaagaaauaaaauguaacggcacugacgcuaaaguaaaauuaaucaaacaagaacuagacaaauacaaaaacgcaguaacagaccuacaauuacucaugcaauccacacccgcagcaggaucaggcucagccauaugcucagguauagcaguaugcaaaguacuccaccuugaaggagaaguaaacaaaauaaaaaacgcauuacuaucaacaaacaaagcaguaguaucacuaucaaacggagucucugucuuaaccuuuaaaguauuagauuuaaaaaacuacauagacaaacaacuauuaccaauucuaaauaaacaaucauguucuauaccaaauauagaaacaguaauagaauuucaacaaaaaaacaaccgauuacuagaaaucacaagagaauuuucugucaacgccggcguaaccaccccagucucaacauauaugcuaacaaauagugaacucuuauccuuaauaaacgacaugccaauaacaaaugaccaaaaaaaauuaauguccaauaacguacaaauagucagacaacagucauacucaauaauguguaucaucaaagaagaaguauuagcauacguaguucaacuaccccuauacggcguaauagacacaccauguuggaaacuacacacaucacccuuaugcacaaccaauaccaaagaaggaucuaacauaugccuaaccagaacagacagaggcugguacugcgacaacgcagguucagucucauucuucccacaagccgaaacaugcaaaguccaauccaacagaguauuuugcgacacuaugaacucacuaacucuaccuucagaagucaaccuuuguaacauagacauauuuaacccaaaauacgauuguaaaauaaugaccagcaaaacagacgucucaucaagcguaauaacaucacuuggcgcaauagucuccugcuacggaaaaacaaaaugcacagcauccaacaaaaacagaggcaucauaaaaaccuucuccaacggcugcgacuauguaagcaacaaaggugucgauacaguaucaguaggaaacacacuauacugcguaaacaaacaagaaggacaaucacucuacguaaaaggugaaccaaucauaaacuucuacgacccauuaguuuucccaucagacgaauuugaugccuccauaucacaaguaaaugaaaaaauaaaucaaucccuagcauucauacgaaaaucugaugaauuacuucacaaugucaacgucggaaaaucaaccacuaacauaaugauaacaacaauuauaauaguaauaauaguaauacuccuacuauuaauagccgucggucuuuuccuauacugcaaagcacgauaaggacuaguguccaccugucccuccugggcugcuggauugucucguuuuccugccaaauaaacaggaucagcgcuuuacagaucuaaaaaaaaaaaaaaaaaaaaaaaaaaaaaaaaaaaaaaaaaaaaaaaaaaaaaaaaaaaaaaaaugcaucccccccccccccccccccccccccccccccaaaggcucuuuucagagccaccagaauu

SEQ ID NO: 15961 - RNA, 1874 nt, Artificial Sequence
  mRNA product Design e-1 comprising derived and/or modified sequence from HRSV(Memphis-37)__AIY60640.1__F-del_DSCav1_mut3 (opt11)
gggagaauauaagcguuggcggagcgucgguuguagcacucugcgcgcccgcucuucugcugcuguuugucuacuuccuccugcuuccccgccgccgccgccgccaucaagcuuaccauggaacuacccauccucaaaaccaacgccaucaccacaauccuagcugccgucacccuaugcuucgcaagcagccaaaacaucacagaagaauuuuaccaaucaaccugcuccgccgucuccaaaggguaccuaggugcccuccgcaccggcugguacacgucugucauaaccaucgaacucuccaacaucaaagaaaucaaauguaacggaacagacgcaaaagucaaacuaaucaaacaagaacuagacaaauacaaaaacgccguaaccgaccuccaacugcucaugcaauccacccccgcugccggcuccgggagcgcaaucugcucuggaaucgccguaugcaaaguccuccaccucgaaggagaaguaaacaaaaucaaaaacgcgcuccucaguaccaacaaagccgucgucucucuaucaaacggcguaucgguccucaccuucaaaguccucgaccuaaagaacuacauagacaaacaacuccuccccauccuaaacaaacaauccugcucaaucccaaacaucgaaaccgugaucgaguuccaacagaaaaacaaccgccuacucgaaaucacccgagaguucucagucaacgcaggagucaccacccccgucucaacauacaugcuuaccaacagcgaacuccuaucccucaucaacgacaugccaaucacaaacgaccaaaagaaacucaugagcaacaacguccagaucguaagacaacaaagcuacagcaucaugugcaucaucaaagaagaaguacuagcauacgucguccaacucccccucuacggcgucaucgacacccccugcuggaaacuccacaccucaccccucugcacaaccaacaccaaagaaggcuccaauaucugccucacacgcaccgaccgcggcugguacugcgacaacgccggcuccgucuccuucuucccucaagccgaaaccugcaaaguccaguccaacagagucuucugcgacaccaugaacucccuaacacuuccaucagaagucaaccuuuguaacaucgacaucuucaaucccaaauacgacuguaaaauaaugaccucaaaaacugacgugucaagcucaguuaucaccucccuaggggccaucgucuccugcuacggcaaaacaaaaugcaccgcauccaacaaaaaucgcggaaucaucaaaacauucuccaacggaugcgacuacgucucaaacaagggaguagauaccguaagcguuggcaacacccucuacugcguaaacaaacaagaaggccaaucacucuacgucaaaggcgaacccauaaucaacuucuacgacccccucgucuucccuuccgaugaguucgacgccagcaucucccaagucaacgagaaaauaaaccagucacucgcauucauccgcaaaagcgacgaacuccuccacaacguaaacguaggcaaauccacaaccaauaucaugauaaccacaaucaucaucgugaucaucgucauccuccuccuccucauagcugucggacucuuccucuacuguaaagcacgcugaggacuaguguccaccugucccuccugggcugcuggauugucucguuuuccugccaaauaaacaggaucagcgcuuuacagaucuaaaaaaaaaaaaaaaaaaaaaaaaaaaaaaaaaaaaaaaaaaaaaaaaaaaaaaaaaaaaaaaaugcaucccccccccccccccccccccccccccccccaaaggcucuuuucagagccaccagaauu

SEQ ID NO: 15962 - RNA, 1856 nt, Artificial Sequence
  mRNA product Design e-2 comprising derived and/or modified sequence from HRSV(Memphis-37)__AIY60640.1__F-del_DSCav1_mut3 (opt1)
gggagacccgugacccggaaguuguacggcuacgcgacuuucccucccacaaacccucgcgcccuuccuuuccuacuugggcccggcagaaagcuuaccauggagcugcccauccucaagaccaacgccaucaccacgauccuggccgcggugacccugugcuucgccagcucccagaacaucaccgaggaguucuaccagagcacgugcuccgccgucagcaagggcuaccucggcgcccugcgcaccgggugguacaccagcgugaucaccaucgagcuguccaacaucaaggagaucaagugcaacggcaccgacgccaaggugaagcucaucaagcaggagcuggacaaguacaagaacgcggucacggaccugcagcuccugaugcagagcaccccggccgccggcuccgggagcgcgaucugcuccggcaucgccgucugcaaggugcugcaccucgagggcgaggugaacaagaucaagaacgcccugcuguccaccaacaaggccgucgugagccucuccaacggggugagcguccugaccuucaaggugcuggaccucaagaacuacaucgacaagcagcugcugcccauccugaacaagcagagcugcuccauccccaacaucgagaccgucaucgaguuccagcagaagaacaaccgccuccuggagaucacgcgggaguucagcgugaacgcgggcgugaccacccccgucuccaccuacaugcugacgaacagcgagcuccugucccugaucaacgacaugccgaucaccaacgaccagaagaagcucaugagcaacaacgugcagaucgugcgccagcaguccuacagcaucaugugcaucaucaaggaggagguccuggccuacguggugcagcugccccucuacggggucaucgacacccccugcuggaagcugcacaccagcccccugugcacgaccaacaccaaggagggcuccaacaucugccucacccggacggaccgcgggugguacugcgacaacgccggcagcguguccuucuucccgcaggccgagaccugcaagguccagagcaaccggguguucugcgacaccaugaacucccugacccugcccagcgaggugaaccucugcaacaucgacaucuucaaccccaaguacgacugcaagaucaugacguccaagaccgacgucagcuccagcgugaucaccucccugggcgccaucgugagcugcuacgggaagaccaagugcacggcgagcaacaagaaccgcggcaucaucaagaccuucuccaacgggugcgacuacgucagcaacaagggcguggacaccguguccgucggcaacacccuguacugcgugaacaagcaggagggccagagccucuacgugaagggggagcccaucaucaacuucuacgacccgcuggucuuccccuccgacgaguucgacgccagcaucucccaggugaacgagaagaucaaccagagccuggccuucauccggaaguccgacgagcuccugcacaacgugaacgucggcaagagcaccacgaacaucaugaucaccaccaucaucaucgugaucaucgugauccugcugcuccugaucgccgucgggcuguuccucuacugcaaggcccgcugaggacuaguguccaccugucccuccugggcugcuggauugucucguuuuccugccaaauaaacaggaucagcgcuuuacagaucuaaaaaaaaaaaaaaaaaaaaaaaaaaaaaaaaaaaaaaaaaaaaaaaaaaaaaaaaaaaaaaaaugcaucccccccccccccccccccccccccccccccaaaggcucuuuucagagccaccagaauu

SEQ ID NO: 15963 - RNA, 1856 nt, Artificial Sequence
  mRNA product Design e-2 comprising derived and/or modified sequence from HRSV(Memphis-37)__AIY60640.1__F-del_DSCav1_mut3 (opt1)
gggagacccgugacccggaaguuguacggcuacgcgacuuucccucccacaaacccucgcgcccuuccuuuccuacuugggcccggcagaaagcuuaccauggagcugcccauccucaagaccaacgccaucaccacgauccuggccgcggugacccugugcuucgccagcucccagaacaucaccgaggaguucuaccagagcacgugcuccgccgucagcaagggcuaccucggggcccugcgcaccggcugguacaccuccgugaucaccaucgagcugagcaacaucaaggagaucaagugcaacgggaccgacgccaaggugaagcucaucaagcaggagcuggacaaguacaagaacgcggucacggaccugcagcuccugaugcaguccaccccggccgccggcagcggguccgccaucugcagcggcaucgcggugugcaaggugcugcaccucgagggcgaggucaacaagaucaagaacgcccugcuguccaccaacaaggccguggugagccucuccaacggggucagcgugcugaccuucaaggugcuggaccucaagaacuacaucgacaagcagcugcugcccauccucaacaagcaguccugcagcauccccaacaucgagacggucaucgaguuccagcagaagaacaaccggcugcuggagaucacccgcgaguucuccgugaacgccggcgugaccacccccgucagcacguacaugcucaccaacuccgagcugcugagccucaucaacgacaugccgaucaccaacgaccagaagaagcugaugagcaacaacgugcagaucgugcggcagcaguccuacagcaucaugugcaucaucaaggaggagguccuggccuacguggugcagcucccccuguacggggucaucgacacccccugcuggaagcugcacacgagcccccucugcaccaccaacaccaaggagggcuccaacaucugccugacgcgcaccgaccgggggugguacugcgacaacgcgggcuccgugagcuucuucccgcaggccgagaccugcaaggugcaguccaaccgcgucuucugcgacaccaugaacagccugacgcuccccuccgaggugaaccugugcaacaucgacaucuucaaccccaaguacgacugcaagaucaugaccagcaagaccgacgucuccagcuccgugaucaccagccugggcgccaucguguccugcuacgggaagacgaagugcaccgccagcaacaagaaccggggcaucaucaagaccuucuccaacgggugcgacuacgucagcaacaagggcguggacaccguguccgucggcaacacgcucuacugcgugaacaagcaggaggggcagagccuguacgugaagggcgagcccaucaucaacuucuacgacccgcuggucuuccccagcgacgaguucgacgccuccaucagccaggugaacgagaagaucaaccagucccucgcguucauccgcaagagcgacgagcugcugcacaacgugaacgucgggaaguccaccaccaacaucaugaucaccaccaucaucaucgugaucaucgugauccuccugcugcucaucgccgucggccuguuccuguacugcaaggcccggugaggacuaguguccaccugucccuccugggcugcuggauugucucguuuuccugccaaauaaacaggaucagcgcuuuacagaucuaaaaaaaaaaaaaaaaaaaaaaaaaaaaaaaaaaaaaaaaaaaaaaaaaaaaaaaaaaaaaaaaugcaucccccccccccccccccccccccccccccccaaaggcucuuuucagagccaccagaauu

SEQ ID NO: 15964 - RNA, 1856 nt, Artificial Sequence
  mRNA product Design e-2 comprising derived and/or modified sequence from HRSV(Memphis-37)__AIY60640.1__F-del_DSCav1_mut3 (opt2)
gggagacccgugacccggaaguuguacggcuacgcgacuuucccucccacaaacccucgcgcccuuccuuuccuacuugggcccggcagaaagcuuaccauggagcuccccauccucaagaccaacgccaucaccaccauccucgccgccgucacccucugcuucgccuccucccagaacaucaccgaggaguucuaccaguccaccugcuccgccgucuccaagggcuaccucggcgcccuccgcaccggcugguacaccuccgucaucaccaucgagcucuccaacaucaaggagaucaagugcaacggcaccgacgccaaggucaagcucaucaagcaggagcucgacaaguacaagaacgccgucaccgaccuccagcuccucaugcaguccacccccgccgccggcuccggcuccgccaucugcuccggcaucgccgucugcaagguccuccaccucgagggcgaggucaacaagaucaagaacgcccuccucuccaccaacaaggccgucgucucccucuccaacggcgucuccguccucaccuucaagguccucgaccucaagaacuacaucgacaagcagcuccuccccauccucaacaagcaguccugcuccauccccaacaucgagaccgucaucgaguuccagcagaagaacaaccgccuccucgagaucacccgcgaguucuccgucaacgccggcgucaccacccccgucuccaccuacaugcucaccaacuccgagcuccucucccucaucaacgacaugcccaucaccaacgaccagaagaagcucauguccaacaacguccagaucguccgccagcaguccuacuccaucaugugcaucaucaaggaggagguccucgccuacgucguccagcucccccucuacggcgucaucgacacccccugcuggaagcuccacaccuccccccucugcaccaccaacaccaaggagggcuccaacaucugccucacccgcaccgaccgcggcugguacugcgacaacgccggcuccgucuccuucuucccccaggccgagaccugcaagguccaguccaaccgcgucuucugcgacaccaugaacucccucacccuccccuccgaggucaaccucugcaacaucgacaucuucaaccccaaguacgacugcaagaucaugaccuccaagaccgacgucuccuccuccgucaucaccucccucggcgccaucgucuccugcuacggcaagaccaagugcaccgccuccaacaagaaccgcggcaucaucaagaccuucuccaacggcugcgacuacgucuccaacaagggcgucgacaccgucuccgucggcaacacccucuacugcgucaacaagcaggagggccagucccucuacgucaagggcgagcccaucaucaacuucuacgacccccucgucuuccccuccgacgaguucgacgccuccaucucccaggucaacgagaagaucaaccagucccucgccuucauccgcaaguccgacgagcuccuccacaacgucaacgucggcaaguccaccaccaacaucaugaucaccaccaucaucaucgucaucaucgucauccuccuccuccucaucgccgucggccucuuccucuacugcaaggcccgcugaggacuaguguccaccugucccuccugggcugcuggauugucucguuuuccugccaaauaaacaggaucagcgcuuuacagaucuaaaaaaaaaaaaaaaaaaaaaaaaaaaaaaaaaaaaaaaaaaaaaaaaaaaaaaaaaaaaaaaaugcaucccccccccccccccccccccccccccccccaaaggcucuuuucagagccaccagaauu

SEQ ID NO: 15965 - RNA, 1856 nt, Artificial Sequence
  mRNA product Design e-2 comprising derived and/or modified sequence from HRSV(Memphis-37)__AIY60640.1__F-del_DSCav1_mut3 (opt3)
gggagacccgugacccggaaguuguacggcuacgcgacuuucccucccacaaacccucgcgcccuuccuuuccuacuugggcccggcagaaagcuuaccauggagcugcccauccucaagaccaacgccauuacaacuauacuugcugcagugacgcugugcuucgccagcucccagaauaucaccgaagaguuuuaccaaucuacauguucagcggucaguaaaggcuauuugggggcuuuaagaacuggaugguacaccagcguuauuacaaucgaacuguccaacauuaaggagaucaaaugcaaugguaccgacgccaaggugaaacuaauaaagcaggaacucgauaaguauaaaaacgcaguaacugaccugcagcuucugaugcagucuacuccugccgcuggcucggggucagcaaucuguagcggaauugccgugugcaaggucuugcaccucgagggcgaggugaauaaaaucaagaacgcucugcugaguaccaauaaagccguugugucccucucuaacggugucagcguguuaacguucaagguacuggaucuuaagaauuacauugacaaacaauugcugccaauccuaaacaagcaguccuguucaauaccgaauauugaaacuguuaucgaguuucagcagaaaaacaauaggcuccuggaaauuacccgggaguucagugugaacgcgggggucacaacucccgugagcaccuauaugcuuacaaauucugagcuguugucccucaucaacgauaugccuaucaccaacgaccaaaagaaacugaugucaaauaacgugcagauuguccgccagcagagcuacaguauaaugugcaucauuaaggaagagguuuuagcauaugugguacaacugccacucuacggagugaucgauacgcccuguuggaaacuucauacuucuccucugugcacaaccaauacuaaggaaggcuccaacauauguuugacacgaaccgaccguggcugguacugcgauaaugccgggagcgucucguuuuucccacaggcugagacguguaaggugcagucuaacagaguuuucugcgacaccaugaacucccuaacacugcccucagaagugaaucucugcaauauugauaucuucaacccuaaauaugacuguaagaucaugacaaguaaaaccgaugucagcuccucugugauuacaagccugggagccaucguaucaugcuacgguaagacuaaauguaccgcaaguaauaagaacaggggcauuauaaagacauuuuccaaugggugcgacuauguuagcaacaaaggaguggacaccgucucugugggcaauacucuuuacugugucaacaagcaagagggucagucacuguaugugaaaggggagccaaucauuaacuucuacgauccguugguuuuucccagugacgaauuugaugcuagcaucucccaggugaaugagaagaucaaccagucucucgccuuuauucggaaaucggacgaacuguuacacaauguaaacgucggaaagagcacgacaaauauaaugaucaccacuauuaucauugugaucauaguuauccugcuacuccugauugcggugggccuuuucuuguauugcaaggcccgcugaggacuaguguccaccugucccuccugggcugcuggauugucucguuuuccugccaaauaaacaggaucagcgcuuuacagaucuaaaaaaaaaaaaaaaaaaaaaaaaaaaaaaaaaaaaaaaaaaaaaaaaaaaaaaaaaaaaaaaaugcaucccccccccccccccccccccccccccccccaaaggcucuuuucagagccaccagaauu

SEQ ID NO: 15966 - RNA, 1856 nt, Artificial Sequence
  mRNA product Design e-2 comprising derived and/or modified sequence from HRSV(Memphis-37)__AIY60640.1__F-del_DSCav1_mut3 (opt4)
gggagacccgugacccggaaguuguacggcuacgcgacuuucccucccacaaacccucgcgcccuuccuuuccuacuugggcccggcagaaagcuuaccauggagcugcccauccugaagaccaacgccaucaccaccauccuggccgccgugacccugugcuucgccagcagccagaacaucaccgaggaguucuaccagagcaccugcagcgccgugagcaagggcuaccugggcgcccugagaaccggcugguacaccagcgugaucaccaucgagcugagcaacaucaaggagaucaagugcaacggcaccgacgccaaggugaagcugaucaagcaggagcuggacaaguacaagaacgccgugaccgaccugcagcugcugaugcagagcacccccgccgccggcagcggcagcgccaucugcagcggcaucgccgugugcaaggugcugcaccuggagggcgaggugaacaagaucaagaacgcccugcugagcaccaacaaggccguggugagccugagcaacggcgugagcgugcugaccuucaaggugcuggaccugaagaacuacaucgacaagcagcugcugcccauccugaacaagcagagcugcagcauccccaacaucgagaccgugaucgaguuccagcagaagaacaacagacugcuggagaucaccagagaguucagcgugaacgccggcgugaccacccccgugagcaccuacaugcugaccaacagcgagcugcugagccugaucaacgacaugcccaucaccaacgaccagaagaagcugaugagcaacaacgugcagaucgugagacagcagagcuacagcaucaugugcaucaucaaggaggaggugcuggccuacguggugcagcugccccuguacggcgugaucgacacccccugcuggaagcugcacaccagcccccugugcaccaccaacaccaaggagggcagcaacaucugccugaccagaaccgacagaggcugguacugcgacaacgccggcagcgugagcuucuucccccaggccgagaccugcaaggugcagagcaacagaguguucugcgacaccaugaacagccugacccugcccagcgaggugaaccugugcaacaucgacaucuucaaccccaaguacgacugcaagaucaugaccagcaagaccgacgugagcagcagcgugaucaccagccugggcgccaucgugagcugcuacggcaagaccaagugcaccgccagcaacaagaacagaggcaucaucaagaccuucagcaacggcugcgacuacgugagcaacaagggcguggacaccgugagcgugggcaacacccuguacugcgugaacaagcaggagggccagagccuguacgugaagggcgagcccaucaucaacuucuacgacccccugguguuccccagcgacgaguucgacgccagcaucagccaggugaacgagaagaucaaccagagccuggccuucaucagaaagagcgacgagcugcugcacaacgugaacgugggcaagagcaccaccaacaucaugaucaccaccaucaucaucgugaucaucgugauccugcugcugcugaucgccgugggccuguuccuguacugcaaggccagaugaggacuaguguccaccugucccuccugggcugcuggauugucucguuuuccugccaaauaaacaggaucagcgcuuuacagaucuaaaaaaaaaaaaaaaaaaaaaaaaaaaaaaaaaaaaaaaaaaaaaaaaaaaaaaaaaaaaaaaaugcaucccccccccccccccccccccccccccccccaaaggcucuuuucagagccaccagaauu

SEQ ID NO: 15967 - RNA, 1856 nt, Artificial Sequence
  mRNA product Design e-2 comprising derived and/or modified sequence from HRSV(Memphis-37)__AIY60640.1__F-del_DSCav1_mut3 (opt5)
gggagacccgugacccggaaguuguacggcuacgcgacuuucccucccacaaacccucgcgcccuuccuuuccuacuugggcccggcagaaagcuuaccauggagcugcccauccucaagaccaacgccauuacaacgauccuggcugccgugacccuuugcuucgcgagcucccagaauauuacagaagaguuuuaccaaucuaccuguagcgcugucuccaaaggcuaucugggggcccucagaacaggaugguacaccucuguuaucacaauugaacugagcaacaucaaggagaucaaaugcaauggcaccgacgccaaggugaaacuuauuaagcaggaacuggauaaguauaaaaacgcugugacggaccuccagcugcugaugcaguccaccccugccgcugggucuggaagcgccaucuguuccggcauugcggucugcaaggugcuccaccuggagggggagguuaauaaaaucaagaacgcccuucugagcacaaauaaagcuguggucucucucuccaacggagugagcguucugaccuucaaggugcuugaucugaagaauuacauugacaaacaacuccugccgauccugaacaagcagucuuguuccauucccaauaucgaaacagucaucgaguuucagcagaaaaacaaucggcuccuggaaauuacccgcgaguucagcgugaacgccggcgugacgacaccugucucuaccuauaugcuuacaaauuccgagcugcucagccugaucaacgauaugcccauuaccaacgaccaaaagaaacuuauguccaauaacguucagaucgugagacagcagucuuacagcauuaugugcaucaucaaggaagaggugcuggcuuaugucgugcaacucccucuguacggcguuauugauacccccuguuggaaacugcauacauccccucucugcacgaccaauacaaaggaagggagcaacaucugucugacccggacagaccgcggaugguacugcgauaaugccggcucuguguccuuuuucccgcaggcggagaccuguaagguccagagcaacagaguguuuugcgacacgaugaacucucuuacacugcccagcgaaguuaaucucugcaauauugauaucuucaacccuaaauaugacuguaagauuaugaccuccaaaaccgaugugucuagcuccgucaucacaagccugggggccaucgugucuugcuacggaaagaccaaauguacagcuuccaauaagaaccggggcauuaucaagacguuuagcaaugggugcgacuaugucucuaacaaaggaguggacaccguuuccgugggcaauacacuuuacugugucaacaagcaagagggccagagccuguaugugaaaggggagcccauuaucaacuucuacgauccucucguuuuucccuccgacgaguucgaugccucuauuagccaggugaaugaaaagaucaaccagucccuggcuuuuauucgcaaaucugacgaacugcuccacaaugucaacgugggaaagagcaccacaaauaucaugaucaccacgauuaucauugugaucauuguuauccugcuucugcucaucgccgucggccuguuccuguauugcaaggccagaugaggacuaguguccaccugucccuccugggcugcuggauugucucguuuuccugccaaauaaacaggaucagcgcuuuacagaucuaaaaaaaaaaaaaaaaaaaaaaaaaaaaaaaaaaaaaaaaaaaaaaaaaaaaaaaaaaaaaaaaugcaucccccccccccccccccccccccccccccccaaaggcucuuuucagagccaccagaauu

SEQ ID NO: 15968 - RNA, 1856 nt, Artificial Sequence
  mRNA product Design e-2 comprising derived and/or modified sequence from HRSV(Memphis-37)__AIY60640.1__F-del_DSCav1_mut3 (opt6)
gggagacccgugacccggaaguuguacggcuacgcgacuuucccucccacaaacccucgcgcccuuccuuuccuacuugggcccggcagaaagcuuaccauggaacuacccauccuaaaaacaaaugccauaaccacaauacucgccgcuguaacacuauguuucgcuaguucacaaaacauuacagaagaauuuuaccaauccacaugcucagcaguaucaaaaggauaccuaggugcacuaagaacaggaugguacacaagcguaauuacaauagaauuauccaauauuaaagaaauaaaauguaacggcacugacgcuaaaguaaaauuaaucaaacaagaacuagacaaauacaaaaacgcaguaacagaccuacaauuacucaugcaauccacacccgcagcaggaucaggcucagccauaugcucagguauagcaguaugcaaaguacuccaccuugaaggagaaguaaacaaaauaaaaaacgcauuacuaucaacaaacaaagcaguaguaucacuaucaaacggagucucugucuuaaccuuuaaaguauuagauuuaaaaaacuacauagacaaacaacuauuaccaauucuaaauaaacaaucauguucuauaccaaauauagaaacaguaauagaauuucaacaaaaaaacaaccgauuacuagaaaucacaagagaauuuucugucaacgccggcguaaccaccccagucucaacauauaugcuaacaaauagugaacucuuauccuuaauaaacgacaugccaauaacaaaugaccaaaaaaaauuaauguccaauaacguacaaauagucagacaacagucauacucaauaauguguaucaucaaagaagaaguauuagcauacguaguucaacuaccccuauacggcguaauagacacaccauguuggaaacuacacacaucacccuuaugcacaaccaauaccaaagaaggaucuaacauaugccuaaccagaacagacagaggcugguacugcgacaacgcagguucagucucauucuucccacaagccgaaacaugcaaaguccaauccaacagaguauuuugcgacacuaugaacucacuaacucuaccuucagaagucaaccuuuguaacauagacauauuuaacccaaaauacgauuguaaaauaaugaccagcaaaacagacgucucaucaagcguaauaacaucacuuggcgcaauagucuccugcuacggaaaaacaaaaugcacagcauccaacaaaaacagaggcaucauaaaaaccuucuccaacggcugcgacuauguaagcaacaaaggugucgauacaguaucaguaggaaacacacuauacugcguaaacaaacaagaaggacaaucacucuacguaaaaggugaaccaaucauaaacuucuacgacccauuaguuuucccaucagacgaauuugaugccuccauaucacaaguaaaugaaaaaauaaaucaaucccuagcauucauacgaaaaucugaugaauuacuucacaaugucaacgucggaaaaucaaccacuaacauaaugauaacaacaauuauaauaguaauaauaguaauacuccuacuauuaauagccgucggucuuuuccuauacugcaaagcacgauaaggacuaguguccaccugucccuccugggcugcuggauugucucguuuuccugccaaauaaacaggaucagcgcuuuacagaucuaaaaaaaaaaaaaaaaaaaaaaaaaaaaaaaaaaaaaaaaaaaaaaaaaaaaaaaaaaaaaaaaugcaucccccccccccccccccccccccccccccccaaaggcucuuuucagagccaccagaauu

SEQ ID NO: 15969 - RNA, 1856 nt, Artificial Sequence
  mRNA product Design e-2 comprising derived and/or modified sequence from HRSV(Memphis-37)__AIY60640.1__F-del_DSCav1_mut3 (opt11)
gggagacccgugacccggaaguuguacggcuacgcgacuuucccucccacaaacccucgcgcccuuccuuuccuacuugggcccggcagaaagcuuaccauggaacuacccauccucaaaaccaacgccaucaccacaauccuagcugccgucacccuaugcuucgcaagcagccaaaacaucacagaagaauuuuaccaaucaaccugcuccgccgucuccaaaggguaccuaggugcccuccgcaccggcugguacacgucugucauaaccaucgaacucuccaacaucaaagaaaucaaauguaacggaacagacgcaaaagucaaacuaaucaaacaagaacuagacaaauacaaaaacgccguaaccgaccuccaacugcucaugcaauccacccccgcugccggcuccgggagcgcaaucugcucuggaaucgccguaugcaaaguccuccaccucgaaggagaaguaaacaaaaucaaaaacgcgcuccucaguaccaacaaagccgucgucucucuaucaaacggcguaucgguccucaccuucaaaguccucgaccuaaagaacuacauagacaaacaacuccuccccauccuaaacaaacaauccugcucaaucccaaacaucgaaaccgugaucgaguuccaacagaaaaacaaccgccuacucgaaaucacccgagaguucucagucaacgcaggagucaccacccccgucucaacauacaugcuuaccaacagcgaacuccuaucccucaucaacgacaugccaaucacaaacgaccaaaagaaacucaugagcaacaacguccagaucguaagacaacaaagcuacagcaucaugugcaucaucaaagaagaaguacuagcauacgucguccaacucccccucuacggcgucaucgacacccccugcuggaaacuccacaccucaccccucugcacaaccaacaccaaagaaggcuccaauaucugccucacacgcaccgaccgcggcugguacugcgacaacgccggcuccgucuccuucuucccucaagccgaaaccugcaaaguccaguccaacagagucuucugcgacaccaugaacucccuaacacuuccaucagaagucaaccuuuguaacaucgacaucuucaaucccaaauacgacuguaaaauaaugaccucaaaaacugacgugucaagcucaguuaucaccucccuaggggccaucgucuccugcuacggcaaaacaaaaugcaccgcauccaacaaaaaucgcggaaucaucaaaacauucuccaacggaugcgacuacgucucaaacaagggaguagauaccguaagcguuggcaacacccucuacugcguaaacaaacaagaaggccaaucacucuacgucaaaggcgaacccauaaucaacuucuacgacccccucgucuucccuuccgaugaguucgacgccagcaucucccaagucaacgagaaaauaaaccagucacucgcauucauccgcaaaagcgacgaacuccuccacaacguaaacguaggcaaauccacaaccaauaucaugauaaccacaaucaucaucgugaucaucgucauccuccuccuccucauagcugucggacucuuccucuacuguaaagcacgcugaggacuaguguccaccugucccuccugggcugcuggauugucucguuuuccugccaaauaaacaggaucagcgcuuuacagaucuaaaaaaaaaaaaaaaaaaaaaaaaaaaaaaaaaaaaaaaaaaaaaaaaaaaaaaaaaaaaaaaaugcaucccccccccccccccccccccccccccccccaaaggcucuuuucagagccaccagaauu

SEQ ID NO: 15970 - RNA, 1826 nt, Artificial Sequence
  mRNA product Design e-3 comprising derived and/or modified sequence from HRSV(Memphis-37)__AIY60640.1__F-del_DSCav1_mut3 (opt1)
gggagacuuucccauucuguagcagaauuugguguugccuguggucuuggucccgcggagaagcuuaccauggagcugcccauccucaagaccaacgccaucaccacgauccuggccgcggugacccugugcuucgccagcucccagaacaucaccgaggaguucuaccagagcacgugcuccgccgucagcaagggcuaccucggcgcccugcgcaccgggugguacaccagcgugaucaccaucgagcuguccaacaucaaggagaucaagugcaacggcaccgacgccaaggugaagcucaucaagcaggagcuggacaaguacaagaacgcggucacggaccugcagcuccugaugcagagcaccccggccgccggcuccgggagcgcgaucugcuccggcaucgccgucugcaaggugcugcaccucgagggcgaggugaacaagaucaagaacgcccugcuguccaccaacaaggccgucgugagccucuccaacggggugagcguccugaccuucaaggugcuggaccucaagaacuacaucgacaagcagcugcugcccauccugaacaagcagagcugcuccauccccaacaucgagaccgucaucgaguuccagcagaagaacaaccgccuccuggagaucacgcgggaguucagcgugaacgcgggcgugaccacccccgucuccaccuacaugcugacgaacagcgagcuccugucccugaucaacgacaugccgaucaccaacgaccagaagaagcucaugagcaacaacgugcagaucgugcgccagcaguccuacagcaucaugugcaucaucaaggaggagguccuggccuacguggugcagcugccccucuacggggucaucgacacccccugcuggaagcugcacaccagcccccugugcacgaccaacaccaaggagggcuccaacaucugccucacccggacggaccgcgggugguacugcgacaacgccggcagcguguccuucuucccgcaggccgagaccugcaagguccagagcaaccggguguucugcgacaccaugaacucccugacccugcccagcgaggugaaccucugcaacaucgacaucuucaaccccaaguacgacugcaagaucaugacguccaagaccgacgucagcuccagcgugaucaccucccugggcgccaucgugagcugcuacgggaagaccaagugcacggcgagcaacaagaaccgcggcaucaucaagaccuucuccaacgggugcgacuacgucagcaacaagggcguggacaccguguccgucggcaacacccuguacugcgugaacaagcaggagggccagagccucuacgugaagggggagcccaucaucaacuucuacgacccgcuggucuuccccuccgacgaguucgacgccagcaucucccaggugaacgagaagaucaaccagagccuggccuucauccggaaguccgacgagcuccugcacaacgugaacgucggcaagagcaccacgaacaucaugaucaccaccaucaucaucgugaucaucgugauccugcugcuccugaucgccgucgggcuguuccucuacugcaaggcccgcugaggacuaguguccaccugucccuccugggcugcuggauugucucguuuuccugccaaauaaacaggaucagcgcuuuacagaucuaaaaaaaaaaaaaaaaaaaaaaaaaaaaaaaaaaaaaaaaaaaaaaaaaaaaaaaaaaaaaaaaugcaucccccccccccccccccccccccccccccccaaaggcucuuuucagagccaccagaauu

SEQ ID NO: 15971 - RNA, 1826 nt, Artificial Sequence
  mRNA product Design e-3 comprising derived and/or modified sequence from HRSV(Memphis-37)__AIY60640.1__F-del_DSCav1_mut3 (opt1)
gggagacuuucccauucuguagcagaauuugguguugccuguggucuuggucccgcggagaagcuuaccauggagcugcccauccucaagaccaacgccaucaccacgauccuggccgcggugacccugugcuucgccagcucccagaacaucaccgaggaguucuaccagagcacgugcuccgccgucagcaagggcuaccucggggcccugcgcaccggcugguacaccuccgugaucaccaucgagcugagcaacaucaaggagaucaagugcaacgggaccgacgccaaggugaagcucaucaagcaggagcuggacaaguacaagaacgcggucacggaccugcagcuccugaugcaguccaccccggccgccggcagcggguccgccaucugcagcggcaucgcggugugcaaggugcugcaccucgagggcgaggucaacaagaucaagaacgcccugcuguccaccaacaaggccguggugagccucuccaacggggucagcgugcugaccuucaaggugcuggaccucaagaacuacaucgacaagcagcugcugcccauccucaacaagcaguccugcagcauccccaacaucgagacggucaucgaguuccagcagaagaacaaccggcugcuggagaucacccgcgaguucuccgugaacgccggcgugaccacccccgucagcacguacaugcucaccaacuccgagcugcugagccucaucaacgacaugccgaucaccaacgaccagaagaagcugaugagcaacaacgugcagaucgugcggcagcaguccuacagcaucaugugcaucaucaaggaggagguccuggccuacguggugcagcucccccuguacggggucaucgacacccccugcuggaagcugcacacgagcccccucugcaccaccaacaccaaggagggcuccaacaucugccugacgcgcaccgaccgggggugguacugcgacaacgcgggcuccgugagcuucuucccgcaggccgagaccugcaaggugcaguccaaccgcgucuucugcgacaccaugaacagccugacgcuccccuccgaggugaaccugugcaacaucgacaucuucaaccccaaguacgacugcaagaucaugaccagcaagaccgacgucuccagcuccgugaucaccagccugggcgccaucguguccugcuacgggaagacgaagugcaccgccagcaacaagaaccggggcaucaucaagaccuucuccaacgggugcgacuacgucagcaacaagggcguggacaccguguccgucggcaacacgcucuacugcgugaacaagcaggaggggcagagccuguacgugaagggcgagcccaucaucaacuucuacgacccgcuggucuuccccagcgacgaguucgacgccuccaucagccaggugaacgagaagaucaaccagucccucgcguucauccgcaagagcgacgagcugcugcacaacgugaacgucgggaaguccaccaccaacaucaugaucaccaccaucaucaucgugaucaucgugauccuccugcugcucaucgccgucggccuguuccuguacugcaaggcccggugaggacuaguguccaccugucccuccugggcugcuggauugucucguuuuccugccaaauaaacaggaucagcgcuuuacagaucuaaaaaaaaaaaaaaaaaaaaaaaaaaaaaaaaaaaaaaaaaaaaaaaaaaaaaaaaaaaaaaaaugcaucccccccccccccccccccccccccccccccaaaggcucuuuucagagccaccagaauu

SEQ ID NO: 15972 - RNA, 1826 nt, Artificial Sequence
  mRNA product Design e-3 comprising derived and/or modified sequence from HRSV(Memphis-37)__AIY60640.1__F-del_DSCav1_mut3 (opt2)
gggagacuuucccauucuguagcagaauuugguguugccuguggucuuggucccgcggagaagcuuaccauggagcuccccauccucaagaccaacgccaucaccaccauccucgccgccgucacccucugcuucgccuccucccagaacaucaccgaggaguucuaccaguccaccugcuccgccgucuccaagggcuaccucggcgcccuccgcaccggcugguacaccuccgucaucaccaucgagcucuccaacaucaaggagaucaagugcaacggcaccgacgccaaggucaagcucaucaagcaggagcucgacaaguacaagaacgccgucaccgaccuccagcuccucaugcaguccacccccgccgccggcuccggcuccgccaucugcuccggcaucgccgucugcaagguccuccaccucgagggcgaggucaacaagaucaagaacgcccuccucuccaccaacaaggccgucgucucccucuccaacggcgucuccguccucaccuucaagguccucgaccucaagaacuacaucgacaagcagcuccuccccauccucaacaagcaguccugcuccauccccaacaucgagaccgucaucgaguuccagcagaagaacaaccgccuccucgagaucacccgcgaguucuccgucaacgccggcgucaccacccccgucuccaccuacaugcucaccaacuccgagcuccucucccucaucaacgacaugcccaucaccaacgaccagaagaagcucauguccaacaacguccagaucguccgccagcaguccuacuccaucaugugcaucaucaaggaggagguccucgccuacgucguccagcucccccucuacggcgucaucgacacccccugcuggaagcuccacaccuccccccucugcaccaccaacaccaaggagggcuccaacaucugccucacccgcaccgaccgcggcugguacugcgacaacgccggcuccgucuccuucuucccccaggccgagaccugcaagguccaguccaaccgcgucuucugcgacaccaugaacucccucacccuccccuccgaggucaaccucugcaacaucgacaucuucaaccccaaguacgacugcaagaucaugaccuccaagaccgacgucuccuccuccgucaucaccucccucggcgccaucgucuccugcuacggcaagaccaagugcaccgccuccaacaagaaccgcggcaucaucaagaccuucuccaacggcugcgacuacgucuccaacaagggcgucgacaccgucuccgucggcaacacccucuacugcgucaacaagcaggagggccagucccucuacgucaagggcgagcccaucaucaacuucuacgacccccucgucuuccccuccgacgaguucgacgccuccaucucccaggucaacgagaagaucaaccagucccucgccuucauccgcaaguccgacgagcuccuccacaacgucaacgucggcaaguccaccaccaacaucaugaucaccaccaucaucaucgucaucaucgucauccuccuccuccucaucgccgucggccucuuccucuacugcaaggcccgcugaggacuaguguccaccugucccuccugggcugcuggauugucucguuuuccugccaaauaaacaggaucagcgcuuuacagaucuaaaaaaaaaaaaaaaaaaaaaaaaaaaaaaaaaaaaaaaaaaaaaaaaaaaaaaaaaaaaaaaaugcaucccccccccccccccccccccccccccccccaaaggcucuuuucagagccaccagaauu

SEQ ID NO: 15973 - RNA, 1826 nt, Artificial Sequence
  mRNA product Design e-3 comprising derived and/or modified sequence from HRSV(Memphis-37)__AIY60640.1__F-del_DSCav1_mut3 (opt3)
gggagacuuucccauucuguagcagaauuugguguugccuguggucuuggucccgcggagaagcuuaccauggagcugcccauccucaagaccaacgccauuacaacuauacuugcugcagugacgcugugcuucgccagcucccagaauaucaccgaagaguuuuaccaaucuacauguucagcggucaguaaaggcuauuugggggcuuuaagaacuggaugguacaccagcguuauuacaaucgaacuguccaacauuaaggagaucaaaugcaaugguaccgacgccaaggugaaacuaauaaagcaggaacucgauaaguauaaaaacgcaguaacugaccugcagcuucugaugcagucuacuccugccgcuggcucggggucagcaaucuguagcggaauugccgugugcaaggucuugcaccucgagggcgaggugaauaaaaucaagaacgcucugcugaguaccaauaaagccguugugucccucucuaacggugucagcguguuaacguucaagguacuggaucuuaagaauuacauugacaaacaauugcugccaauccuaaacaagcaguccuguucaauaccgaauauugaaacuguuaucgaguuucagcagaaaaacaauaggcuccuggaaauuacccgggaguucagugugaacgcgggggucacaacucccgugagcaccuauaugcuuacaaauucugagcuguugucccucaucaacgauaugccuaucaccaacgaccaaaagaaacugaugucaaauaacgugcagauuguccgccagcagagcuacaguauaaugugcaucauuaaggaagagguuuuagcauaugugguacaacugccacucuacggagugaucgauacgcccuguuggaaacuucauacuucuccucugugcacaaccaauacuaaggaaggcuccaacauauguuugacacgaaccgaccguggcugguacugcgauaaugccgggagcgucucguuuuucccacaggcugagacguguaaggugcagucuaacagaguuuucugcgacaccaugaacucccuaacacugcccucagaagugaaucucugcaauauugauaucuucaacccuaaauaugacuguaagaucaugacaaguaaaaccgaugucagcuccucugugauuacaagccugggagccaucguaucaugcuacgguaagacuaaauguaccgcaaguaauaagaacaggggcauuauaaagacauuuuccaaugggugcgacuauguuagcaacaaaggaguggacaccgucucugugggcaauacucuuuacugugucaacaagcaagagggucagucacuguaugugaaaggggagccaaucauuaacuucuacgauccguugguuuuucccagugacgaauuugaugcuagcaucucccaggugaaugagaagaucaaccagucucucgccuuuauucggaaaucggacgaacuguuacacaauguaaacgucggaaagagcacgacaaauauaaugaucaccacuauuaucauugugaucauaguuauccugcuacuccugauugcggugggccuuuucuuguauugcaaggcccgcugaggacuaguguccaccugucccuccugggcugcuggauugucucguuuuccugccaaauaaacaggaucagcgcuuuacagaucuaaaaaaaaaaaaaaaaaaaaaaaaaaaaaaaaaaaaaaaaaaaaaaaaaaaaaaaaaaaaaaaaugcaucccccccccccccccccccccccccccccccaaaggcucuuuucagagccaccagaauu

SEQ ID NO: 15974 - RNA, 1826 nt, Artificial Sequence
  mRNA product Design e-3 comprising derived and/or modified sequence from HRSV(Memphis-37)__AIY60640.1__F-del_DSCav1_mut3 (opt4)
gggagacuuucccauucuguagcagaauuugguguugccuguggucuuggucccgcggagaagcuuaccauggagcugcccauccugaagaccaacgccaucaccaccauccuggccgccgugacccugugcuucgccagcagccagaacaucaccgaggaguucuaccagagcaccugcagcgccgugagcaagggcuaccugggcgcccugagaaccggcugguacaccagcgugaucaccaucgagcugagcaacaucaaggagaucaagugcaacggcaccgacgccaaggugaagcugaucaagcaggagcuggacaaguacaagaacgccgugaccgaccugcagcugcugaugcagagcacccccgccgccggcagcggcagcgccaucugcagcggcaucgccgugugcaaggugcugcaccuggagggcgaggugaacaagaucaagaacgcccugcugagcaccaacaaggccguggugagccugagcaacggcgugagcgugcugaccuucaaggugcuggaccugaagaacuacaucgacaagcagcugcugcccauccugaacaagcagagcugcagcauccccaacaucgagaccgugaucgaguuccagcagaagaacaacagacugcuggagaucaccagagaguucagcgugaacgccggcgugaccacccccgugagcaccuacaugcugaccaacagcgagcugcugagccugaucaacgacaugcccaucaccaacgaccagaagaagcugaugagcaacaacgugcagaucgugagacagcagagcuacagcaucaugugcaucaucaaggaggaggugcuggccuacguggugcagcugccccuguacggcgugaucgacacccccugcuggaagcugcacaccagcccccugugcaccaccaacaccaaggagggcagcaacaucugccugaccagaaccgacagaggcugguacugcgacaacgccggcagcgugagcuucuucccccaggccgagaccugcaaggugcagagcaacagaguguucugcgacaccaugaacagccugacccugcccagcgaggugaaccugugcaacaucgacaucuucaaccccaaguacgacugcaagaucaugaccagcaagaccgacgugagcagcagcgugaucaccagccugggcgccaucgugagcugcuacggcaagaccaagugcaccgccagcaacaagaacagaggcaucaucaagaccuucagcaacggcugcgacuacgugagcaacaagggcguggacaccgugagcgugggcaacacccuguacugcgugaacaagcaggagggccagagccuguacgugaagggcgagcccaucaucaacuucuacgacccccugguguuccccagcgacgaguucgacgccagcaucagccaggugaacgagaagaucaaccagagccuggccuucaucagaaagagcgacgagcugcugcacaacgugaacgugggcaagagcaccaccaacaucaugaucaccaccaucaucaucgugaucaucgugauccugcugcugcugaucgccgugggccuguuccuguacugcaaggccagaugaggacuaguguccaccugucccuccugggcugcuggauugucucguuuuccugccaaauaaacaggaucagcgcuuuacagaucuaaaaaaaaaaaaaaaaaaaaaaaaaaaaaaaaaaaaaaaaaaaaaaaaaaaaaaaaaaaaaaaaugcaucccccccccccccccccccccccccccccccaaaggcucuuuucagagccaccagaauu

SEQ ID NO: 15975 - RNA, 1826 nt, Artificial Sequence
  mRNA product Design e-3 comprising derived and/or modified sequence from HRSV(Memphis-37)__AIY60640.1__F-del_DSCav1_mut3 (opt5)
gggagacuuucccauucuguagcagaauuugguguugccuguggucuuggucccgcggagaagcuuaccauggagcugcccauccucaagaccaacgccauuacaacgauccuggcugccgugacccuuugcuucgcgagcucccagaauauuacagaagaguuuuaccaaucuaccuguagcgcugucuccaaaggcuaucugggggcccucagaacaggaugguacaccucuguuaucacaauugaacugagcaacaucaaggagaucaaaugcaauggcaccgacgccaaggugaaacuuauuaagcaggaacuggauaaguauaaaaacgcugugacggaccuccagcugcugaugcaguccaccccugccgcugggucuggaagcgccaucuguuccggcauugcggucugcaaggugcuccaccuggagggggagguuaauaaaaucaagaacgcccuucugagcacaaauaaagcuguggucucucucuccaacggagugagcguucugaccuucaaggugcuugaucugaagaauuacauugacaaacaacuccugccgauccugaacaagcagucuuguuccauucccaauaucgaaacagucaucgaguuucagcagaaaaacaaucggcuccuggaaauuacccgcgaguucagcgugaacgccggcgugacgacaccugucucuaccuauaugcuuacaaauuccgagcugcucagccugaucaacgauaugcccauuaccaacgaccaaaagaaacuuauguccaauaacguucagaucgugagacagcagucuuacagcauuaugugcaucaucaaggaagaggugcuggcuuaugucgugcaacucccucuguacggcguuauugauacccccuguuggaaacugcauacauccccucucugcacgaccaauacaaaggaagggagcaacaucugucugacccggacagaccgcggaugguacugcgauaaugccggcucuguguccuuuuucccgcaggcggagaccuguaagguccagagcaacagaguguuuugcgacacgaugaacucucuuacacugcccagcgaaguuaaucucugcaauauugauaucuucaacccuaaauaugacuguaagauuaugaccuccaaaaccgaugugucuagcuccgucaucacaagccugggggccaucgugucuugcuacggaaagaccaaauguacagcuuccaauaagaaccggggcauuaucaagacguuuagcaaugggugcgacuaugucucuaacaaaggaguggacaccguuuccgugggcaauacacuuuacugugucaacaagcaagagggccagagccuguaugugaaaggggagcccauuaucaacuucuacgauccucucguuuuucccuccgacgaguucgaugccucuauuagccaggugaaugaaaagaucaaccagucccuggcuuuuauucgcaaaucugacgaacugcuccacaaugucaacgugggaaagagcaccacaaauaucaugaucaccacgauuaucauugugaucauuguuauccugcuucugcucaucgccgucggccuguuccuguauugcaaggccagaugaggacuaguguccaccugucccuccugggcugcuggauugucucguuuuccugccaaauaaacaggaucagcgcuuuacagaucuaaaaaaaaaaaaaaaaaaaaaaaaaaaaaaaaaaaaaaaaaaaaaaaaaaaaaaaaaaaaaaaaugcaucccccccccccccccccccccccccccccccaaaggcucuuuucagagccaccagaauu

SEQ ID NO: 15976 - RNA, 1826 nt, Artificial Sequence
  mRNA product Design e-3 comprising derived and/or modified sequence from HRSV(Memphis-37)__AIY60640.1__F-del_DSCav1_mut3 (opt6)
gggagacuuucccauucuguagcagaauuugguguugccuguggucuuggucccgcggagaagcuuaccauggaacuacccauccuaaaaacaaaugccauaaccacaauacucgccgcuguaacacuauguuucgcuaguucacaaaacauuacagaagaauuuuaccaauccacaugcucagcaguaucaaaaggauaccuaggugcacuaagaacaggaugguacacaagcguaauuacaauagaauuauccaauauuaaagaaauaaaauguaacggcacugacgcuaaaguaaaauuaaucaaacaagaacuagacaaauacaaaaacgcaguaacagaccuacaauuacucaugcaauccacacccgcagcaggaucaggcucagccauaugcucagguauagcaguaugcaaaguacuccaccuugaaggagaaguaaacaaaauaaaaaacgcauuacuaucaacaaacaaagcaguaguaucacuaucaaacggagucucugucuuaaccuuuaaaguauuagauuuaaaaaacuacauagacaaacaacuauuaccaauucuaaauaaacaaucauguucuauaccaaauauagaaacaguaauagaauuucaacaaaaaaacaaccgauuacuagaaaucacaagagaauuuucugucaacgccggcguaaccaccccagucucaacauauaugcuaacaaauagugaacucuuauccuuaauaaacgacaugccaauaacaaaugaccaaaaaaaauuaauguccaauaacguacaaauagucagacaacagucauacucaauaauguguaucaucaaagaagaaguauuagcauacguaguucaacuaccccuauacggcguaauagacacaccauguuggaaacuacacacaucacccuuaugcacaaccaauaccaaagaaggaucuaacauaugccuaaccagaacagacagaggcugguacugcgacaacgcagguucagucucauucuucccacaagccgaaacaugcaaaguccaauccaacagaguauuuugcgacacuaugaacucacuaacucuaccuucagaagucaaccuuuguaacauagacauauuuaacccaaaauacgauuguaaaauaaugaccagcaaaacagacgucucaucaagcguaauaacaucacuuggcgcaauagucuccugcuacggaaaaacaaaaugcacagcauccaacaaaaacagaggcaucauaaaaaccuucuccaacggcugcgacuauguaagcaacaaaggugucgauacaguaucaguaggaaacacacuauacugcguaaacaaacaagaaggacaaucacucuacguaaaaggugaaccaaucauaaacuucuacgacccauuaguuuucccaucagacgaauuugaugccuccauaucacaaguaaaugaaaaaauaaaucaaucccuagcauucauacgaaaaucugaugaauuacuucacaaugucaacgucggaaaaucaaccacuaacauaaugauaacaacaauuauaauaguaauaauaguaauacuccuacuauuaauagccgucggucuuuuccuauacugcaaagcacgauaaggacuaguguccaccugucccuccugggcugcuggauugucucguuuuccugccaaauaaacaggaucagcgcuuuacagaucuaaaaaaaaaaaaaaaaaaaaaaaaaaaaaaaaaaaaaaaaaaaaaaaaaaaaaaaaaaaaaaaaugcaucccccccccccccccccccccccccccccccaaaggcucuuuucagagccaccagaauu

SEQ ID NO: 15977 - RNA, 1826 nt, Artificial Sequence
  mRNA product Design e-3 comprising derived and/or modified sequence from HRSV(Memphis-37)__AIY60640.1__F-del_DSCav1_mut3 (opt11)
gggagacuuucccauucuguagcagaauuugguguugccuguggucuuggucccgcggagaagcuuaccauggaacuacccauccucaaaaccaacgccaucaccacaauccuagcugccgucacccuaugcuucgcaagcagccaaaacaucacagaagaauuuuaccaaucaaccugcuccgccgucuccaaaggguaccuaggugcccuccgcaccggcugguacacgucugucauaaccaucgaacucuccaacaucaaagaaaucaaauguaacggaacagacgcaaaagucaaacuaaucaaacaagaacuagacaaauacaaaaacgccguaaccgaccuccaacugcucaugcaauccacccccgcugccggcuccgggagcgcaaucugcucuggaaucgccguaugcaaaguccuccaccucgaaggagaaguaaacaaaaucaaaaacgcgcuccucaguaccaacaaagccgucgucucucuaucaaacggcguaucgguccucaccuucaaaguccucgaccuaaagaacuacauagacaaacaacuccuccccauccuaaacaaacaauccugcucaaucccaaacaucgaaaccgugaucgaguuccaacagaaaaacaaccgccuacucgaaaucacccgagaguucucagucaacgcaggagucaccacccccgucucaacauacaugcuuaccaacagcgaacuccuaucccucaucaacgacaugccaaucacaaacgaccaaaagaaacucaugagcaacaacguccagaucguaagacaacaaagcuacagcaucaugugcaucaucaaagaagaaguacuagcauacgucguccaacucccccucuacggcgucaucgacacccccugcuggaaacuccacaccucaccccucugcacaaccaacaccaaagaaggcuccaauaucugccucacacgcaccgaccgcggcugguacugcgacaacgccggcuccgucuccuucuucccucaagccgaaaccugcaaaguccaguccaacagagucuucugcgacaccaugaacucccuaacacuuccaucagaagucaaccuuuguaacaucgacaucuucaaucccaaauacgacuguaaaauaaugaccucaaaaacugacgugucaagcucaguuaucaccucccuaggggccaucgucuccugcuacggcaaaacaaaaugcaccgcauccaacaaaaaucgcggaaucaucaaaacauucuccaacggaugcgacuacgucucaaacaagggaguagauaccguaagcguuggcaacacccucuacugcguaaacaaacaagaaggccaaucacucuacgucaaaggcgaacccauaaucaacuucuacgacccccucgucuucccuuccgaugaguucgacgccagcaucucccaagucaacgagaaaauaaaccagucacucgcauucauccgcaaaagcgacgaacuccuccacaacguaaacguaggcaaauccacaaccaauaucaugauaaccacaaucaucaucgugaucaucgucauccuccuccuccucauagcugucggacucuuccucuacuguaaagcacgcugaggacuaguguccaccugucccuccugggcugcuggauugucucguuuuccugccaaauaaacaggaucagcgcuuuacagaucuaaaaaaaaaaaaaaaaaaaaaaaaaaaaaaaaaaaaaaaaaaaaaaaaaaaaaaaaaaaaaaaaugcaucccccccccccccccccccccccccccccccaaaggcucuuuucagagccaccagaauu

SEQ ID NO: 15978 - RNA, 1880 nt, Artificial Sequence
  mRNA product Design e-4 comprising derived and/or modified sequence from HRSV(Memphis-37)__AIY60640.1__F-del_DSCav1_mut3 (opt1)
gggagacuccugucgggcggaaguaggaggaguagaguuuaaaaacaguacucuuuuuccgguucgggacguaguugaagcaacgacaagccggauaaccgcucuugagacaggaagcuuaccauggagcugcccauccucaagaccaacgccaucaccacgauccuggccgcggugacccugugcuucgccagcucccagaacaucaccgaggaguucuaccagagcacgugcuccgccgucagcaagggcuaccucggcgcccugcgcaccgggugguacaccagcgugaucaccaucgagcuguccaacaucaaggagaucaagugcaacggcaccgacgccaaggugaagcucaucaagcaggagcuggacaaguacaagaacgcggucacggaccugcagcuccugaugcagagcaccccggccgccggcuccgggagcgcgaucugcuccggcaucgccgucugcaaggugcugcaccucgagggcgaggugaacaagaucaagaacgcccugcuguccaccaacaaggccgucgugagccucuccaacggggugagcguccugaccuucaaggugcuggaccucaagaacuacaucgacaagcagcugcugcccauccugaacaagcagagcugcuccauccccaacaucgagaccgucaucgaguuccagcagaagaacaaccgccuccuggagaucacgcgggaguucagcgugaacgcgggcgugaccacccccgucuccaccuacaugcugacgaacagcgagcuccugucccugaucaacgacaugccgaucaccaacgaccagaagaagcucaugagcaacaacgugcagaucgugcgccagcaguccuacagcaucaugugcaucaucaaggaggagguccuggccuacguggugcagcugccccucuacggggucaucgacacccccugcuggaagcugcacaccagcccccugugcacgaccaacaccaaggagggcuccaacaucugccucacccggacggaccgcgggugguacugcgacaacgccggcagcguguccuucuucccgcaggccgagaccugcaagguccagagcaaccggguguucugcgacaccaugaacucccugacccugcccagcgaggugaaccucugcaacaucgacaucuucaaccccaaguacgacugcaagaucaugacguccaagaccgacgucagcuccagcgugaucaccucccugggcgccaucgugagcugcuacgggaagaccaagugcacggcgagcaacaagaaccgcggcaucaucaagaccuucuccaacgggugcgacuacgucagcaacaagggcguggacaccguguccgucggcaacacccuguacugcgugaacaagcaggagggccagagccucuacgugaagggggagcccaucaucaacuucuacgacccgcuggucuuccccuccgacgaguucgacgccagcaucucccaggugaacgagaagaucaaccagagccuggccuucauccggaaguccgacgagcuccugcacaacgugaacgucggcaagagcaccacgaacaucaugaucaccaccaucaucaucgugaucaucgugauccugcugcuccugaucgccgucgggcuguuccucuacugcaaggcccgcugaggacuaguguccaccugucccuccugggcugcuggauugucucguuuuccugccaaauaaacaggaucagcgcuuuacagaucuaaaaaaaaaaaaaaaaaaaaaaaaaaaaaaaaaaaaaaaaaaaaaaaaaaaaaaaaaaaaaaaaugcaucccccccccccccccccccccccccccccccaaaggcucuuuucagagccaccagaauu

SEQ ID NO: 15979 - RNA, 1880 nt, Artificial Sequence
  mRNA product Design e-4 comprising derived and/or modified sequence from HRSV(Memphis-37)__AIY60640.1__F-del_DSCav1_mut3 (opt1)
gggagacuccugucgggcggaaguaggaggaguagaguuuaaaaacaguacucuuuuuccgguucgggacguaguugaagcaacgacaagccggauaaccgcucuugagacaggaagcuuaccauggagcugcccauccucaagaccaacgccaucaccacgauccuggccgcggugacccugugcuucgccagcucccagaacaucaccgaggaguucuaccagagcacgugcuccgccgucagcaagggcuaccucggggcccugcgcaccggcugguacaccuccgugaucaccaucgagcugagcaacaucaaggagaucaagugcaacgggaccgacgccaaggugaagcucaucaagcaggagcuggacaaguacaagaacgcggucacggaccugcagcuccugaugcaguccaccccggccgccggcagcggguccgccaucugcagcggcaucgcggugugcaaggugcugcaccucgagggcgaggucaacaagaucaagaacgcccugcuguccaccaacaaggccguggugagccucuccaacggggucagcgugcugaccuucaaggugcuggaccucaagaacuacaucgacaagcagcugcugcccauccucaacaagcaguccugcagcauccccaacaucgagacggucaucgaguuccagcagaagaacaaccggcugcuggagaucacccgcgaguucuccgugaacgccggcgugaccacccccgucagcacguacaugcucaccaacuccgagcugcugagccucaucaacgacaugccgaucaccaacgaccagaagaagcugaugagcaacaacgugcagaucgugcggcagcaguccuacagcaucaugugcaucaucaaggaggagguccuggccuacguggugcagcucccccuguacggggucaucgacacccccugcuggaagcugcacacgagcccccucugcaccaccaacaccaaggagggcuccaacaucugccugacgcgcaccgaccgggggugguacugcgacaacgcgggcuccgugagcuucuucccgcaggccgagaccugcaaggugcaguccaaccgcgucuucugcgacaccaugaacagccugacgcuccccuccgaggugaaccugugcaacaucgacaucuucaaccccaaguacgacugcaagaucaugaccagcaagaccgacgucuccagcuccgugaucaccagccugggcgccaucguguccugcuacgggaagacgaagugcaccgccagcaacaagaaccggggcaucaucaagaccuucuccaacgggugcgacuacgucagcaacaagggcguggacaccguguccgucggcaacacgcucuacugcgugaacaagcaggaggggcagagccuguacgugaagggcgagcccaucaucaacuucuacgacccgcuggucuuccccagcgacgaguucgacgccuccaucagccaggugaacgagaagaucaaccagucccucgcguucauccgcaagagcgacgagcugcugcacaacgugaacgucgggaaguccaccaccaacaucaugaucaccaccaucaucaucgugaucaucgugauccuccugcugcucaucgccgucggccuguuccuguacugcaaggcccggugaggacuaguguccaccugucccuccugggcugcuggauugucucguuuuccugccaaauaaacaggaucagcgcuuuacagaucuaaaaaaaaaaaaaaaaaaaaaaaaaaaaaaaaaaaaaaaaaaaaaaaaaaaaaaaaaaaaaaaaugcaucccccccccccccccccccccccccccccccaaaggcucuuuucagagccaccagaauu

SEQ ID NO: 15980 - RNA, 1880 nt, Artificial Sequence
  mRNA product Design e-4 comprising derived and/or modified sequence from HRSV(Memphis-37)__AIY60640.1__F-del_DSCav1_mut3 (opt2)
gggagacuccugucgggcggaaguaggaggaguagaguuuaaaaacaguacucuuuuuccgguucgggacguaguugaagcaacgacaagccggauaaccgcucuugagacaggaagcuuaccauggagcuccccauccucaagaccaacgccaucaccaccauccucgccgccgucacccucugcuucgccuccucccagaacaucaccgaggaguucuaccaguccaccugcuccgccgucuccaagggcuaccucggcgcccuccgcaccggcugguacaccuccgucaucaccaucgagcucuccaacaucaaggagaucaagugcaacggcaccgacgccaaggucaagcucaucaagcaggagcucgacaaguacaagaacgccgucaccgaccuccagcuccucaugcaguccacccccgccgccggcuccggcuccgccaucugcuccggcaucgccgucugcaagguccuccaccucgagggcgaggucaacaagaucaagaacgcccuccucuccaccaacaaggccgucgucucccucuccaacggcgucuccguccucaccuucaagguccucgaccucaagaacuacaucgacaagcagcuccuccccauccucaacaagcaguccugcuccauccccaacaucgagaccgucaucgaguuccagcagaagaacaaccgccuccucgagaucacccgcgaguucuccgucaacgccggcgucaccacccccgucuccaccuacaugcucaccaacuccgagcuccucucccucaucaacgacaugcccaucaccaacgaccagaagaagcucauguccaacaacguccagaucguccgccagcaguccuacuccaucaugugcaucaucaaggaggagguccucgccuacgucguccagcucccccucuacggcgucaucgacacccccugcuggaagcuccacaccuccccccucugcaccaccaacaccaaggagggcuccaacaucugccucacccgcaccgaccgcggcugguacugcgacaacgccggcuccgucuccuucuucccccaggccgagaccugcaagguccaguccaaccgcgucuucugcgacaccaugaacucccucacccuccccuccgaggucaaccucugcaacaucgacaucuucaaccccaaguacgacugcaagaucaugaccuccaagaccgacgucuccuccuccgucaucaccucccucggcgccaucgucuccugcuacggcaagaccaagugcaccgccuccaacaagaaccgcggcaucaucaagaccuucuccaacggcugcgacuacgucuccaacaagggcgucgacaccgucuccgucggcaacacccucuacugcgucaacaagcaggagggccagucccucuacgucaagggcgagcccaucaucaacuucuacgacccccucgucuuccccuccgacgaguucgacgccuccaucucccaggucaacgagaagaucaaccagucccucgccuucauccgcaaguccgacgagcuccuccacaacgucaacgucggcaaguccaccaccaacaucaugaucaccaccaucaucaucgucaucaucgucauccuccuccuccucaucgccgucggccucuuccucuacugcaaggcccgcugaggacuaguguccaccugucccuccugggcugcuggauugucucguuuuccugccaaauaaacaggaucagcgcuuuacagaucuaaaaaaaaaaaaaaaaaaaaaaaaaaaaaaaaaaaaaaaaaaaaaaaaaaaaaaaaaaaaaaaaugcaucccccccccccccccccccccccccccccccaaaggcucuuuucagagccaccagaauu

SEQ ID NO: 15981 - RNA, 1880 nt, Artificial Sequence
  mRNA product Design e-4 comprising derived and/or modified sequence from HRSV(Memphis-37)__AIY60640.1__F-del_DSCav1_mut3 (opt3)
gggagacuccugucgggcggaaguaggaggaguagaguuuaaaaacaguacucuuuuuccgguucgggacguaguugaagcaacgacaagccggauaaccgcucuugagacaggaagcuuaccauggagcugcccauccucaagaccaacgccauuacaacuauacuugcugcagugacgcugugcuucgccagcucccagaauaucaccgaagaguuuuaccaaucuacauguucagcggucaguaaaggcuauuugggggcuuuaagaacuggaugguacaccagcguuauuacaaucgaacuguccaacauuaaggagaucaaaugcaaugguaccgacgccaaggugaaacuaauaaagcaggaacucgauaaguauaaaaacgcaguaacugaccugcagcuucugaugcagucuacuccugccgcuggcucggggucagcaaucuguagcggaauugccgugugcaaggucuugcaccucgagggcgaggugaauaaaaucaagaacgcucugcugaguaccaauaaagccguugugucccucucuaacggugucagcguguuaacguucaagguacuggaucuuaagaauuacauugacaaacaauugcugccaauccuaaacaagcaguccuguucaauaccgaauauugaaacuguuaucgaguuucagcagaaaaacaauaggcuccuggaaauuacccgggaguucagugugaacgcgggggucacaacucccgugagcaccuauaugcuuacaaauucugagcuguugucccucaucaacgauaugccuaucaccaacgaccaaaagaaacugaugucaaauaacgugcagauuguccgccagcagagcuacaguauaaugugcaucauuaaggaagagguuuuagcauaugugguacaacugccacucuacggagugaucgauacgcccuguuggaaacuucauacuucuccucugugcacaaccaauacuaaggaaggcuccaacauauguuugacacgaaccgaccguggcugguacugcgauaaugccgggagcgucucguuuuucccacaggcugagacguguaaggugcagucuaacagaguuuucugcgacaccaugaacucccuaacacugcccucagaagugaaucucugcaauauugauaucuucaacccuaaauaugacuguaagaucaugacaaguaaaaccgaugucagcuccucugugauuacaagccugggagccaucguaucaugcuacgguaagacuaaauguaccgcaaguaauaagaacaggggcauuauaaagacauuuuccaaugggugcgacuauguuagcaacaaaggaguggacaccgucucugugggcaauacucuuuacugugucaacaagcaagagggucagucacuguaugugaaaggggagccaaucauuaacuucuacgauccguugguuuuucccagugacgaauuugaugcuagcaucucccaggugaaugagaagaucaaccagucucucgccuuuauucggaaaucggacgaacuguuacacaauguaaacgucggaaagagcacgacaaauauaaugaucaccacuauuaucauugugaucauaguuauccugcuacuccugauugcggugggccuuuucuuguauugcaaggcccgcugaggacuaguguccaccugucccuccugggcugcuggauugucucguuuuccugccaaauaaacaggaucagcgcuuuacagaucuaaaaaaaaaaaaaaaaaaaaaaaaaaaaaaaaaaaaaaaaaaaaaaaaaaaaaaaaaaaaaaaaugcaucccccccccccccccccccccccccccccccaaaggcucuuuucagagccaccagaauu

SEQ ID NO: 15982 - RNA, 1880 nt, Artificial Sequence
  mRNA product Design e-4 comprising derived and/or modified sequence from HRSV(Memphis-37)__AIY60640.1__F-del_DSCav1_mut3 (opt4)
gggagacuccugucgggcggaaguaggaggaguagaguuuaaaaacaguacucuuuuuccgguucgggacguaguugaagcaacgacaagccggauaaccgcucuugagacaggaagcuuaccauggagcugcccauccugaagaccaacgccaucaccaccauccuggccgccgugacccugugcuucgccagcagccagaacaucaccgaggaguucuaccagagcaccugcagcgccgugagcaagggcuaccugggcgcccugagaaccggcugguacaccagcgugaucaccaucgagcugagcaacaucaaggagaucaagugcaacggcaccgacgccaaggugaagcugaucaagcaggagcuggacaaguacaagaacgccgugaccgaccugcagcugcugaugcagagcacccccgccgccggcagcggcagcgccaucugcagcggcaucgccgugugcaaggugcugcaccuggagggcgaggugaacaagaucaagaacgcccugcugagcaccaacaaggccguggugagccugagcaacggcgugagcgugcugaccuucaaggugcuggaccugaagaacuacaucgacaagcagcugcugcccauccugaacaagcagagcugcagcauccccaacaucgagaccgugaucgaguuccagcagaagaacaacagacugcuggagaucaccagagaguucagcgugaacgccggcgugaccacccccgugagcaccuacaugcugaccaacagcgagcugcugagccugaucaacgacaugcccaucaccaacgaccagaagaagcugaugagcaacaacgugcagaucgugagacagcagagcuacagcaucaugugcaucaucaaggaggaggugcuggccuacguggugcagcugccccuguacggcgugaucgacacccccugcuggaagcugcacaccagcccccugugcaccaccaacaccaaggagggcagcaacaucugccugaccagaaccgacagaggcugguacugcgacaacgccggcagcgugagcuucuucccccaggccgagaccugcaaggugcagagcaacagaguguucugcgacaccaugaacagccugacccugcccagcgaggugaaccugugcaacaucgacaucuucaaccccaaguacgacugcaagaucaugaccagcaagaccgacgugagcagcagcgugaucaccagccugggcgccaucgugagcugcuacggcaagaccaagugcaccgccagcaacaagaacagaggcaucaucaagaccuucagcaacggcugcgacuacgugagcaacaagggcguggacaccgugagcgugggcaacacccuguacugcgugaacaagcaggagggccagagccuguacgugaagggcgagcccaucaucaacuucuacgacccccugguguuccccagcgacgaguucgacgccagcaucagccaggugaacgagaagaucaaccagagccuggccuucaucagaaagagcgacgagcugcugcacaacgugaacgugggcaagagcaccaccaacaucaugaucaccaccaucaucaucgugaucaucgugauccugcugcugcugaucgccgugggccuguuccuguacugcaaggccagaugaggacuaguguccaccugucccuccugggcugcuggauugucucguuuuccugccaaauaaacaggaucagcgcuuuacagaucuaaaaaaaaaaaaaaaaaaaaaaaaaaaaaaaaaaaaaaaaaaaaaaaaaaaaaaaaaaaaaaaaugcaucccccccccccccccccccccccccccccccaaaggcucuuuucagagccaccagaauu

SEQ ID NO: 15983 - RNA, 1880 nt, Artificial Sequence
  mRNA product Design e-4 comprising derived and/or modified sequence from HRSV(Memphis-37)__AIY60640.1__F-del_DSCav1_mut3 (opt5)
gggagacuccugucgggcggaaguaggaggaguagaguuuaaaaacaguacucuuuuuccgguucgggacguaguugaagcaacgacaagccggauaaccgcucuugagacaggaagcuuaccauggagcugcccauccucaagaccaacgccauuacaacgauccuggcugccgugacccuuugcuucgcgagcucccagaauauuacagaagaguuuuaccaaucuaccuguagcgcugucuccaaaggcuaucugggggcccucagaacaggaugguacaccucuguuaucacaauugaacugagcaacaucaaggagaucaaaugcaauggcaccgacgccaaggugaaacuuauuaagcaggaacuggauaaguauaaaaacgcugugacggaccuccagcugcugaugcaguccaccccugccgcugggucuggaagcgccaucuguuccggcauugcggucugcaaggugcuccaccuggagggggagguuaauaaaaucaagaacgcccuucugagcacaaauaaagcuguggucucucucuccaacggagugagcguucugaccuucaaggugcuugaucugaagaauuacauugacaaacaacuccugccgauccugaacaagcagucuuguuccauucccaauaucgaaacagucaucgaguuucagcagaaaaacaaucggcuccuggaaauuacccgcgaguucagcgugaacgccggcgugacgacaccugucucuaccuauaugcuuacaaauuccgagcugcucagccugaucaacgauaugcccauuaccaacgaccaaaagaaacuuauguccaauaacguucagaucgugagacagcagucuuacagcauuaugugcaucaucaaggaagaggugcuggcuuaugucgugcaacucccucuguacggcguuauugauacccccuguuggaaacugcauacauccccucucugcacgaccaauacaaaggaagggagcaacaucugucugacccggacagaccgcggaugguacugcgauaaugccggcucuguguccuuuuucccgcaggcggagaccuguaagguccagagcaacagaguguuuugcgacacgaugaacucucuuacacugcccagcgaaguuaaucucugcaauauugauaucuucaacccuaaauaugacuguaagauuaugaccuccaaaaccgaugugucuagcuccgucaucacaagccugggggccaucgugucuugcuacggaaagaccaaauguacagcuuccaauaagaaccggggcauuaucaagacguuuagcaaugggugcgacuaugucucuaacaaaggaguggacaccguuuccgugggcaauacacuuuacugugucaacaagcaagagggccagagccuguaugugaaaggggagcccauuaucaacuucuacgauccucucguuuuucccuccgacgaguucgaugccucuauuagccaggugaaugaaaagaucaaccagucccuggcuuuuauucgcaaaucugacgaacugcuccacaaugucaacgugggaaagagcaccacaaauaucaugaucaccacgauuaucauugugaucauuguuauccugcuucugcucaucgccgucggccuguuccuguauugcaaggccagaugaggacuaguguccaccugucccuccugggcugcuggauugucucguuuuccugccaaauaaacaggaucagcgcuuuacagaucuaaaaaaaaaaaaaaaaaaaaaaaaaaaaaaaaaaaaaaaaaaaaaaaaaaaaaaaaaaaaaaaaugcaucccccccccccccccccccccccccccccccaaaggcucuuuucagagccaccagaauu

SEQ ID NO: 15984 - RNA, 1880 nt, Artificial Sequence
  mRNA product Design e-4 comprising derived and/or modified sequence from HRSV(Memphis-37)__AIY60640.1__F-del_DSCav1_mut3 (opt6)
gggagacuccugucgggcggaaguaggaggaguagaguuuaaaaacaguacucuuuuuccgguucgggacguaguugaagcaacgacaagccggauaaccgcucuugagacaggaagcuuaccauggaacuacccauccuaaaaacaaaugccauaaccacaauacucgccgcuguaacacuauguuucgcuaguucacaaaacauuacagaagaauuuuaccaauccacaugcucagcaguaucaaaaggauaccuaggugcacuaagaacaggaugguacacaagcguaauuacaauagaauuauccaauauuaaagaaauaaaauguaacggcacugacgcuaaaguaaaauuaaucaaacaagaacuagacaaauacaaaaacgcaguaacagaccuacaauuacucaugcaauccacacccgcagcaggaucaggcucagccauaugcucagguauagcaguaugcaaaguacuccaccuugaaggagaaguaaacaaaauaaaaaacgcauuacuaucaacaaacaaagcaguaguaucacuaucaaacggagucucugucuuaaccuuuaaaguauuagauuuaaaaaacuacauagacaaacaacuauuaccaauucuaaauaaacaaucauguucuauaccaaauauagaaacaguaauagaauuucaacaaaaaaacaaccgauuacuagaaaucacaagagaauuuucugucaacgccggcguaaccaccccagucucaacauauaugcuaacaaauagugaacucuuauccuuaauaaacgacaugccaauaacaaaugaccaaaaaaaauuaauguccaauaacguacaaauagucagacaacagucauacucaauaauguguaucaucaaagaagaaguauuagcauacguaguucaacuaccccuauacggcguaauagacacaccauguuggaaacuacacacaucacccuuaugcacaaccaauaccaaagaaggaucuaacauaugccuaaccagaacagacagaggcugguacugcgacaacgcagguucagucucauucuucccacaagccgaaacaugcaaaguccaauccaacagaguauuuugcgacacuaugaacucacuaacucuaccuucagaagucaaccuuuguaacauagacauauuuaacccaaaauacgauuguaaaauaaugaccagcaaaacagacgucucaucaagcguaauaacaucacuuggcgcaauagucuccugcuacggaaaaacaaaaugcacagcauccaacaaaaacagaggcaucauaaaaaccuucuccaacggcugcgacuauguaagcaacaaaggugucgauacaguaucaguaggaaacacacuauacugcguaaacaaacaagaaggacaaucacucuacguaaaaggugaaccaaucauaaacuucuacgacccauuaguuuucccaucagacgaauuugaugccuccauaucacaaguaaaugaaaaaauaaaucaaucccuagcauucauacgaaaaucugaugaauuacuucacaaugucaacgucggaaaaucaaccacuaacauaaugauaacaacaauuauaauaguaauaauaguaauacuccuacuauuaauagccgucggucuuuuccuauacugcaaagcacgauaaggacuaguguccaccugucccuccugggcugcuggauugucucguuuuccugccaaauaaacaggaucagcgcuuuacagaucuaaaaaaaaaaaaaaaaaaaaaaaaaaaaaaaaaaaaaaaaaaaaaaaaaaaaaaaaaaaaaaaaugcaucccccccccccccccccccccccccccccccaaaggcucuuuucagagccaccagaauu

SEQ ID NO: 15985 - RNA, 1880 nt, Artificial Sequence
  mRNA product Design e-4 comprising derived and/or modified sequence from HRSV(Memphis-37)__AIY60640.1__F-del_DSCav1_mut3 (opt11)
gggagacuccugucgggcggaaguaggaggaguagaguuuaaaaacaguacucuuuuuccgguucgggacguaguugaagcaacgacaagccggauaaccgcucuugagacaggaagcuuaccauggaacuacccauccucaaaaccaacgccaucaccacaauccuagcugccgucacccuaugcuucgcaagcagccaaaacaucacagaagaauuuuaccaaucaaccugcuccgccgucuccaaaggguaccuaggugcccuccgcaccggcugguacacgucugucauaaccaucgaacucuccaacaucaaagaaaucaaauguaacggaacagacgcaaaagucaaacuaaucaaacaagaacuagacaaauacaaaaacgccguaaccgaccuccaacugcucaugcaauccacccccgcugccggcuccgggagcgcaaucugcucuggaaucgccguaugcaaaguccuccaccucgaaggagaaguaaacaaaaucaaaaacgcgcuccucaguaccaacaaagccgucgucucucuaucaaacggcguaucgguccucaccuucaaaguccucgaccuaaagaacuacauagacaaacaacuccuccccauccuaaacaaacaauccugcucaaucccaaacaucgaaaccgugaucgaguuccaacagaaaaacaaccgccuacucgaaaucacccgagaguucucagucaacgcaggagucaccacccccgucucaacauacaugcuuaccaacagcgaacuccuaucccucaucaacgacaugccaaucacaaacgaccaaaagaaacucaugagcaacaacguccagaucguaagacaacaaagcuacagcaucaugugcaucaucaaagaagaaguacuagcauacgucguccaacucccccucuacggcgucaucgacacccccugcuggaaacuccacaccucaccccucugcacaaccaacaccaaagaaggcuccaauaucugccucacacgcaccgaccgcggcugguacugcgacaacgccggcuccgucuccuucuucccucaagccgaaaccugcaaaguccaguccaacagagucuucugcgacaccaugaacucccuaacacuuccaucagaagucaaccuuuguaacaucgacaucuucaaucccaaauacgacuguaaaauaaugaccucaaaaacugacgugucaagcucaguuaucaccucccuaggggccaucgucuccugcuacggcaaaacaaaaugcaccgcauccaacaaaaaucgcggaaucaucaaaacauucuccaacggaugcgacuacgucucaaacaagggaguagauaccguaagcguuggcaacacccucuacugcguaaacaaacaagaaggccaaucacucuacgucaaaggcgaacccauaaucaacuucuacgacccccucgucuucccuuccgaugaguucgacgccagcaucucccaagucaacgagaaaauaaaccagucacucgcauucauccgcaaaagcgacgaacuccuccacaacguaaacguaggcaaauccacaaccaauaucaugauaaccacaaucaucaucgugaucaucgucauccuccuccuccucauagcugucggacucuuccucuacuguaaagcacgcugaggacuaguguccaccugucccuccugggcugcuggauugucucguuuuccugccaaauaaacaggaucagcgcuuuacagaucuaaaaaaaaaaaaaaaaaaaaaaaaaaaaaaaaaaaaaaaaaaaaaaaaaaaaaaaaaaaaaaaaugcaucccccccccccccccccccccccccccccccaaaggcucuuuucagagccaccagaauu

SEQ ID NO: 15986 - RNA, 1847 nt, Artificial Sequence
  mRNA product Design e-5 comprising derived and/or modified sequence from HRSV(Memphis-37)__AIY60640.1__F-del_DSCav1_mut3 (opt1)
gggagagcggcucggccauuuugucccagucaguccggaggcugcggcugcagaaguaccgccugcggaguaacugcaaagaagcuuaccauggagcugcccauccucaagaccaacgccaucaccacgauccuggccgcggugacccugugcuucgccagcucccagaacaucaccgaggaguucuaccagagcacgugcuccgccgucagcaagggcuaccucggcgcccugcgcaccgggugguacaccagcgugaucaccaucgagcuguccaacaucaaggagaucaagugcaacggcaccgacgccaaggugaagcucaucaagcaggagcuggacaaguacaagaacgcggucacggaccugcagcuccugaugcagagcaccccggccgccggcuccgggagcgcgaucugcuccggcaucgccgucugcaaggugcugcaccucgagggcgaggugaacaagaucaagaacgcccugcuguccaccaacaaggccgucgugagccucuccaacggggugagcguccugaccuucaaggugcuggaccucaagaacuacaucgacaagcagcugcugcccauccugaacaagcagagcugcuccauccccaacaucgagaccgucaucgaguuccagcagaagaacaaccgccuccuggagaucacgcgggaguucagcgugaacgcgggcgugaccacccccgucuccaccuacaugcugacgaacagcgagcuccugucccugaucaacgacaugccgaucaccaacgaccagaagaagcucaugagcaacaacgugcagaucgugcgccagcaguccuacagcaucaugugcaucaucaaggaggagguccuggccuacguggugcagcugccccucuacggggucaucgacacccccugcuggaagcugcacaccagcccccugugcacgaccaacaccaaggagggcuccaacaucugccucacccggacggaccgcgggugguacugcgacaacgccggcagcguguccuucuucccgcaggccgagaccugcaagguccagagcaaccggguguucugcgacaccaugaacucccugacccugcccagcgaggugaaccucugcaacaucgacaucuucaaccccaaguacgacugcaagaucaugacguccaagaccgacgucagcuccagcgugaucaccucccugggcgccaucgugagcugcuacgggaagaccaagugcacggcgagcaacaagaaccgcggcaucaucaagaccuucuccaacgggugcgacuacgucagcaacaagggcguggacaccguguccgucggcaacacccuguacugcgugaacaagcaggagggccagagccucuacgugaagggggagcccaucaucaacuucuacgacccgcuggucuuccccuccgacgaguucgacgccagcaucucccaggugaacgagaagaucaaccagagccuggccuucauccggaaguccgacgagcuccugcacaacgugaacgucggcaagagcaccacgaacaucaugaucaccaccaucaucaucgugaucaucgugauccugcugcuccugaucgccgucgggcuguuccucuacugcaaggcccgcugaggacuaguguccaccugucccuccugggcugcuggauugucucguuuuccugccaaauaaacaggaucagcgcuuuacagaucuaaaaaaaaaaaaaaaaaaaaaaaaaaaaaaaaaaaaaaaaaaaaaaaaaaaaaaaaaaaaaaaaugcaucccccccccccccccccccccccccccccccaaaggcucuuuucagagccaccagaauu

SEQ ID NO: 15987 - RNA, 1847 nt, Artificial Sequence
  mRNA product Design e-5 comprising derived and/or modified sequence from HRSV(Memphis-37)__AIY60640.1__F-del_DSCav1_mut3 (opt1)
gggagagcggcucggccauuuugucccagucaguccggaggcugcggcugcagaaguaccgccugcggaguaacugcaaagaagcuuaccauggagcugcccauccucaagaccaacgccaucaccacgauccuggccgcggugacccugugcuucgccagcucccagaacaucaccgaggaguucuaccagagcacgugcuccgccgucagcaagggcuaccucggggcccugcgcaccggcugguacaccuccgugaucaccaucgagcugagcaacaucaaggagaucaagugcaacgggaccgacgccaaggugaagcucaucaagcaggagcuggacaaguacaagaacgcggucacggaccugcagcuccugaugcaguccaccccggccgccggcagcggguccgccaucugcagcggcaucgcggugugcaaggugcugcaccucgagggcgaggucaacaagaucaagaacgcccugcuguccaccaacaaggccguggugagccucuccaacggggucagcgugcugaccuucaaggugcuggaccucaagaacuacaucgacaagcagcugcugcccauccucaacaagcaguccugcagcauccccaacaucgagacggucaucgaguuccagcagaagaacaaccggcugcuggagaucacccgcgaguucuccgugaacgccggcgugaccacccccgucagcacguacaugcucaccaacuccgagcugcugagccucaucaacgacaugccgaucaccaacgaccagaagaagcugaugagcaacaacgugcagaucgugcggcagcaguccuacagcaucaugugcaucaucaaggaggagguccuggccuacguggugcagcucccccuguacggggucaucgacacccccugcuggaagcugcacacgagcccccucugcaccaccaacaccaaggagggcuccaacaucugccugacgcgcaccgaccgggggugguacugcgacaacgcgggcuccgugagcuucuucccgcaggccgagaccugcaaggugcaguccaaccgcgucuucugcgacaccaugaacagccugacgcuccccuccgaggugaaccugugcaacaucgacaucuucaaccccaaguacgacugcaagaucaugaccagcaagaccgacgucuccagcuccgugaucaccagccugggcgccaucguguccugcuacgggaagacgaagugcaccgccagcaacaagaaccggggcaucaucaagaccuucuccaacgggugcgacuacgucagcaacaagggcguggacaccguguccgucggcaacacgcucuacugcgugaacaagcaggaggggcagagccuguacgugaagggcgagcccaucaucaacuucuacgacccgcuggucuuccccagcgacgaguucgacgccuccaucagccaggugaacgagaagaucaaccagucccucgcguucauccgcaagagcgacgagcugcugcacaacgugaacgucgggaaguccaccaccaacaucaugaucaccaccaucaucaucgugaucaucgugauccuccugcugcucaucgccgucggccuguuccuguacugcaaggcccggugaggacuaguguccaccugucccuccugggcugcuggauugucucguuuuccugccaaauaaacaggaucagcgcuuuacagaucuaaaaaaaaaaaaaaaaaaaaaaaaaaaaaaaaaaaaaaaaaaaaaaaaaaaaaaaaaaaaaaaaugcaucccccccccccccccccccccccccccccccaaaggcucuuuucagagccaccagaauu

SEQ ID NO: 15988 - RNA, 1847 nt, Artificial Sequence
  mRNA product Design e-5 comprising derived and/or modified sequence from HRSV(Memphis-37)__AIY60640.1__F-del_DSCav1_mut3 (opt2)
gggagagcggcucggccauuuugucccagucaguccggaggcugcggcugcagaaguaccgccugcggaguaacugcaaagaagcuuaccauggagcuccccauccucaagaccaacgccaucaccaccauccucgccgccgucacccucugcuucgccuccucccagaacaucaccgaggaguucuaccaguccaccugcuccgccgucuccaagggcuaccucggcgcccuccgcaccggcugguacaccuccgucaucaccaucgagcucuccaacaucaaggagaucaagugcaacggcaccgacgccaaggucaagcucaucaagcaggagcucgacaaguacaagaacgccgucaccgaccuccagcuccucaugcaguccacccccgccgccggcuccggcuccgccaucugcuccggcaucgccgucugcaagguccuccaccucgagggcgaggucaacaagaucaagaacgcccuccucuccaccaacaaggccgucgucucccucuccaacggcgucuccguccucaccuucaagguccucgaccucaagaacuacaucgacaagcagcuccuccccauccucaacaagcaguccugcuccauccccaacaucgagaccgucaucgaguuccagcagaagaacaaccgccuccucgagaucacccgcgaguucuccgucaacgccggcgucaccacccccgucuccaccuacaugcucaccaacuccgagcuccucucccucaucaacgacaugcccaucaccaacgaccagaagaagcucauguccaacaacguccagaucguccgccagcaguccuacuccaucaugugcaucaucaaggaggagguccucgccuacgucguccagcucccccucuacggcgucaucgacacccccugcuggaagcuccacaccuccccccucugcaccaccaacaccaaggagggcuccaacaucugccucacccgcaccgaccgcggcugguacugcgacaacgccggcuccgucuccuucuucccccaggccgagaccugcaagguccaguccaaccgcgucuucugcgacaccaugaacucccucacccuccccuccgaggucaaccucugcaacaucgacaucuucaaccccaaguacgacugcaagaucaugaccuccaagaccgacgucuccuccuccgucaucaccucccucggcgccaucgucuccugcuacggcaagaccaagugcaccgccuccaacaagaaccgcggcaucaucaagaccuucuccaacggcugcgacuacgucuccaacaagggcgucgacaccgucuccgucggcaacacccucuacugcgucaacaagcaggagggccagucccucuacgucaagggcgagcccaucaucaacuucuacgacccccucgucuuccccuccgacgaguucgacgccuccaucucccaggucaacgagaagaucaaccagucccucgccuucauccgcaaguccgacgagcuccuccacaacgucaacgucggcaaguccaccaccaacaucaugaucaccaccaucaucaucgucaucaucgucauccuccuccuccucaucgccgucggccucuuccucuacugcaaggcccgcugaggacuaguguccaccugucccuccugggcugcuggauugucucguuuuccugccaaauaaacaggaucagcgcuuuacagaucuaaaaaaaaaaaaaaaaaaaaaaaaaaaaaaaaaaaaaaaaaaaaaaaaaaaaaaaaaaaaaaaaugcaucccccccccccccccccccccccccccccccaaaggcucuuuucagagccaccagaauu

SEQ ID NO: 15989 - RNA, 1847 nt, Artificial Sequence
  mRNA product Design e-5 comprising derived and/or modified sequence from HRSV(Memphis-37)__AIY60640.1__F-del_DSCav1_mut3 (opt3)
gggagagcggcucggccauuuugucccagucaguccggaggcugcggcugcagaaguaccgccugcggaguaacugcaaagaagcuuaccauggagcugcccauccucaagaccaacgccauuacaacuauacuugcugcagugacgcugugcuucgccagcucccagaauaucaccgaagaguuuuaccaaucuacauguucagcggucaguaaaggcuauuugggggcuuuaagaacuggaugguacaccagcguuauuacaaucgaacuguccaacauuaaggagaucaaaugcaaugguaccgacgccaaggugaaacuaauaaagcaggaacucgauaaguauaaaaacgcaguaacugaccugcagcuucugaugcagucuacuccugccgcuggcucggggucagcaaucuguagcggaauugccgugugcaaggucuugcaccucgagggcgaggugaauaaaaucaagaacgcucugcugaguaccaauaaagccguugugucccucucuaacggugucagcguguuaacguucaagguacuggaucuuaagaauuacauugacaaacaauugcugccaauccuaaacaagcaguccuguucaauaccgaauauugaaacuguuaucgaguuucagcagaaaaacaauaggcuccuggaaauuacccgggaguucagugugaacgcgggggucacaacucccgugagcaccuauaugcuuacaaauucugagcuguugucccucaucaacgauaugccuaucaccaacgaccaaaagaaacugaugucaaauaacgugcagauuguccgccagcagagcuacaguauaaugugcaucauuaaggaagagguuuuagcauaugugguacaacugccacucuacggagugaucgauacgcccuguuggaaacuucauacuucuccucugugcacaaccaauacuaaggaaggcuccaacauauguuugacacgaaccgaccguggcugguacugcgauaaugccgggagcgucucguuuuucccacaggcugagacguguaaggugcagucuaacagaguuuucugcgacaccaugaacucccuaacacugcccucagaagugaaucucugcaauauugauaucuucaacccuaaauaugacuguaagaucaugacaaguaaaaccgaugucagcuccucugugauuacaagccugggagccaucguaucaugcuacgguaagacuaaauguaccgcaaguaauaagaacaggggcauuauaaagacauuuuccaaugggugcgacuauguuagcaacaaaggaguggacaccgucucugugggcaauacucuuuacugugucaacaagcaagagggucagucacuguaugugaaaggggagccaaucauuaacuucuacgauccguugguuuuucccagugacgaauuugaugcuagcaucucccaggugaaugagaagaucaaccagucucucgccuuuauucggaaaucggacgaacuguuacacaauguaaacgucggaaagagcacgacaaauauaaugaucaccacuauuaucauugugaucauaguuauccugcuacuccugauugcggugggccuuuucuuguauugcaaggcccgcugaggacuaguguccaccugucccuccugggcugcuggauugucucguuuuccugccaaauaaacaggaucagcgcuuuacagaucuaaaaaaaaaaaaaaaaaaaaaaaaaaaaaaaaaaaaaaaaaaaaaaaaaaaaaaaaaaaaaaaaugcaucccccccccccccccccccccccccccccccaaaggcucuuuucagagccaccagaauu

SEQ ID NO: 15990 - RNA, 1847 nt, Artificial Sequence
  mRNA product Design e-5 comprising derived and/or modified sequence from HRSV(Memphis-37)__AIY60640.1__F-del_DSCav1_mut3 (opt4)
gggagagcggcucggccauuuugucccagucaguccggaggcugcggcugcagaaguaccgccugcggaguaacugcaaagaagcuuaccauggagcugcccauccugaagaccaacgccaucaccaccauccuggccgccgugacccugugcuucgccagcagccagaacaucaccgaggaguucuaccagagcaccugcagcgccgugagcaagggcuaccugggcgcccugagaaccggcugguacaccagcgugaucaccaucgagcugagcaacaucaaggagaucaagugcaacggcaccgacgccaaggugaagcugaucaagcaggagcuggacaaguacaagaacgccgugaccgaccugcagcugcugaugcagagcacccccgccgccggcagcggcagcgccaucugcagcggcaucgccgugugcaaggugcugcaccuggagggcgaggugaacaagaucaagaacgcccugcugagcaccaacaaggccguggugagccugagcaacggcgugagcgugcugaccuucaaggugcuggaccugaagaacuacaucgacaagcagcugcugcccauccugaacaagcagagcugcagcauccccaacaucgagaccgugaucgaguuccagcagaagaacaacagacugcuggagaucaccagagaguucagcgugaacgccggcgugaccacccccgugagcaccuacaugcugaccaacagcgagcugcugagccugaucaacgacaugcccaucaccaacgaccagaagaagcugaugagcaacaacgugcagaucgugagacagcagagcuacagcaucaugugcaucaucaaggaggaggugcuggccuacguggugcagcugccccuguacggcgugaucgacacccccugcuggaagcugcacaccagcccccugugcaccaccaacaccaaggagggcagcaacaucugccugaccagaaccgacagaggcugguacugcgacaacgccggcagcgugagcuucuucccccaggccgagaccugcaaggugcagagcaacagaguguucugcgacaccaugaacagccugacccugcccagcgaggugaaccugugcaacaucgacaucuucaaccccaaguacgacugcaagaucaugaccagcaagaccgacgugagcagcagcgugaucaccagccugggcgccaucgugagcugcuacggcaagaccaagugcaccgccagcaacaagaacagaggcaucaucaagaccuucagcaacggcugcgacuacgugagcaacaagggcguggacaccgugagcgugggcaacacccuguacugcgugaacaagcaggagggccagagccuguacgugaagggcgagcccaucaucaacuucuacgacccccugguguuccccagcgacgaguucgacgccagcaucagccaggugaacgagaagaucaaccagagccuggccuucaucagaaagagcgacgagcugcugcacaacgugaacgugggcaagagcaccaccaacaucaugaucaccaccaucaucaucgugaucaucgugauccugcugcugcugaucgccgugggccuguuccuguacugcaaggccagaugaggacuaguguccaccugucccuccugggcugcuggauugucucguuuuccugccaaauaaacaggaucagcgcuuuacagaucuaaaaaaaaaaaaaaaaaaaaaaaaaaaaaaaaaaaaaaaaaaaaaaaaaaaaaaaaaaaaaaaaugcaucccccccccccccccccccccccccccccccaaaggcucuuuucagagccaccagaauu

SEQ ID NO: 15991 - RNA, 1847 nt, Artificial Sequence
  mRNA product Design e-5 comprising derived and/or modified sequence from HRSV(Memphis-37)__AIY60640.1__F-del_DSCav1_mut3 (opt5)
gggagagcggcucggccauuuugucccagucaguccggaggcugcggcugcagaaguaccgccugcggaguaacugcaaagaagcuuaccauggagcugcccauccucaagaccaacgccauuacaacgauccuggcugccgugacccuuugcuucgcgagcucccagaauauuacagaagaguuuuaccaaucuaccuguagcgcugucuccaaaggcuaucugggggcccucagaacaggaugguacaccucuguuaucacaauugaacugagcaacaucaaggagaucaaaugcaauggcaccgacgccaaggugaaacuuauuaagcaggaacuggauaaguauaaaaacgcugugacggaccuccagcugcugaugcaguccaccccugccgcugggucuggaagcgccaucuguuccggcauugcggucugcaaggugcuccaccuggagggggagguuaauaaaaucaagaacgcccuucugagcacaaauaaagcuguggucucucucuccaacggagugagcguucugaccuucaaggugcuugaucugaagaauuacauugacaaacaacuccugccgauccugaacaagcagucuuguuccauucccaauaucgaaacagucaucgaguuucagcagaaaaacaaucggcuccuggaaauuacccgcgaguucagcgugaacgccggcgugacgacaccugucucuaccuauaugcuuacaaauuccgagcugcucagccugaucaacgauaugcccauuaccaacgaccaaaagaaacuuauguccaauaacguucagaucgugagacagcagucuuacagcauuaugugcaucaucaaggaagaggugcuggcuuaugucgugcaacucccucuguacggcguuauugauacccccuguuggaaacugcauacauccccucucugcacgaccaauacaaaggaagggagcaacaucugucugacccggacagaccgcggaugguacugcgauaaugccggcucuguguccuuuuucccgcaggcggagaccuguaagguccagagcaacagaguguuuugcgacacgaugaacucucuuacacugcccagcgaaguuaaucucugcaauauugauaucuucaacccuaaauaugacuguaagauuaugaccuccaaaaccgaugugucuagcuccgucaucacaagccugggggccaucgugucuugcuacggaaagaccaaauguacagcuuccaauaagaaccggggcauuaucaagacguuuagcaaugggugcgacuaugucucuaacaaaggaguggacaccguuuccgugggcaauacacuuuacugugucaacaagcaagagggccagagccuguaugugaaaggggagcccauuaucaacuucuacgauccucucguuuuucccuccgacgaguucgaugccucuauuagccaggugaaugaaaagaucaaccagucccuggcuuuuauucgcaaaucugacgaacugcuccacaaugucaacgugggaaagagcaccacaaauaucaugaucaccacgauuaucauugugaucauuguuauccugcuucugcucaucgccgucggccuguuccuguauugcaaggccagaugaggacuaguguccaccugucccuccugggcugcuggauugucucguuuuccugccaaauaaacaggaucagcgcuuuacagaucuaaaaaaaaaaaaaaaaaaaaaaaaaaaaaaaaaaaaaaaaaaaaaaaaaaaaaaaaaaaaaaaaugcaucccccccccccccccccccccccccccccccaaaggcucuuuucagagccaccagaauu

SEQ ID NO: 15992 - RNA, 1847 nt, Artificial Sequence
  mRNA product Design e-5 comprising derived and/or modified sequence from HRSV(Memphis-37)__AIY60640.1__F-del_DSCav1_mut3 (opt6)
gggagagcggcucggccauuuugucccagucaguccggaggcugcggcugcagaaguaccgccugcggaguaacugcaaagaagcuuaccauggaacuacccauccuaaaaacaaaugccauaaccacaauacucgccgcuguaacacuauguuucgcuaguucacaaaacauuacagaagaauuuuaccaauccacaugcucagcaguaucaaaaggauaccuaggugcacuaagaacaggaugguacacaagcguaauuacaauagaauuauccaauauuaaagaaauaaaauguaacggcacugacgcuaaaguaaaauuaaucaaacaagaacuagacaaauacaaaaacgcaguaacagaccuacaauuacucaugcaauccacacccgcagcaggaucaggcucagccauaugcucagguauagcaguaugcaaaguacuccaccuugaaggagaaguaaacaaaauaaaaaacgcauuacuaucaacaaacaaagcaguaguaucacuaucaaacggagucucugucuuaaccuuuaaaguauuagauuuaaaaaacuacauagacaaacaacuauuaccaauucuaaauaaacaaucauguucuauaccaaauauagaaacaguaauagaauuucaacaaaaaaacaaccgauuacuagaaaucacaagagaauuuucugucaacgccggcguaaccaccccagucucaacauauaugcuaacaaauagugaacucuuauccuuaauaaacgacaugccaauaacaaaugaccaaaaaaaauuaauguccaauaacguacaaauagucagacaacagucauacucaauaauguguaucaucaaagaagaaguauuagcauacguaguucaacuaccccuauacggcguaauagacacaccauguuggaaacuacacacaucacccuuaugcacaaccaauaccaaagaaggaucuaacauaugccuaaccagaacagacagaggcugguacugcgacaacgcagguucagucucauucuucccacaagccgaaacaugcaaaguccaauccaacagaguauuuugcgacacuaugaacucacuaacucuaccuucagaagucaaccuuuguaacauagacauauuuaacccaaaauacgauuguaaaauaaugaccagcaaaacagacgucucaucaagcguaauaacaucacuuggcgcaauagucuccugcuacggaaaaacaaaaugcacagcauccaacaaaaacagaggcaucauaaaaaccuucuccaacggcugcgacuauguaagcaacaaaggugucgauacaguaucaguaggaaacacacuauacugcguaaacaaacaagaaggacaaucacucuacguaaaaggugaaccaaucauaaacuucuacgacccauuaguuuucccaucagacgaauuugaugccuccauaucacaaguaaaugaaaaaauaaaucaaucccuagcauucauacgaaaaucugaugaauuacuucacaaugucaacgucggaaaaucaaccacuaacauaaugauaacaacaauuauaauaguaauaauaguaauacuccuacuauuaauagccgucggucuuuuccuauacugcaaagcacgauaaggacuaguguccaccugucccuccugggcugcuggauugucucguuuuccugccaaauaaacaggaucagcgcuuuacagaucuaaaaaaaaaaaaaaaaaaaaaaaaaaaaaaaaaaaaaaaaaaaaaaaaaaaaaaaaaaaaaaaaugcaucccccccccccccccccccccccccccccccaaaggcucuuuucagagccaccagaauu

SEQ ID NO: 15993 - RNA, 1847 nt, Artificial Sequence
  mRNA product Design e-5 comprising derived and/or modified sequence from HRSV(Memphis-37)__AIY60640.1__F-del_DSCav1_mut3 (opt11)
gggagagcggcucggccauuuugucccagucaguccggaggcugcggcugcagaaguaccgccugcggaguaacugcaaagaagcuuaccauggaacuacccauccucaaaaccaacgccaucaccacaauccuagcugccgucacccuaugcuucgcaagcagccaaaacaucacagaagaauuuuaccaaucaaccugcuccgccgucuccaaaggguaccuaggugcccuccgcaccggcugguacacgucugucauaaccaucgaacucuccaacaucaaagaaaucaaauguaacggaacagacgcaaaagucaaacuaaucaaacaagaacuagacaaauacaaaaacgccguaaccgaccuccaacugcucaugcaauccacccccgcugccggcuccgggagcgcaaucugcucuggaaucgccguaugcaaaguccuccaccucgaaggagaaguaaacaaaaucaaaaacgcgcuccucaguaccaacaaagccgucgucucucuaucaaacggcguaucgguccucaccuucaaaguccucgaccuaaagaacuacauagacaaacaacuccuccccauccuaaacaaacaauccugcucaaucccaaacaucgaaaccgugaucgaguuccaacagaaaaacaaccgccuacucgaaaucacccgagaguucucagucaacgcaggagucaccacccccgucucaacauacaugcuuaccaacagcgaacuccuaucccucaucaacgacaugccaaucacaaacgaccaaaagaaacucaugagcaacaacguccagaucguaagacaacaaagcuacagcaucaugugcaucaucaaagaagaaguacuagcauacgucguccaacucccccucuacggcgucaucgacacccccugcuggaaacuccacaccucaccccucugcacaaccaacaccaaagaaggcuccaauaucugccucacacgcaccgaccgcggcugguacugcgacaacgccggcuccgucuccuucuucccucaagccgaaaccugcaaaguccaguccaacagagucuucugcgacaccaugaacucccuaacacuuccaucagaagucaaccuuuguaacaucgacaucuucaaucccaaauacgacuguaaaauaaugaccucaaaaacugacgugucaagcucaguuaucaccucccuaggggccaucgucuccugcuacggcaaaacaaaaugcaccgcauccaacaaaaaucgcggaaucaucaaaacauucuccaacggaugcgacuacgucucaaacaagggaguagauaccguaagcguuggcaacacccucuacugcguaaacaaacaagaaggccaaucacucuacgucaaaggcgaacccauaaucaacuucuacgacccccucgucuucccuuccgaugaguucgacgccagcaucucccaagucaacgagaaaauaaaccagucacucgcauucauccgcaaaagcgacgaacuccuccacaacguaaacguaggcaaauccacaaccaauaucaugauaaccacaaucaucaucgugaucaucgucauccuccuccuccucauagcugucggacucuuccucuacuguaaagcacgcugaggacuaguguccaccugucccuccugggcugcuggauugucucguuuuccugccaaauaaacaggaucagcgcuuuacagaucuaaaaaaaaaaaaaaaaaaaaaaaaaaaaaaaaaaaaaaaaaaaaaaaaaaaaaaaaaaaaaaaaugcaucccccccccccccccccccccccccccccccaaaggcucuuuucagagccaccagaauu

SEQ ID NO: 15994 - RNA, 1914 nt, Artificial Sequence
  mRNA product Design e-6 comprising derived and/or modified sequence from HRSV(Memphis-37)__AIY60640.1__F-del_DSCav1_mut3 (opt1)
gggagagcggcucggccauuuugucccagucaguccggaggcugcggcugcagaaguaccgccugcggaguaacugcaaagaagcuuaccauggagcugcccauccucaagaccaacgccaucaccacgauccuggccgcggugacccugugcuucgccagcucccagaacaucaccgaggaguucuaccagagcacgugcuccgccgucagcaagggcuaccucggcgcccugcgcaccgggugguacaccagcgugaucaccaucgagcuguccaacaucaaggagaucaagugcaacggcaccgacgccaaggugaagcucaucaagcaggagcuggacaaguacaagaacgcggucacggaccugcagcuccugaugcagagcaccccggccgccggcuccgggagcgcgaucugcuccggcaucgccgucugcaaggugcugcaccucgagggcgaggugaacaagaucaagaacgcccugcuguccaccaacaaggccgucgugagccucuccaacggggugagcguccugaccuucaaggugcuggaccucaagaacuacaucgacaagcagcugcugcccauccugaacaagcagagcugcuccauccccaacaucgagaccgucaucgaguuccagcagaagaacaaccgccuccuggagaucacgcgggaguucagcgugaacgcgggcgugaccacccccgucuccaccuacaugcugacgaacagcgagcuccugucccugaucaacgacaugccgaucaccaacgaccagaagaagcucaugagcaacaacgugcagaucgugcgccagcaguccuacagcaucaugugcaucaucaaggaggagguccuggccuacguggugcagcugccccucuacggggucaucgacacccccugcuggaagcugcacaccagcccccugugcacgaccaacaccaaggagggcuccaacaucugccucacccggacggaccgcgggugguacugcgacaacgccggcagcguguccuucuucccgcaggccgagaccugcaagguccagagcaaccggguguucugcgacaccaugaacucccugacccugcccagcgaggugaaccucugcaacaucgacaucuucaaccccaaguacgacugcaagaucaugacguccaagaccgacgucagcuccagcgugaucaccucccugggcgccaucgugagcugcuacgggaagaccaagugcacggcgagcaacaagaaccgcggcaucaucaagaccuucuccaacgggugcgacuacgucagcaacaagggcguggacaccguguccgucggcaacacccuguacugcgugaacaagcaggagggccagagccucuacgugaagggggagcccaucaucaacuucuacgacccgcuggucuuccccuccgacgaguucgacgccagcaucucccaggugaacgagaagaucaaccagagccuggccuucauccggaaguccgacgagcuccugcacaacgugaacgucggcaagagcaccacgaacaucaugaucaccaccaucaucaucgugaucaucgugauccugcugcuccugaucgccgucgggcuguuccucuacugcaaggcccgcugaggacuaguacuggcugcaucucccuuuccucuguccuccauccuucucccaggauggugaagggggaccugguacccagugauccccaccccaggauccuaaaucaugacuuaccugcuaauaaaaacucauuggaaaagugagaagaucuaaaaaaaaaaaaaaaaaaaaaaaaaaaaaaaaaaaaaaaaaaaaaaaaaaaaaaaaaaaaaaaaugcaucccccccccccccccccccccccccccccccaaaggcucuuuucagagccaccagaauu

SEQ ID NO: 15995 - RNA, 1914 nt, Artificial Sequence
  mRNA product Design e-6 comprising derived and/or modified sequence from HRSV(Memphis-37)__AIY60640.1__F-del_DSCav1_mut3 (opt1)
gggagagcggcucggccauuuugucccagucaguccggaggcugcggcugcagaaguaccgccugcggaguaacugcaaagaagcuuaccauggagcugcccauccucaagaccaacgccaucaccacgauccuggccgcggugacccugugcuucgccagcucccagaacaucaccgaggaguucuaccagagcacgugcuccgccgucagcaagggcuaccucggggcccugcgcaccggcugguacaccuccgugaucaccaucgagcugagcaacaucaaggagaucaagugcaacgggaccgacgccaaggugaagcucaucaagcaggagcuggacaaguacaagaacgcggucacggaccugcagcuccugaugcaguccaccccggccgccggcagcggguccgccaucugcagcggcaucgcggugugcaaggugcugcaccucgagggcgaggucaacaagaucaagaacgcccugcuguccaccaacaaggccguggugagccucuccaacggggucagcgugcugaccuucaaggugcuggaccucaagaacuacaucgacaagcagcugcugcccauccucaacaagcaguccugcagcauccccaacaucgagacggucaucgaguuccagcagaagaacaaccggcugcuggagaucacccgcgaguucuccgugaacgccggcgugaccacccccgucagcacguacaugcucaccaacuccgagcugcugagccucaucaacgacaugccgaucaccaacgaccagaagaagcugaugagcaacaacgugcagaucgugcggcagcaguccuacagcaucaugugcaucaucaaggaggagguccuggccuacguggugcagcucccccuguacggggucaucgacacccccugcuggaagcugcacacgagcccccucugcaccaccaacaccaaggagggcuccaacaucugccugacgcgcaccgaccgggggugguacugcgacaacgcgggcuccgugagcuucuucccgcaggccgagaccugcaaggugcaguccaaccgcgucuucugcgacaccaugaacagccugacgcuccccuccgaggugaaccugugcaacaucgacaucuucaaccccaaguacgacugcaagaucaugaccagcaagaccgacgucuccagcuccgugaucaccagccugggcgccaucguguccugcuacgggaagacgaagugcaccgccagcaacaagaaccggggcaucaucaagaccuucuccaacgggugcgacuacgucagcaacaagggcguggacaccguguccgucggcaacacgcucuacugcgugaacaagcaggaggggcagagccuguacgugaagggcgagcccaucaucaacuucuacgacccgcuggucuuccccagcgacgaguucgacgccuccaucagccaggugaacgagaagaucaaccagucccucgcguucauccgcaagagcgacgagcugcugcacaacgugaacgucgggaaguccaccaccaacaucaugaucaccaccaucaucaucgugaucaucgugauccuccugcugcucaucgccgucggccuguuccuguacugcaaggcccggugaggacuaguacuggcugcaucucccuuuccucuguccuccauccuucucccaggauggugaagggggaccugguacccagugauccccaccccaggauccuaaaucaugacuuaccugcuaauaaaaacucauuggaaaagugagaagaucuaaaaaaaaaaaaaaaaaaaaaaaaaaaaaaaaaaaaaaaaaaaaaaaaaaaaaaaaaaaaaaaaugcaucccccccccccccccccccccccccccccccaaaggcucuuuucagagccaccagaauu

SEQ ID NO: 15996 - RNA, 1914 nt, Artificial Sequence
  mRNA product Design e-6 comprising derived and/or modified sequence from HRSV(Memphis-37)__AIY60640.1__F-del_DSCav1_mut3 (opt2)
gggagagcggcucggccauuuugucccagucaguccggaggcugcggcugcagaaguaccgccugcggaguaacugcaaagaagcuuaccauggagcuccccauccucaagaccaacgccaucaccaccauccucgccgccgucacccucugcuucgccuccucccagaacaucaccgaggaguucuaccaguccaccugcuccgccgucuccaagggcuaccucggcgcccuccgcaccggcugguacaccuccgucaucaccaucgagcucuccaacaucaaggagaucaagugcaacggcaccgacgccaaggucaagcucaucaagcaggagcucgacaaguacaagaacgccgucaccgaccuccagcuccucaugcaguccacccccgccgccggcuccggcuccgccaucugcuccggcaucgccgucugcaagguccuccaccucgagggcgaggucaacaagaucaagaacgcccuccucuccaccaacaaggccgucgucucccucuccaacggcgucuccguccucaccuucaagguccucgaccucaagaacuacaucgacaagcagcuccuccccauccucaacaagcaguccugcuccauccccaacaucgagaccgucaucgaguuccagcagaagaacaaccgccuccucgagaucacccgcgaguucuccgucaacgccggcgucaccacccccgucuccaccuacaugcucaccaacuccgagcuccucucccucaucaacgacaugcccaucaccaacgaccagaagaagcucauguccaacaacguccagaucguccgccagcaguccuacuccaucaugugcaucaucaaggaggagguccucgccuacgucguccagcucccccucuacggcgucaucgacacccccugcuggaagcuccacaccuccccccucugcaccaccaacaccaaggagggcuccaacaucugccucacccgcaccgaccgcggcugguacugcgacaacgccggcuccgucuccuucuucccccaggccgagaccugcaagguccaguccaaccgcgucuucugcgacaccaugaacucccucacccuccccuccgaggucaaccucugcaacaucgacaucuucaaccccaaguacgacugcaagaucaugaccuccaagaccgacgucuccuccuccgucaucaccucccucggcgccaucgucuccugcuacggcaagaccaagugcaccgccuccaacaagaaccgcggcaucaucaagaccuucuccaacggcugcgacuacgucuccaacaagggcgucgacaccgucuccgucggcaacacccucuacugcgucaacaagcaggagggccagucccucuacgucaagggcgagcccaucaucaacuucuacgacccccucgucuuccccuccgacgaguucgacgccuccaucucccaggucaacgagaagaucaaccagucccucgccuucauccgcaaguccgacgagcuccuccacaacgucaacgucggcaaguccaccaccaacaucaugaucaccaccaucaucaucgucaucaucgucauccuccuccuccucaucgccgucggccucuuccucuacugcaaggcccgcugaggacuaguacuggcugcaucucccuuuccucuguccuccauccuucucccaggauggugaagggggaccugguacccagugauccccaccccaggauccuaaaucaugacuuaccugcuaauaaaaacucauuggaaaagugagaagaucuaaaaaaaaaaaaaaaaaaaaaaaaaaaaaaaaaaaaaaaaaaaaaaaaaaaaaaaaaaaaaaaaugcaucccccccccccccccccccccccccccccccaaaggcucuuuucagagccaccagaauu

SEQ ID NO: 15997 - RNA, 1914 nt, Artificial Sequence
  mRNA product Design e-6 comprising derived and/or modified sequence from HRSV(Memphis-37)__AIY60640.1__F-del_DSCav1_mut3 (opt3)
gggagagcggcucggccauuuugucccagucaguccggaggcugcggcugcagaaguaccgccugcggaguaacugcaaagaagcuuaccauggagcugcccauccucaagaccaacgccauuacaacuauacuugcugcagugacgcugugcuucgccagcucccagaauaucaccgaagaguuuuaccaaucuacauguucagcggucaguaaaggcuauuugggggcuuuaagaacuggaugguacaccagcguuauuacaaucgaacuguccaacauuaaggagaucaaaugcaaugguaccgacgccaaggugaaacuaauaaagcaggaacucgauaaguauaaaaacgcaguaacugaccugcagcuucugaugcagucuacuccugccgcuggcucggggucagcaaucuguagcggaauugccgugugcaaggucuugcaccucgagggcgaggugaauaaaaucaagaacgcucugcugaguaccaauaaagccguugugucccucucuaacggugucagcguguuaacguucaagguacuggaucuuaagaauuacauugacaaacaauugcugccaauccuaaacaagcaguccuguucaauaccgaauauugaaacuguuaucgaguuucagcagaaaaacaauaggcuccuggaaauuacccgggaguucagugugaacgcgggggucacaacucccgugagcaccuauaugcuuacaaauucugagcuguugucccucaucaacgauaugccuaucaccaacgaccaaaagaaacugaugucaaauaacgugcagauuguccgccagcagagcuacaguauaaugugcaucauuaaggaagagguuuuagcauaugugguacaacugccacucuacggagugaucgauacgcccuguuggaaacuucauacuucuccucugugcacaaccaauacuaaggaaggcuccaacauauguuugacacgaaccgaccguggcugguacugcgauaaugccgggagcgucucguuuuucccacaggcugagacguguaaggugcagucuaacagaguuuucugcgacaccaugaacucccuaacacugcccucagaagugaaucucugcaauauugauaucuucaacccuaaauaugacuguaagaucaugacaaguaaaaccgaugucagcuccucugugauuacaagccugggagccaucguaucaugcuacgguaagacuaaauguaccgcaaguaauaagaacaggggcauuauaaagacauuuuccaaugggugcgacuauguuagcaacaaaggaguggacaccgucucugugggcaauacucuuuacugugucaacaagcaagagggucagucacuguaugugaaaggggagccaaucauuaacuucuacgauccguugguuuuucccagugacgaauuugaugcuagcaucucccaggugaaugagaagaucaaccagucucucgccuuuauucggaaaucggacgaacuguuacacaauguaaacgucggaaagagcacgacaaauauaaugaucaccacuauuaucauugugaucauaguuauccugcuacuccugauugcggugggccuuuucuuguauugcaaggcccgcugaggacuaguacuggcugcaucucccuuuccucuguccuccauccuucucccaggauggugaagggggaccugguacccagugauccccaccccaggauccuaaaucaugacuuaccugcuaauaaaaacucauuggaaaagugagaagaucuaaaaaaaaaaaaaaaaaaaaaaaaaaaaaaaaaaaaaaaaaaaaaaaaaaaaaaaaaaaaaaaaugcaucccccccccccccccccccccccccccccccaaaggcucuuuucagagccaccagaauu

SEQ ID NO: 15998 - RNA, 1914 nt, Artificial Sequence
  mRNA product Design e-6 comprising derived and/or modified sequence from HRSV(Memphis-37)__AIY60640.1__F-del_DSCav1_mut3 (opt4)
gggagagcggcucggccauuuugucccagucaguccggaggcugcggcugcagaaguaccgccugcggaguaacugcaaagaagcuuaccauggagcugcccauccugaagaccaacgccaucaccaccauccuggccgccgugacccugugcuucgccagcagccagaacaucaccgaggaguucuaccagagcaccugcagcgccgugagcaagggcuaccugggcgcccugagaaccggcugguacaccagcgugaucaccaucgagcugagcaacaucaaggagaucaagugcaacggcaccgacgccaaggugaagcugaucaagcaggagcuggacaaguacaagaacgccgugaccgaccugcagcugcugaugcagagcacccccgccgccggcagcggcagcgccaucugcagcggcaucgccgugugcaaggugcugcaccuggagggcgaggugaacaagaucaagaacgcccugcugagcaccaacaaggccguggugagccugagcaacggcgugagcgugcugaccuucaaggugcuggaccugaagaacuacaucgacaagcagcugcugcccauccugaacaagcagagcugcagcauccccaacaucgagaccgugaucgaguuccagcagaagaacaacagacugcuggagaucaccagagaguucagcgugaacgccggcgugaccacccccgugagcaccuacaugcugaccaacagcgagcugcugagccugaucaacgacaugcccaucaccaacgaccagaagaagcugaugagcaacaacgugcagaucgugagacagcagagcuacagcaucaugugcaucaucaaggaggaggugcuggccuacguggugcagcugccccuguacggcgugaucgacacccccugcuggaagcugcacaccagcccccugugcaccaccaacaccaaggagggcagcaacaucugccugaccagaaccgacagaggcugguacugcgacaacgccggcagcgugagcuucuucccccaggccgagaccugcaaggugcagagcaacagaguguucugcgacaccaugaacagccugacccugcccagcgaggugaaccugugcaacaucgacaucuucaaccccaaguacgacugcaagaucaugaccagcaagaccgacgugagcagcagcgugaucaccagccugggcgccaucgugagcugcuacggcaagaccaagugcaccgccagcaacaagaacagaggcaucaucaagaccuucagcaacggcugcgacuacgugagcaacaagggcguggacaccgugagcgugggcaacacccuguacugcgugaacaagcaggagggccagagccuguacgugaagggcgagcccaucaucaacuucuacgacccccugguguuccccagcgacgaguucgacgccagcaucagccaggugaacgagaagaucaaccagagccuggccuucaucagaaagagcgacgagcugcugcacaacgugaacgugggcaagagcaccaccaacaucaugaucaccaccaucaucaucgugaucaucgugauccugcugcugcugaucgccgugggccuguuccuguacugcaaggccagaugaggacuaguacuggcugcaucucccuuuccucuguccuccauccuucucccaggauggugaagggggaccugguacccagugauccccaccccaggauccuaaaucaugacuuaccugcuaauaaaaacucauuggaaaagugagaagaucuaaaaaaaaaaaaaaaaaaaaaaaaaaaaaaaaaaaaaaaaaaaaaaaaaaaaaaaaaaaaaaaaugcaucccccccccccccccccccccccccccccccaaaggcucuuuucagagccaccagaauu

SEQ ID NO: 15999 - RNA, 1914 nt, Artificial Sequence
  mRNA product Design e-6 comprising derived and/or modified sequence from HRSV(Memphis-37)__AIY60640.1__F-del_DSCav1_mut3 (opt5)
gggagagcggcucggccauuuugucccagucaguccggaggcugcggcugcagaaguaccgccugcggaguaacugcaaagaagcuuaccauggagcugcccauccucaagaccaacgccauuacaacgauccuggcugccgugacccuuugcuucgcgagcucccagaauauuacagaagaguuuuaccaaucuaccuguagcgcugucuccaaaggcuaucugggggcccucagaacaggaugguacaccucuguuaucacaauugaacugagcaacaucaaggagaucaaaugcaauggcaccgacgccaaggugaaacuuauuaagcaggaacuggauaaguauaaaaacgcugugacggaccuccagcugcugaugcaguccaccccugccgcugggucuggaagcgccaucuguuccggcauugcggucugcaaggugcuccaccuggagggggagguuaauaaaaucaagaacgcccuucugagcacaaauaaagcuguggucucucucuccaacggagugagcguucugaccuucaaggugcuugaucugaagaauuacauugacaaacaacuccugccgauccugaacaagcagucuuguuccauucccaauaucgaaacagucaucgaguuucagcagaaaaacaaucggcuccuggaaauuacccgcgaguucagcgugaacgccggcgugacgacaccugucucuaccuauaugcuuacaaauuccgagcugcucagccugaucaacgauaugcccauuaccaacgaccaaaagaaacuuauguccaauaacguucagaucgugagacagcagucuuacagcauuaugugcaucaucaaggaagaggugcuggcuuaugucgugcaacucccucuguacggcguuauugauacccccuguuggaaacugcauacauccccucucugcacgaccaauacaaaggaagggagcaacaucugucugacccggacagaccgcggaugguacugcgauaaugccggcucuguguccuuuuucccgcaggcggagaccuguaagguccagagcaacagaguguuuugcgacacgaugaacucucuuacacugcccagcgaaguuaaucucugcaauauugauaucuucaacccuaaauaugacuguaagauuaugaccuccaaaaccgaugugucuagcuccgucaucacaagccugggggccaucgugucuugcuacggaaagaccaaauguacagcuuccaauaagaaccggggcauuaucaagacguuuagcaaugggugcgacuaugucucuaacaaaggaguggacaccguuuccgugggcaauacacuuuacugugucaacaagcaagagggccagagccuguaugugaaaggggagcccauuaucaacuucuacgauccucucguuuuucccuccgacgaguucgaugccucuauuagccaggugaaugaaaagaucaaccagucccuggcuuuuauucgcaaaucugacgaacugcuccacaaugucaacgugggaaagagcaccacaaauaucaugaucaccacgauuaucauugugaucauuguuauccugcuucugcucaucgccgucggccuguuccuguauugcaaggccagaugaggacuaguacuggcugcaucucccuuuccucuguccuccauccuucucccaggauggugaagggggaccugguacccagugauccccaccccaggauccuaaaucaugacuuaccugcuaauaaaaacucauuggaaaagugagaagaucuaaaaaaaaaaaaaaaaaaaaaaaaaaaaaaaaaaaaaaaaaaaaaaaaaaaaaaaaaaaaaaaaugcaucccccccccccccccccccccccccccccccaaaggcucuuuucagagccaccagaauu

SEQ ID NO: 16000 - RNA, 1914 nt, Artificial Sequence
  mRNA product Design e-6 comprising derived and/or modified sequence from HRSV(Memphis-37)__AIY60640.1__F-del_DSCav1_mut3 (opt6)
gggagagcggcucggccauuuugucccagucaguccggaggcugcggcugcagaaguaccgccugcggaguaacugcaaagaagcuuaccauggaacuacccauccuaaaaacaaaugccauaaccacaauacucgccgcuguaacacuauguuucgcuaguucacaaaacauuacagaagaauuuuaccaauccacaugcucagcaguaucaaaaggauaccuaggugcacuaagaacaggaugguacacaagcguaauuacaauagaauuauccaauauuaaagaaauaaaauguaacggcacugacgcuaaaguaaaauuaaucaaacaagaacuagacaaauacaaaaacgcaguaacagaccuacaauuacucaugcaauccacacccgcagcaggaucaggcucagccauaugcucagguauagcaguaugcaaaguacuccaccuugaaggagaaguaaacaaaauaaaaaacgcauuacuaucaacaaacaaagcaguaguaucacuaucaaacggagucucugucuuaaccuuuaaaguauuagauuuaaaaaacuacauagacaaacaacuauuaccaauucuaaauaaacaaucauguucuauaccaaauauagaaacaguaauagaauuucaacaaaaaaacaaccgauuacuagaaaucacaagagaauuuucugucaacgccggcguaaccaccccagucucaacauauaugcuaacaaauagugaacucuuauccuuaauaaacgacaugccaauaacaaaugaccaaaaaaaauuaauguccaauaacguacaaauagucagacaacagucauacucaauaauguguaucaucaaagaagaaguauuagcauacguaguucaacuaccccuauacggcguaauagacacaccauguuggaaacuacacacaucacccuuaugcacaaccaauaccaaagaaggaucuaacauaugccuaaccagaacagacagaggcugguacugcgacaacgcagguucagucucauucuucccacaagccgaaacaugcaaaguccaauccaacagaguauuuugcgacacuaugaacucacuaacucuaccuucagaagucaaccuuuguaacauagacauauuuaacccaaaauacgauuguaaaauaaugaccagcaaaacagacgucucaucaagcguaauaacaucacuuggcgcaauagucuccugcuacggaaaaacaaaaugcacagcauccaacaaaaacagaggcaucauaaaaaccuucuccaacggcugcgacuauguaagcaacaaaggugucgauacaguaucaguaggaaacacacuauacugcguaaacaaacaagaaggacaaucacucuacguaaaaggugaaccaaucauaaacuucuacgacccauuaguuuucccaucagacgaauuugaugccuccauaucacaaguaaaugaaaaaauaaaucaaucccuagcauucauacgaaaaucugaugaauuacuucacaaugucaacgucggaaaaucaaccacuaacauaaugauaacaacaauuauaauaguaauaauaguaauacuccuacuauuaauagccgucggucuuuuccuauacugcaaagcacgauaaggacuaguacuggcugcaucucccuuuccucuguccuccauccuucucccaggauggugaagggggaccugguacccagugauccccaccccaggauccuaaaucaugacuuaccugcuaauaaaaacucauuggaaaagugagaagaucuaaaaaaaaaaaaaaaaaaaaaaaaaaaaaaaaaaaaaaaaaaaaaaaaaaaaaaaaaaaaaaaaugcaucccccccccccccccccccccccccccccccaaaggcucuuuucagagccaccagaauu

SEQ ID NO: 16001 - RNA, 1914 nt, Artificial Sequence
  mRNA product Design e-6 comprising derived and/or modified sequence from HRSV(Memphis-37)__AIY60640.1__F-del_DSCav1_mut3 (opt11)
gggagagcggcucggccauuuugucccagucaguccggaggcugcggcugcagaaguaccgccugcggaguaacugcaaagaagcuuaccauggaacuacccauccucaaaaccaacgccaucaccacaauccuagcugccgucacccuaugcuucgcaagcagccaaaacaucacagaagaauuuuaccaaucaaccugcuccgccgucuccaaaggguaccuaggugcccuccgcaccggcugguacacgucugucauaaccaucgaacucuccaacaucaaagaaaucaaauguaacggaacagacgcaaaagucaaacuaaucaaacaagaacuagacaaauacaaaaacgccguaaccgaccuccaacugcucaugcaauccacccccgcugccggcuccgggagcgcaaucugcucuggaaucgccguaugcaaaguccuccaccucgaaggagaaguaaacaaaaucaaaaacgcgcuccucaguaccaacaaagccgucgucucucuaucaaacggcguaucgguccucaccuucaaaguccucgaccuaaagaacuacauagacaaacaacuccuccccauccuaaacaaacaauccugcucaaucccaaacaucgaaaccgugaucgaguuccaacagaaaaacaaccgccuacucgaaaucacccgagaguucucagucaacgcaggagucaccacccccgucucaacauacaugcuuaccaacagcgaacuccuaucccucaucaacgacaugccaaucacaaacgaccaaaagaaacucaugagcaacaacguccagaucguaagacaacaaagcuacagcaucaugugcaucaucaaagaagaaguacuagcauacgucguccaacucccccucuacggcgucaucgacacccccugcuggaaacuccacaccucaccccucugcacaaccaacaccaaagaaggcuccaauaucugccucacacgcaccgaccgcggcugguacugcgacaacgccggcuccgucuccuucuucccucaagccgaaaccugcaaaguccaguccaacagagucuucugcgacaccaugaacucccuaacacuuccaucagaagucaaccuuuguaacaucgacaucuucaaucccaaauacgacuguaaaauaaugaccucaaaaacugacgugucaagcucaguuaucaccucccuaggggccaucgucuccugcuacggcaaaacaaaaugcaccgcauccaacaaaaaucgcggaaucaucaaaacauucuccaacggaugcgacuacgucucaaacaagggaguagauaccguaagcguuggcaacacccucuacugcguaaacaaacaagaaggccaaucacucuacgucaaaggcgaacccauaaucaacuucuacgacccccucgucuucccuuccgaugaguucgacgccagcaucucccaagucaacgagaaaauaaaccagucacucgcauucauccgcaaaagcgacgaacuccuccacaacguaaacguaggcaaauccacaaccaauaucaugauaaccacaaucaucaucgugaucaucgucauccuccuccuccucauagcugucggacucuuccucuacuguaaagcacgcugaggacuaguacuggcugcaucucccuuuccucuguccuccauccuucucccaggauggugaagggggaccugguacccagugauccccaccccaggauccuaaaucaugacuuaccugcuaauaaaaacucauuggaaaagugagaagaucuaaaaaaaaaaaaaaaaaaaaaaaaaaaaaaaaaaaaaaaaaaaaaaaaaaaaaaaaaaaaaaaaugcaucccccccccccccccccccccccccccccccaaaggcucuuuucagagccaccagaauu

SEQ ID NO: 16002 - RNA, 2130 nt, Artificial Sequence
  mRNA product Design f-1 comprising derived and/or modified sequence from HRSV(Memphis-37)__AIY60640.1__F-del_DSCav1_mut3 (opt1)
gggagagcggcucggccauuuugucccagucaguccggaggcugcggcugcagaaguaccgccugcggaguaacugcaaagaagcuuaccauggagcugcccauccucaagaccaacgccaucaccacgauccuggccgcggugacccugugcuucgccagcucccagaacaucaccgaggaguucuaccagagcacgugcuccgccgucagcaagggcuaccucggcgcccugcgcaccgggugguacaccagcgugaucaccaucgagcuguccaacaucaaggagaucaagugcaacggcaccgacgccaaggugaagcucaucaagcaggagcuggacaaguacaagaacgcggucacggaccugcagcuccugaugcagagcaccccggccgccggcuccgggagcgcgaucugcuccggcaucgccgucugcaaggugcugcaccucgagggcgaggugaacaagaucaagaacgcccugcuguccaccaacaaggccgucgugagccucuccaacggggugagcguccugaccuucaaggugcuggaccucaagaacuacaucgacaagcagcugcugcccauccugaacaagcagagcugcuccauccccaacaucgagaccgucaucgaguuccagcagaagaacaaccgccuccuggagaucacgcgggaguucagcgugaacgcgggcgugaccacccccgucuccaccuacaugcugacgaacagcgagcuccugucccugaucaacgacaugccgaucaccaacgaccagaagaagcucaugagcaacaacgugcagaucgugcgccagcaguccuacagcaucaugugcaucaucaaggaggagguccuggccuacguggugcagcugccccucuacggggucaucgacacccccugcuggaagcugcacaccagcccccugugcacgaccaacaccaaggagggcuccaacaucugccucacccggacggaccgcgggugguacugcgacaacgccggcagcguguccuucuucccgcaggccgagaccugcaagguccagagcaaccggguguucugcgacaccaugaacucccugacccugcccagcgaggugaaccucugcaacaucgacaucuucaaccccaaguacgacugcaagaucaugacguccaagaccgacgucagcuccagcgugaucaccucccugggcgccaucgugagcugcuacgggaagaccaagugcacggcgagcaacaagaaccgcggcaucaucaagaccuucuccaacgggugcgacuacgucagcaacaagggcguggacaccguguccgucggcaacacccuguacugcgugaacaagcaggagggccagagccucuacgugaagggggagcccaucaucaacuucuacgacccgcuggucuuccccuccgacgaguucgacgccagcaucucccaggugaacgagaagaucaaccagagccuggccuucauccggaaguccgacgagcuccugcacaacgugaacgucggcaagagcaccacgaacaucaugaucaccaccaucaucaucgugaucaucgugauccugcugcuccugaucgccgucgggcuguuccucuacugcaaggcccgcugaggacuagugaagggaacacccaaauuuaauucagccuuaagcacaauuaauuaagagugaaacguaauuguacaagcaguuggucacccaccauagggcaugaucaacaccgcaaccuuuccuuuuucccccagugauucugaaaaaccccucuucccuucagcuugcuuagauguuccaaauuuaguaagcuuaaggcggccuacagaagaaaaagaaaaaaaaggccacaaaaguucccucucacuuucaguaaauaaaauaaaagcagcaacagaaauaaagaaauaaaugaaauucaaaaugaaauaaauauuguguugugcagcauuaaaaaaucaauaaaaauuaaaaaugagcaagaucuaaaaaaaaaaaaaaaaaaaaaaaaaaaaaaaaaaaaaaaaaaaaaaaaaaaaaaaaaaaaaaaaugcaucccccccccccccccccccccccccccccccaaaggcucuuuucagagccaccagaauu

SEQ ID NO: 16003 - RNA, 2130 nt, Artificial Sequence
  mRNA product Design f-1 comprising derived and/or modified sequence from HRSV(Memphis-37)__AIY60640.1__F-del_DSCav1_mut3 (opt1)
gggagagcggcucggccauuuugucccagucaguccggaggcugcggcugcagaaguaccgccugcggaguaacugcaaagaagcuuaccauggagcugcccauccucaagaccaacgccaucaccacgauccuggccgcggugacccugugcuucgccagcucccagaacaucaccgaggaguucuaccagagcacgugcuccgccgucagcaagggcuaccucggggcccugcgcaccggcugguacaccuccgugaucaccaucgagcugagcaacaucaaggagaucaagugcaacgggaccgacgccaaggugaagcucaucaagcaggagcuggacaaguacaagaacgcggucacggaccugcagcuccugaugcaguccaccccggccgccggcagcggguccgccaucugcagcggcaucgcggugugcaaggugcugcaccucgagggcgaggucaacaagaucaagaacgcccugcuguccaccaacaaggccguggugagccucuccaacggggucagcgugcugaccuucaaggugcuggaccucaagaacuacaucgacaagcagcugcugcccauccucaacaagcaguccugcagcauccccaacaucgagacggucaucgaguuccagcagaagaacaaccggcugcuggagaucacccgcgaguucuccgugaacgccggcgugaccacccccgucagcacguacaugcucaccaacuccgagcugcugagccucaucaacgacaugccgaucaccaacgaccagaagaagcugaugagcaacaacgugcagaucgugcggcagcaguccuacagcaucaugugcaucaucaaggaggagguccuggccuacguggugcagcucccccuguacggggucaucgacacccccugcuggaagcugcacacgagcccccucugcaccaccaacaccaaggagggcuccaacaucugccugacgcgcaccgaccgggggugguacugcgacaacgcgggcuccgugagcuucuucccgcaggccgagaccugcaaggugcaguccaaccgcgucuucugcgacaccaugaacagccugacgcuccccuccgaggugaaccugugcaacaucgacaucuucaaccccaaguacgacugcaagaucaugaccagcaagaccgacgucuccagcuccgugaucaccagccugggcgccaucguguccugcuacgggaagacgaagugcaccgccagcaacaagaaccggggcaucaucaagaccuucuccaacgggugcgacuacgucagcaacaagggcguggacaccguguccgucggcaacacgcucuacugcgugaacaagcaggaggggcagagccuguacgugaagggcgagcccaucaucaacuucuacgacccgcuggucuuccccagcgacgaguucgacgccuccaucagccaggugaacgagaagaucaaccagucccucgcguucauccgcaagagcgacgagcugcugcacaacgugaacgucgggaaguccaccaccaacaucaugaucaccaccaucaucaucgugaucaucgugauccuccugcugcucaucgccgucggccuguuccuguacugcaaggcccggugaggacuagugaagggaacacccaaauuuaauucagccuuaagcacaauuaauuaagagugaaacguaauuguacaagcaguuggucacccaccauagggcaugaucaacaccgcaaccuuuccuuuuucccccagugauucugaaaaaccccucuucccuucagcuugcuuagauguuccaaauuuaguaagcuuaaggcggccuacagaagaaaaagaaaaaaaaggccacaaaaguucccucucacuuucaguaaauaaaauaaaagcagcaacagaaauaaagaaauaaaugaaauucaaaaugaaauaaauauuguguugugcagcauuaaaaaaucaauaaaaauuaaaaaugagcaagaucuaaaaaaaaaaaaaaaaaaaaaaaaaaaaaaaaaaaaaaaaaaaaaaaaaaaaaaaaaaaaaaaaugcaucccccccccccccccccccccccccccccccaaaggcucuuuucagagccaccagaauu

SEQ ID NO: 16004 - RNA, 2130 nt, Artificial Sequence
  mRNA product Design f-1 comprising derived and/or modified sequence from HRSV(Memphis-37)__AIY60640.1__F-del_DSCav1_mut3 (opt2)
gggagagcggcucggccauuuugucccagucaguccggaggcugcggcugcagaaguaccgccugcggaguaacugcaaagaagcuuaccauggagcuccccauccucaagaccaacgccaucaccaccauccucgccgccgucacccucugcuucgccuccucccagaacaucaccgaggaguucuaccaguccaccugcuccgccgucuccaagggcuaccucggcgcccuccgcaccggcugguacaccuccgucaucaccaucgagcucuccaacaucaaggagaucaagugcaacggcaccgacgccaaggucaagcucaucaagcaggagcucgacaaguacaagaacgccgucaccgaccuccagcuccucaugcaguccacccccgccgccggcuccggcuccgccaucugcuccggcaucgccgucugcaagguccuccaccucgagggcgaggucaacaagaucaagaacgcccuccucuccaccaacaaggccgucgucucccucuccaacggcgucuccguccucaccuucaagguccucgaccucaagaacuacaucgacaagcagcuccuccccauccucaacaagcaguccugcuccauccccaacaucgagaccgucaucgaguuccagcagaagaacaaccgccuccucgagaucacccgcgaguucuccgucaacgccggcgucaccacccccgucuccaccuacaugcucaccaacuccgagcuccucucccucaucaacgacaugcccaucaccaacgaccagaagaagcucauguccaacaacguccagaucguccgccagcaguccuacuccaucaugugcaucaucaaggaggagguccucgccuacgucguccagcucccccucuacggcgucaucgacacccccugcuggaagcuccacaccuccccccucugcaccaccaacaccaaggagggcuccaacaucugccucacccgcaccgaccgcggcugguacugcgacaacgccggcuccgucuccuucuucccccaggccgagaccugcaagguccaguccaaccgcgucuucugcgacaccaugaacucccucacccuccccuccgaggucaaccucugcaacaucgacaucuucaaccccaaguacgacugcaagaucaugaccuccaagaccgacgucuccuccuccgucaucaccucccucggcgccaucgucuccugcuacggcaagaccaagugcaccgccuccaacaagaaccgcggcaucaucaagaccuucuccaacggcugcgacuacgucuccaacaagggcgucgacaccgucuccgucggcaacacccucuacugcgucaacaagcaggagggccagucccucuacgucaagggcgagcccaucaucaacuucuacgacccccucgucuuccccuccgacgaguucgacgccuccaucucccaggucaacgagaagaucaaccagucccucgccuucauccgcaaguccgacgagcuccuccacaacgucaacgucggcaaguccaccaccaacaucaugaucaccaccaucaucaucgucaucaucgucauccuccuccuccucaucgccgucggccucuuccucuacugcaaggcccgcugaggacuagugaagggaacacccaaauuuaauucagccuuaagcacaauuaauuaagagugaaacguaauuguacaagcaguuggucacccaccauagggcaugaucaacaccgcaaccuuuccuuuuucccccagugauucugaaaaaccccucuucccuucagcuugcuuagauguuccaaauuuaguaagcuuaaggcggccuacagaagaaaaagaaaaaaaaggccacaaaaguucccucucacuuucaguaaauaaaauaaaagcagcaacagaaauaaagaaauaaaugaaauucaaaaugaaauaaauauuguguugugcagcauuaaaaaaucaauaaaaauuaaaaaugagcaagaucuaaaaaaaaaaaaaaaaaaaaaaaaaaaaaaaaaaaaaaaaaaaaaaaaaaaaaaaaaaaaaaaaugcaucccccccccccccccccccccccccccccccaaaggcucuuuucagagccaccagaauu

SEQ ID NO: 16005 - RNA, 2130 nt, Artificial Sequence
  mRNA product Design f-1 comprising derived and/or modified sequence from HRSV(Memphis-37)__AIY60640.1__F-del_DSCav1_mut3 (opt3)
gggagagcggcucggccauuuugucccagucaguccggaggcugcggcugcagaaguaccgccugcggaguaacugcaaagaagcuuaccauggagcugcccauccucaagaccaacgccauuacaacuauacuugcugcagugacgcugugcuucgccagcucccagaauaucaccgaagaguuuuaccaaucuacauguucagcggucaguaaaggcuauuugggggcuuuaagaacuggaugguacaccagcguuauuacaaucgaacuguccaacauuaaggagaucaaaugcaaugguaccgacgccaaggugaaacuaauaaagcaggaacucgauaaguauaaaaacgcaguaacugaccugcagcuucugaugcagucuacuccugccgcuggcucggggucagcaaucuguagcggaauugccgugugcaaggucuugcaccucgagggcgaggugaauaaaaucaagaacgcucugcugaguaccaauaaagccguugugucccucucuaacggugucagcguguuaacguucaagguacuggaucuuaagaauuacauugacaaacaauugcugccaauccuaaacaagcaguccuguucaauaccgaauauugaaacuguuaucgaguuucagcagaaaaacaauaggcuccuggaaauuacccgggaguucagugugaacgcgggggucacaacucccgugagcaccuauaugcuuacaaauucugagcuguugucccucaucaacgauaugccuaucaccaacgaccaaaagaaacugaugucaaauaacgugcagauuguccgccagcagagcuacaguauaaugugcaucauuaaggaagagguuuuagcauaugugguacaacugccacucuacggagugaucgauacgcccuguuggaaacuucauacuucuccucugugcacaaccaauacuaaggaaggcuccaacauauguuugacacgaaccgaccguggcugguacugcgauaaugccgggagcgucucguuuuucccacaggcugagacguguaaggugcagucuaacagaguuuucugcgacaccaugaacucccuaacacugcccucagaagugaaucucugcaauauugauaucuucaacccuaaauaugacuguaagaucaugacaaguaaaaccgaugucagcuccucugugauuacaagccugggagccaucguaucaugcuacgguaagacuaaauguaccgcaaguaauaagaacaggggcauuauaaagacauuuuccaaugggugcgacuauguuagcaacaaaggaguggacaccgucucugugggcaauacucuuuacugugucaacaagcaagagggucagucacuguaugugaaaggggagccaaucauuaacuucuacgauccguugguuuuucccagugacgaauuugaugcuagcaucucccaggugaaugagaagaucaaccagucucucgccuuuauucggaaaucggacgaacuguuacacaauguaaacgucggaaagagcacgacaaauauaaugaucaccacuauuaucauugugaucauaguuauccugcuacuccugauugcggugggccuuuucuuguauugcaaggcccgcugaggacuagugaagggaacacccaaauuuaauucagccuuaagcacaauuaauuaagagugaaacguaauuguacaagcaguuggucacccaccauagggcaugaucaacaccgcaaccuuuccuuuuucccccagugauucugaaaaaccccucuucccuucagcuugcuuagauguuccaaauuuaguaagcuuaaggcggccuacagaagaaaaagaaaaaaaaggccacaaaaguucccucucacuuucaguaaauaaaauaaaagcagcaacagaaauaaagaaauaaaugaaauucaaaaugaaauaaauauuguguugugcagcauuaaaaaaucaauaaaaauuaaaaaugagcaagaucuaaaaaaaaaaaaaaaaaaaaaaaaaaaaaaaaaaaaaaaaaaaaaaaaaaaaaaaaaaaaaaaaugcaucccccccccccccccccccccccccccccccaaaggcucuuuucagagccaccagaauu

SEQ ID NO: 16006 - RNA, 2130 nt, Artificial Sequence
  mRNA product Design f-1 comprising derived and/or modified sequence from HRSV(Memphis-37)__AIY60640.1__F-del_DSCav1_mut3 (opt4)
gggagagcggcucggccauuuugucccagucaguccggaggcugcggcugcagaaguaccgccugcggaguaacugcaaagaagcuuaccauggagcugcccauccugaagaccaacgccaucaccaccauccuggccgccgugacccugugcuucgccagcagccagaacaucaccgaggaguucuaccagagcaccugcagcgccgugagcaagggcuaccugggcgcccugagaaccggcugguacaccagcgugaucaccaucgagcugagcaacaucaaggagaucaagugcaacggcaccgacgccaaggugaagcugaucaagcaggagcuggacaaguacaagaacgccgugaccgaccugcagcugcugaugcagagcacccccgccgccggcagcggcagcgccaucugcagcggcaucgccgugugcaaggugcugcaccuggagggcgaggugaacaagaucaagaacgcccugcugagcaccaacaaggccguggugagccugagcaacggcgugagcgugcugaccuucaaggugcuggaccugaagaacuacaucgacaagcagcugcugcccauccugaacaagcagagcugcagcauccccaacaucgagaccgugaucgaguuccagcagaagaacaacagacugcuggagaucaccagagaguucagcgugaacgccggcgugaccacccccgugagcaccuacaugcugaccaacagcgagcugcugagccugaucaacgacaugcccaucaccaacgaccagaagaagcugaugagcaacaacgugcagaucgugagacagcagagcuacagcaucaugugcaucaucaaggaggaggugcuggccuacguggugcagcugccccuguacggcgugaucgacacccccugcuggaagcugcacaccagcccccugugcaccaccaacaccaaggagggcagcaacaucugccugaccagaaccgacagaggcugguacugcgacaacgccggcagcgugagcuucuucccccaggccgagaccugcaaggugcagagcaacagaguguucugcgacaccaugaacagccugacccugcccagcgaggugaaccugugcaacaucgacaucuucaaccccaaguacgacugcaagaucaugaccagcaagaccgacgugagcagcagcgugaucaccagccugggcgccaucgugagcugcuacggcaagaccaagugcaccgccagcaacaagaacagaggcaucaucaagaccuucagcaacggcugcgacuacgugagcaacaagggcguggacaccgugagcgugggcaacacccuguacugcgugaacaagcaggagggccagagccuguacgugaagggcgagcccaucaucaacuucuacgacccccugguguuccccagcgacgaguucgacgccagcaucagccaggugaacgagaagaucaaccagagccuggccuucaucagaaagagcgacgagcugcugcacaacgugaacgugggcaagagcaccaccaacaucaugaucaccaccaucaucaucgugaucaucgugauccugcugcugcugaucgccgugggccuguuccuguacugcaaggccagaugaggacuagugaagggaacacccaaauuuaauucagccuuaagcacaauuaauuaagagugaaacguaauuguacaagcaguuggucacccaccauagggcaugaucaacaccgcaaccuuuccuuuuucccccagugauucugaaaaaccccucuucccuucagcuugcuuagauguuccaaauuuaguaagcuuaaggcggccuacagaagaaaaagaaaaaaaaggccacaaaaguucccucucacuuucaguaaauaaaauaaaagcagcaacagaaauaaagaaauaaaugaaauucaaaaugaaauaaauauuguguugugcagcauuaaaaaaucaauaaaaauuaaaaaugagcaagaucuaaaaaaaaaaaaaaaaaaaaaaaaaaaaaaaaaaaaaaaaaaaaaaaaaaaaaaaaaaaaaaaaugcaucccccccccccccccccccccccccccccccaaaggcucuuuucagagccaccagaauu

SEQ ID NO: 16007 - RNA, 2130 nt, Artificial Sequence
  mRNA product Design f-1 comprising derived and/or modified sequence from HRSV(Memphis-37)__AIY60640.1__F-del_DSCav1_mut3 (opt5)
gggagagcggcucggccauuuugucccagucaguccggaggcugcggcugcagaaguaccgccugcggaguaacugcaaagaagcuuaccauggagcugcccauccucaagaccaacgccauuacaacgauccuggcugccgugacccuuugcuucgcgagcucccagaauauuacagaagaguuuuaccaaucuaccuguagcgcugucuccaaaggcuaucugggggcccucagaacaggaugguacaccucuguuaucacaauugaacugagcaacaucaaggagaucaaaugcaauggcaccgacgccaaggugaaacuuauuaagcaggaacuggauaaguauaaaaacgcugugacggaccuccagcugcugaugcaguccaccccugccgcugggucuggaagcgccaucuguuccggcauugcggucugcaaggugcuccaccuggagggggagguuaauaaaaucaagaacgcccuucugagcacaaauaaagcuguggucucucucuccaacggagugagcguucugaccuucaaggugcuugaucugaagaauuacauugacaaacaacuccugccgauccugaacaagcagucuuguuccauucccaauaucgaaacagucaucgaguuucagcagaaaaacaaucggcuccuggaaauuacccgcgaguucagcgugaacgccggcgugacgacaccugucucuaccuauaugcuuacaaauuccgagcugcucagccugaucaacgauaugcccauuaccaacgaccaaaagaaacuuauguccaauaacguucagaucgugagacagcagucuuacagcauuaugugcaucaucaaggaagaggugcuggcuuaugucgugcaacucccucuguacggcguuauugauacccccuguuggaaacugcauacauccccucucugcacgaccaauacaaaggaagggagcaacaucugucugacccggacagaccgcggaugguacugcgauaaugccggcucuguguccuuuuucccgcaggcggagaccuguaagguccagagcaacagaguguuuugcgacacgaugaacucucuuacacugcccagcgaaguuaaucucugcaauauugauaucuucaacccuaaauaugacuguaagauuaugaccuccaaaaccgaugugucuagcuccgucaucacaagccugggggccaucgugucuugcuacggaaagaccaaauguacagcuuccaauaagaaccggggcauuaucaagacguuuagcaaugggugcgacuaugucucuaacaaaggaguggacaccguuuccgugggcaauacacuuuacugugucaacaagcaagagggccagagccuguaugugaaaggggagcccauuaucaacuucuacgauccucucguuuuucccuccgacgaguucgaugccucuauuagccaggugaaugaaaagaucaaccagucccuggcuuuuauucgcaaaucugacgaacugcuccacaaugucaacgugggaaagagcaccacaaauaucaugaucaccacgauuaucauugugaucauuguuauccugcuucugcucaucgccgucggccuguuccuguauugcaaggccagaugaggacuagugaagggaacacccaaauuuaauucagccuuaagcacaauuaauuaagagugaaacguaauuguacaagcaguuggucacccaccauagggcaugaucaacaccgcaaccuuuccuuuuucccccagugauucugaaaaaccccucuucccuucagcuugcuuagauguuccaaauuuaguaagcuuaaggcggccuacagaagaaaaagaaaaaaaaggccacaaaaguucccucucacuuucaguaaauaaaauaaaagcagcaacagaaauaaagaaauaaaugaaauucaaaaugaaauaaauauuguguugugcagcauuaaaaaaucaauaaaaauuaaaaaugagcaagaucuaaaaaaaaaaaaaaaaaaaaaaaaaaaaaaaaaaaaaaaaaaaaaaaaaaaaaaaaaaaaaaaaugcaucccccccccccccccccccccccccccccccaaaggcucuuuucagagccaccagaauu

SEQ ID NO: 16008 - RNA, 2130 nt, Artificial Sequence
  mRNA product Design f-1 comprising derived and/or modified sequence from HRSV(Memphis-37)__AIY60640.1__F-del_DSCav1_mut3 (opt6)
gggagagcggcucggccauuuugucccagucaguccggaggcugcggcugcagaaguaccgccugcggaguaacugcaaagaagcuuaccauggaacuacccauccuaaaaacaaaugccauaaccacaauacucgccgcuguaacacuauguuucgcuaguucacaaaacauuacagaagaauuuuaccaauccacaugcucagcaguaucaaaaggauaccuaggugcacuaagaacaggaugguacacaagcguaauuacaauagaauuauccaauauuaaagaaauaaaauguaacggcacugacgcuaaaguaaaauuaaucaaacaagaacuagacaaauacaaaaacgcaguaacagaccuacaauuacucaugcaauccacacccgcagcaggaucaggcucagccauaugcucagguauagcaguaugcaaaguacuccaccuugaaggagaaguaaacaaaauaaaaaacgcauuacuaucaacaaacaaagcaguaguaucacuaucaaacggagucucugucuuaaccuuuaaaguauuagauuuaaaaaacuacauagacaaacaacuauuaccaauucuaaauaaacaaucauguucuauaccaaauauagaaacaguaauagaauuucaacaaaaaaacaaccgauuacuagaaaucacaagagaauuuucugucaacgccggcguaaccaccccagucucaacauauaugcuaacaaauagugaacucuuauccuuaauaaacgacaugccaauaacaaaugaccaaaaaaaauuaauguccaauaacguacaaauagucagacaacagucauacucaauaauguguaucaucaaagaagaaguauuagcauacguaguucaacuaccccuauacggcguaauagacacaccauguuggaaacuacacacaucacccuuaugcacaaccaauaccaaagaaggaucuaacauaugccuaaccagaacagacagaggcugguacugcgacaacgcagguucagucucauucuucccacaagccgaaacaugcaaaguccaauccaacagaguauuuugcgacacuaugaacucacuaacucuaccuucagaagucaaccuuuguaacauagacauauuuaacccaaaauacgauuguaaaauaaugaccagcaaaacagacgucucaucaagcguaauaacaucacuuggcgcaauagucuccugcuacggaaaaacaaaaugcacagcauccaacaaaaacagaggcaucauaaaaaccuucuccaacggcugcgacuauguaagcaacaaaggugucgauacaguaucaguaggaaacacacuauacugcguaaacaaacaagaaggacaaucacucuacguaaaaggugaaccaaucauaaacuucuacgacccauuaguuuucccaucagacgaauuugaugccuccauaucacaaguaaaugaaaaaauaaaucaaucccuagcauucauacgaaaaucugaugaauuacuucacaaugucaacgucggaaaaucaaccacuaacauaaugauaacaacaauuauaauaguaauaauaguaauacuccuacuauuaauagccgucggucuuuuccuauacugcaaagcacgauaaggacuagugaagggaacacccaaauuuaauucagccuuaagcacaauuaauuaagagugaaacguaauuguacaagcaguuggucacccaccauagggcaugaucaacaccgcaaccuuuccuuuuucccccagugauucugaaaaaccccucuucccuucagcuugcuuagauguuccaaauuuaguaagcuuaaggcggccuacagaagaaaaagaaaaaaaaggccacaaaaguucccucucacuuucaguaaauaaaauaaaagcagcaacagaaauaaagaaauaaaugaaauucaaaaugaaauaaauauuguguugugcagcauuaaaaaaucaauaaaaauuaaaaaugagcaagaucuaaaaaaaaaaaaaaaaaaaaaaaaaaaaaaaaaaaaaaaaaaaaaaaaaaaaaaaaaaaaaaaaugcaucccccccccccccccccccccccccccccccaaaggcucuuuucagagccaccagaauu

SEQ ID NO: 16009 - RNA, 2130 nt, Artificial Sequence
  mRNA product Design f-1 comprising derived and/or modified sequence from HRSV(Memphis-37)__AIY60640.1__F-del_DSCav1_mut3 (opt11)
gggagagcggcucggccauuuugucccagucaguccggaggcugcggcugcagaaguaccgccugcggaguaacugcaaagaagcuuaccauggaacuacccauccucaaaaccaacgccaucaccacaauccuagcugccgucacccuaugcuucgcaagcagccaaaacaucacagaagaauuuuaccaaucaaccugcuccgccgucuccaaaggguaccuaggugcccuccgcaccggcugguacacgucugucauaaccaucgaacucuccaacaucaaagaaaucaaauguaacggaacagacgcaaaagucaaacuaaucaaacaagaacuagacaaauacaaaaacgccguaaccgaccuccaacugcucaugcaauccacccccgcugccggcuccgggagcgcaaucugcucuggaaucgccguaugcaaaguccuccaccucgaaggagaaguaaacaaaaucaaaaacgcgcuccucaguaccaacaaagccgucgucucucuaucaaacggcguaucgguccucaccuucaaaguccucgaccuaaagaacuacauagacaaacaacuccuccccauccuaaacaaacaauccugcucaaucccaaacaucgaaaccgugaucgaguuccaacagaaaaacaaccgccuacucgaaaucacccgagaguucucagucaacgcaggagucaccacccccgucucaacauacaugcuuaccaacagcgaacuccuaucccucaucaacgacaugccaaucacaaacgaccaaaagaaacucaugagcaacaacguccagaucguaagacaacaaagcuacagcaucaugugcaucaucaaagaagaaguacuagcauacgucguccaacucccccucuacggcgucaucgacacccccugcuggaaacuccacaccucaccccucugcacaaccaacaccaaagaaggcuccaauaucugccucacacgcaccgaccgcggcugguacugcgacaacgccggcuccgucuccuucuucccucaagccgaaaccugcaaaguccaguccaacagagucuucugcgacaccaugaacucccuaacacuuccaucagaagucaaccuuuguaacaucgacaucuucaaucccaaauacgacuguaaaauaaugaccucaaaaacugacgugucaagcucaguuaucaccucccuaggggccaucgucuccugcuacggcaaaacaaaaugcaccgcauccaacaaaaaucgcggaaucaucaaaacauucuccaacggaugcgacuacgucucaaacaagggaguagauaccguaagcguuggcaacacccucuacugcguaaacaaacaagaaggccaaucacucuacgucaaaggcgaacccauaaucaacuucuacgacccccucgucuucccuuccgaugaguucgacgccagcaucucccaagucaacgagaaaauaaaccagucacucgcauucauccgcaaaagcgacgaacuccuccacaacguaaacguaggcaaauccacaaccaauaucaugauaaccacaaucaucaucgugaucaucgucauccuccuccuccucauagcugucggacucuuccucuacuguaaagcacgcugaggacuagugaagggaacacccaaauuuaauucagccuuaagcacaauuaauuaagagugaaacguaauuguacaagcaguuggucacccaccauagggcaugaucaacaccgcaaccuuuccuuuuucccccagugauucugaaaaaccccucuucccuucagcuugcuuagauguuccaaauuuaguaagcuuaaggcggccuacagaagaaaaagaaaaaaaaggccacaaaaguucccucucacuuucaguaaauaaaauaaaagcagcaacagaaauaaagaaauaaaugaaauucaaaaugaaauaaauauuguguugugcagcauuaaaaaaucaauaaaaauuaaaaaugagcaagaucuaaaaaaaaaaaaaaaaaaaaaaaaaaaaaaaaaaaaaaaaaaaaaaaaaaaaaaaaaaaaaaaaugcaucccccccccccccccccccccccccccccccaaaggcucuuuucagagccaccagaauu

SEQ ID NO: 16010 - RNA, 1910 nt, Artificial Sequence
  mRNA product Design f-2 comprising derived and/or modified sequence from HRSV(Memphis-37)__AIY60640.1__F-del_DSCav1_mut3 (opt1)
gggagagcggcucggccauuuugucccagucaguccggaggcugcggcugcagaaguaccgccugcggaguaacugcaaagaagcuuaccauggagcugcccauccucaagaccaacgccaucaccacgauccuggccgcggugacccugugcuucgccagcucccagaacaucaccgaggaguucuaccagagcacgugcuccgccgucagcaagggcuaccucggcgcccugcgcaccgggugguacaccagcgugaucaccaucgagcuguccaacaucaaggagaucaagugcaacggcaccgacgccaaggugaagcucaucaagcaggagcuggacaaguacaagaacgcggucacggaccugcagcuccugaugcagagcaccccggccgccggcuccgggagcgcgaucugcuccggcaucgccgucugcaaggugcugcaccucgagggcgaggugaacaagaucaagaacgcccugcuguccaccaacaaggccgucgugagccucuccaacggggugagcguccugaccuucaaggugcuggaccucaagaacuacaucgacaagcagcugcugcccauccugaacaagcagagcugcuccauccccaacaucgagaccgucaucgaguuccagcagaagaacaaccgccuccuggagaucacgcgggaguucagcgugaacgcgggcgugaccacccccgucuccaccuacaugcugacgaacagcgagcuccugucccugaucaacgacaugccgaucaccaacgaccagaagaagcucaugagcaacaacgugcagaucgugcgccagcaguccuacagcaucaugugcaucaucaaggaggagguccuggccuacguggugcagcugccccucuacggggucaucgacacccccugcuggaagcugcacaccagcccccugugcacgaccaacaccaaggagggcuccaacaucugccucacccggacggaccgcgggugguacugcgacaacgccggcagcguguccuucuucccgcaggccgagaccugcaagguccagagcaaccggguguucugcgacaccaugaacucccugacccugcccagcgaggugaaccucugcaacaucgacaucuucaaccccaaguacgacugcaagaucaugacguccaagaccgacgucagcuccagcgugaucaccucccugggcgccaucgugagcugcuacgggaagaccaagugcacggcgagcaacaagaaccgcggcaucaucaagaccuucuccaacgggugcgacuacgucagcaacaagggcguggacaccguguccgucggcaacacccuguacugcgugaacaagcaggagggccagagccucuacgugaagggggagcccaucaucaacuucuacgacccgcuggucuuccccuccgacgaguucgacgccagcaucucccaggugaacgagaagaucaaccagagccuggccuucauccggaaguccgacgagcuccugcacaacgugaacgucggcaagagcaccacgaacaucaugaucaccaccaucaucaucgugaucaucgugauccugcugcuccugaucgccgucgggcuguuccucuacugcaaggcccgcugaggacuaguggaagcauuuuccuggcugauuaaaagaaauuacucagcuauggucaucuguuccuguuagaaggcuaugcagcauauuauauacuaugcgcauguuaugaaaugcauaauaaaaaauuuuaaaaaaucuaaaagaucuaaaaaaaaaaaaaaaaaaaaaaaaaaaaaaaaaaaaaaaaaaaaaaaaaaaaaaaaaaaaaaaaugcaucccccccccccccccccccccccccccccccaaaggcucuuuucagagccaccagaauu

SEQ ID NO: 16011 - RNA, 1910 nt, Artificial Sequence
  mRNA product Design f-2 comprising derived and/or modified sequence from HRSV(Memphis-37)__AIY60640.1__F-del_DSCav1_mut3 (opt1)
gggagagcggcucggccauuuugucccagucaguccggaggcugcggcugcagaaguaccgccugcggaguaacugcaaagaagcuuaccauggagcugcccauccucaagaccaacgccaucaccacgauccuggccgcggugacccugugcuucgccagcucccagaacaucaccgaggaguucuaccagagcacgugcuccgccgucagcaagggcuaccucggggcccugcgcaccggcugguacaccuccgugaucaccaucgagcugagcaacaucaaggagaucaagugcaacgggaccgacgccaaggugaagcucaucaagcaggagcuggacaaguacaagaacgcggucacggaccugcagcuccugaugcaguccaccccggccgccggcagcggguccgccaucugcagcggcaucgcggugugcaaggugcugcaccucgagggcgaggucaacaagaucaagaacgcccugcuguccaccaacaaggccguggugagccucuccaacggggucagcgugcugaccuucaaggugcuggaccucaagaacuacaucgacaagcagcugcugcccauccucaacaagcaguccugcagcauccccaacaucgagacggucaucgaguuccagcagaagaacaaccggcugcuggagaucacccgcgaguucuccgugaacgccggcgugaccacccccgucagcacguacaugcucaccaacuccgagcugcugagccucaucaacgacaugccgaucaccaacgaccagaagaagcugaugagcaacaacgugcagaucgugcggcagcaguccuacagcaucaugugcaucaucaaggaggagguccuggccuacguggugcagcucccccuguacggggucaucgacacccccugcuggaagcugcacacgagcccccucugcaccaccaacaccaaggagggcuccaacaucugccugacgcgcaccgaccgggggugguacugcgacaacgcgggcuccgugagcuucuucccgcaggccgagaccugcaaggugcaguccaaccgcgucuucugcgacaccaugaacagccugacgcuccccuccgaggugaaccugugcaacaucgacaucuucaaccccaaguacgacugcaagaucaugaccagcaagaccgacgucuccagcuccgugaucaccagccugggcgccaucguguccugcuacgggaagacgaagugcaccgccagcaacaagaaccggggcaucaucaagaccuucuccaacgggugcgacuacgucagcaacaagggcguggacaccguguccgucggcaacacgcucuacugcgugaacaagcaggaggggcagagccuguacgugaagggcgagcccaucaucaacuucuacgacccgcuggucuuccccagcgacgaguucgacgccuccaucagccaggugaacgagaagaucaaccagucccucgcguucauccgcaagagcgacgagcugcugcacaacgugaacgucgggaaguccaccaccaacaucaugaucaccaccaucaucaucgugaucaucgugauccuccugcugcucaucgccgucggccuguuccuguacugcaaggcccggugaggacuaguggaagcauuuuccuggcugauuaaaagaaauuacucagcuauggucaucuguuccuguuagaaggcuaugcagcauauuauauacuaugcgcauguuaugaaaugcauaauaaaaaauuuuaaaaaaucuaaaagaucuaaaaaaaaaaaaaaaaaaaaaaaaaaaaaaaaaaaaaaaaaaaaaaaaaaaaaaaaaaaaaaaaugcaucccccccccccccccccccccccccccccccaaaggcucuuuucagagccaccagaauu

SEQ ID NO: 16012 - RNA, 1910 nt, Artificial Sequence
  mRNA product Design f-2 comprising derived and/or modified sequence from HRSV(Memphis-37)__AIY60640.1__F-del_DSCav1_mut3 (opt2)
gggagagcggcucggccauuuugucccagucaguccggaggcugcggcugcagaaguaccgccugcggaguaacugcaaagaagcuuaccauggagcuccccauccucaagaccaacgccaucaccaccauccucgccgccgucacccucugcuucgccuccucccagaacaucaccgaggaguucuaccaguccaccugcuccgccgucuccaagggcuaccucggcgcccuccgcaccggcugguacaccuccgucaucaccaucgagcucuccaacaucaaggagaucaagugcaacggcaccgacgccaaggucaagcucaucaagcaggagcucgacaaguacaagaacgccgucaccgaccuccagcuccucaugcaguccacccccgccgccggcuccggcuccgccaucugcuccggcaucgccgucugcaagguccuccaccucgagggcgaggucaacaagaucaagaacgcccuccucuccaccaacaaggccgucgucucccucuccaacggcgucuccguccucaccuucaagguccucgaccucaagaacuacaucgacaagcagcuccuccccauccucaacaagcaguccugcuccauccccaacaucgagaccgucaucgaguuccagcagaagaacaaccgccuccucgagaucacccgcgaguucuccgucaacgccggcgucaccacccccgucuccaccuacaugcucaccaacuccgagcuccucucccucaucaacgacaugcccaucaccaacgaccagaagaagcucauguccaacaacguccagaucguccgccagcaguccuacuccaucaugugcaucaucaaggaggagguccucgccuacgucguccagcucccccucuacggcgucaucgacacccccugcuggaagcuccacaccuccccccucugcaccaccaacaccaaggagggcuccaacaucugccucacccgcaccgaccgcggcugguacugcgacaacgccggcuccgucuccuucuucccccaggccgagaccugcaagguccaguccaaccgcgucuucugcgacaccaugaacucccucacccuccccuccgaggucaaccucugcaacaucgacaucuucaaccccaaguacgacugcaagaucaugaccuccaagaccgacgucuccuccuccgucaucaccucccucggcgccaucgucuccugcuacggcaagaccaagugcaccgccuccaacaagaaccgcggcaucaucaagaccuucuccaacggcugcgacuacgucuccaacaagggcgucgacaccgucuccgucggcaacacccucuacugcgucaacaagcaggagggccagucccucuacgucaagggcgagcccaucaucaacuucuacgacccccucgucuuccccuccgacgaguucgacgccuccaucucccaggucaacgagaagaucaaccagucccucgccuucauccgcaaguccgacgagcuccuccacaacgucaacgucggcaaguccaccaccaacaucaugaucaccaccaucaucaucgucaucaucgucauccuccuccuccucaucgccgucggccucuuccucuacugcaaggcccgcugaggacuaguggaagcauuuuccuggcugauuaaaagaaauuacucagcuauggucaucuguuccuguuagaaggcuaugcagcauauuauauacuaugcgcauguuaugaaaugcauaauaaaaaauuuuaaaaaaucuaaaagaucuaaaaaaaaaaaaaaaaaaaaaaaaaaaaaaaaaaaaaaaaaaaaaaaaaaaaaaaaaaaaaaaaugcaucccccccccccccccccccccccccccccccaaaggcucuuuucagagccaccagaauu

SEQ ID NO: 16013 - RNA, 1910 nt, Artificial Sequence
  mRNA product Design f-2 comprising derived and/or modified sequence from HRSV(Memphis-37)__AIY60640.1__F-del_DSCav1_mut3 (opt3)
gggagagcggcucggccauuuugucccagucaguccggaggcugcggcugcagaaguaccgccugcggaguaacugcaaagaagcuuaccauggagcugcccauccucaagaccaacgccauuacaacuauacuugcugcagugacgcugugcuucgccagcucccagaauaucaccgaagaguuuuaccaaucuacauguucagcggucaguaaaggcuauuugggggcuuuaagaacuggaugguacaccagcguuauuacaaucgaacuguccaacauuaaggagaucaaaugcaaugguaccgacgccaaggugaaacuaauaaagcaggaacucgauaaguauaaaaacgcaguaacugaccugcagcuucugaugcagucuacuccugccgcuggcucggggucagcaaucuguagcggaauugccgugugcaaggucuugcaccucgagggcgaggugaauaaaaucaagaacgcucugcugaguaccaauaaagccguugugucccucucuaacggugucagcguguuaacguucaagguacuggaucuuaagaauuacauugacaaacaauugcugccaauccuaaacaagcaguccuguucaauaccgaauauugaaacuguuaucgaguuucagcagaaaaacaauaggcuccuggaaauuacccgggaguucagugugaacgcgggggucacaacucccgugagcaccuauaugcuuacaaauucugagcuguugucccucaucaacgauaugccuaucaccaacgaccaaaagaaacugaugucaaauaacgugcagauuguccgccagcagagcuacaguauaaugugcaucauuaaggaagagguuuuagcauaugugguacaacugccacucuacggagugaucgauacgcccuguuggaaacuucauacuucuccucugugcacaaccaauacuaaggaaggcuccaacauauguuugacacgaaccgaccguggcugguacugcgauaaugccgggagcgucucguuuuucccacaggcugagacguguaaggugcagucuaacagaguuuucugcgacaccaugaacucccuaacacugcccucagaagugaaucucugcaauauugauaucuucaacccuaaauaugacuguaagaucaugacaaguaaaaccgaugucagcuccucugugauuacaagccugggagccaucguaucaugcuacgguaagacuaaauguaccgcaaguaauaagaacaggggcauuauaaagacauuuuccaaugggugcgacuauguuagcaacaaaggaguggacaccgucucugugggcaauacucuuuacugugucaacaagcaagagggucagucacuguaugugaaaggggagccaaucauuaacuucuacgauccguugguuuuucccagugacgaauuugaugcuagcaucucccaggugaaugagaagaucaaccagucucucgccuuuauucggaaaucggacgaacuguuacacaauguaaacgucggaaagagcacgacaaauauaaugaucaccacuauuaucauugugaucauaguuauccugcuacuccugauugcggugggccuuuucuuguauugcaaggcccgcugaggacuaguggaagcauuuuccuggcugauuaaaagaaauuacucagcuauggucaucuguuccuguuagaaggcuaugcagcauauuauauacuaugcgcauguuaugaaaugcauaauaaaaaauuuuaaaaaaucuaaaagaucuaaaaaaaaaaaaaaaaaaaaaaaaaaaaaaaaaaaaaaaaaaaaaaaaaaaaaaaaaaaaaaaaugcaucccccccccccccccccccccccccccccccaaaggcucuuuucagagccaccagaauu

SEQ ID NO: 16014 - RNA, 1910 nt, Artificial Sequence
  mRNA product Design f-2 comprising derived and/or modified sequence from HRSV(Memphis-37)__AIY60640.1__F-del_DSCav1_mut3 (opt4)
gggagagcggcucggccauuuugucccagucaguccggaggcugcggcugcagaaguaccgccugcggaguaacugcaaagaagcuuaccauggagcugcccauccugaagaccaacgccaucaccaccauccuggccgccgugacccugugcuucgccagcagccagaacaucaccgaggaguucuaccagagcaccugcagcgccgugagcaagggcuaccugggcgcccugagaaccggcugguacaccagcgugaucaccaucgagcugagcaacaucaaggagaucaagugcaacggcaccgacgccaaggugaagcugaucaagcaggagcuggacaaguacaagaacgccgugaccgaccugcagcugcugaugcagagcacccccgccgccggcagcggcagcgccaucugcagcggcaucgccgugugcaaggugcugcaccuggagggcgaggugaacaagaucaagaacgcccugcugagcaccaacaaggccguggugagccugagcaacggcgugagcgugcugaccuucaaggugcuggaccugaagaacuacaucgacaagcagcugcugcccauccugaacaagcagagcugcagcauccccaacaucgagaccgugaucgaguuccagcagaagaacaacagacugcuggagaucaccagagaguucagcgugaacgccggcgugaccacccccgugagcaccuacaugcugaccaacagcgagcugcugagccugaucaacgacaugcccaucaccaacgaccagaagaagcugaugagcaacaacgugcagaucgugagacagcagagcuacagcaucaugugcaucaucaaggaggaggugcuggccuacguggugcagcugccccuguacggcgugaucgacacccccugcuggaagcugcacaccagcccccugugcaccaccaacaccaaggagggcagcaacaucugccugaccagaaccgacagaggcugguacugcgacaacgccggcagcgugagcuucuucccccaggccgagaccugcaaggugcagagcaacagaguguucugcgacaccaugaacagccugacccugcccagcgaggugaaccugugcaacaucgacaucuucaaccccaaguacgacugcaagaucaugaccagcaagaccgacgugagcagcagcgugaucaccagccugggcgccaucgugagcugcuacggcaagaccaagugcaccgccagcaacaagaacagaggcaucaucaagaccuucagcaacggcugcgacuacgugagcaacaagggcguggacaccgugagcgugggcaacacccuguacugcgugaacaagcaggagggccagagccuguacgugaagggcgagcccaucaucaacuucuacgacccccugguguuccccagcgacgaguucgacgccagcaucagccaggugaacgagaagaucaaccagagccuggccuucaucagaaagagcgacgagcugcugcacaacgugaacgugggcaagagcaccaccaacaucaugaucaccaccaucaucaucgugaucaucgugauccugcugcugcugaucgccgugggccuguuccuguacugcaaggccagaugaggacuaguggaagcauuuuccuggcugauuaaaagaaauuacucagcuauggucaucuguuccuguuagaaggcuaugcagcauauuauauacuaugcgcauguuaugaaaugcauaauaaaaaauuuuaaaaaaucuaaaagaucuaaaaaaaaaaaaaaaaaaaaaaaaaaaaaaaaaaaaaaaaaaaaaaaaaaaaaaaaaaaaaaaaugcaucccccccccccccccccccccccccccccccaaaggcucuuuucagagccaccagaauu

SEQ ID NO: 16015 - RNA, 1910 nt, Artificial Sequence
  mRNA product Design f-2 comprising derived and/or modified sequence from HRSV(Memphis-37)__AIY60640.1__F-del_DSCav1_mut3 (opt5)
gggagagcggcucggccauuuugucccagucaguccggaggcugcggcugcagaaguaccgccugcggaguaacugcaaagaagcuuaccauggagcugcccauccucaagaccaacgccauuacaacgauccuggcugccgugacccuuugcuucgcgagcucccagaauauuacagaagaguuuuaccaaucuaccuguagcgcugucuccaaaggcuaucugggggcccucagaacaggaugguacaccucuguuaucacaauugaacugagcaacaucaaggagaucaaaugcaauggcaccgacgccaaggugaaacuuauuaagcaggaacuggauaaguauaaaaacgcugugacggaccuccagcugcugaugcaguccaccccugccgcugggucuggaagcgccaucuguuccggcauugcggucugcaaggugcuccaccuggagggggagguuaauaaaaucaagaacgcccuucugagcacaaauaaagcuguggucucucucuccaacggagugagcguucugaccuucaaggugcuugaucugaagaauuacauugacaaacaacuccugccgauccugaacaagcagucuuguuccauucccaauaucgaaacagucaucgaguuucagcagaaaaacaaucggcuccuggaaauuacccgcgaguucagcgugaacgccggcgugacgacaccugucucuaccuauaugcuuacaaauuccgagcugcucagccugaucaacgauaugcccauuaccaacgaccaaaagaaacuuauguccaauaacguucagaucgugagacagcagucuuacagcauuaugugcaucaucaaggaagaggugcuggcuuaugucgugcaacucccucuguacggcguuauugauacccccuguuggaaacugcauacauccccucucugcacgaccaauacaaaggaagggagcaacaucugucugacccggacagaccgcggaugguacugcgauaaugccggcucuguguccuuuuucccgcaggcggagaccuguaagguccagagcaacagaguguuuugcgacacgaugaacucucuuacacugcccagcgaaguuaaucucugcaauauugauaucuucaacccuaaauaugacuguaagauuaugaccuccaaaaccgaugugucuagcuccgucaucacaagccugggggccaucgugucuugcuacggaaagaccaaauguacagcuuccaauaagaaccggggcauuaucaagacguuuagcaaugggugcgacuaugucucuaacaaaggaguggacaccguuuccgugggcaauacacuuuacugugucaacaagcaagagggccagagccuguaugugaaaggggagcccauuaucaacuucuacgauccucucguuuuucccuccgacgaguucgaugccucuauuagccaggugaaugaaaagaucaaccagucccuggcuuuuauucgcaaaucugacgaacugcuccacaaugucaacgugggaaagagcaccacaaauaucaugaucaccacgauuaucauugugaucauuguuauccugcuucugcucaucgccgucggccuguuccuguauugcaaggccagaugaggacuaguggaagcauuuuccuggcugauuaaaagaaauuacucagcuauggucaucuguuccuguuagaaggcuaugcagcauauuauauacuaugcgcauguuaugaaaugcauaauaaaaaauuuuaaaaaaucuaaaagaucuaaaaaaaaaaaaaaaaaaaaaaaaaaaaaaaaaaaaaaaaaaaaaaaaaaaaaaaaaaaaaaaaugcaucccccccccccccccccccccccccccccccaaaggcucuuuucagagccaccagaauu

SEQ ID NO: 16016 - RNA, 1910 nt, Artificial Sequence
  mRNA product Design f-2 comprising derived and/or modified sequence from HRSV(Memphis-37)__AIY60640.1__F-del_DSCav1_mut3 (opt6)
gggagagcggcucggccauuuugucccagucaguccggaggcugcggcugcagaaguaccgccugcggaguaacugcaaagaagcuuaccauggaacuacccauccuaaaaacaaaugccauaaccacaauacucgccgcuguaacacuauguuucgcuaguucacaaaacauuacagaagaauuuuaccaauccacaugcucagcaguaucaaaaggauaccuaggugcacuaagaacaggaugguacacaagcguaauuacaauagaauuauccaauauuaaagaaauaaaauguaacggcacugacgcuaaaguaaaauuaaucaaacaagaacuagacaaauacaaaaacgcaguaacagaccuacaauuacucaugcaauccacacccgcagcaggaucaggcucagccauaugcucagguauagcaguaugcaaaguacuccaccuugaaggagaaguaaacaaaauaaaaaacgcauuacuaucaacaaacaaagcaguaguaucacuaucaaacggagucucugucuuaaccuuuaaaguauuagauuuaaaaaacuacauagacaaacaacuauuaccaauucuaaauaaacaaucauguucuauaccaaauauagaaacaguaauagaauuucaacaaaaaaacaaccgauuacuagaaaucacaagagaauuuucugucaacgccggcguaaccaccccagucucaacauauaugcuaacaaauagugaacucuuauccuuaauaaacgacaugccaauaacaaaugaccaaaaaaaauuaauguccaauaacguacaaauagucagacaacagucauacucaauaauguguaucaucaaagaagaaguauuagcauacguaguucaacuaccccuauacggcguaauagacacaccauguuggaaacuacacacaucacccuuaugcacaaccaauaccaaagaaggaucuaacauaugccuaaccagaacagacagaggcugguacugcgacaacgcagguucagucucauucuucccacaagccgaaacaugcaaaguccaauccaacagaguauuuugcgacacuaugaacucacuaacucuaccuucagaagucaaccuuuguaacauagacauauuuaacccaaaauacgauuguaaaauaaugaccagcaaaacagacgucucaucaagcguaauaacaucacuuggcgcaauagucuccugcuacggaaaaacaaaaugcacagcauccaacaaaaacagaggcaucauaaaaaccuucuccaacggcugcgacuauguaagcaacaaaggugucgauacaguaucaguaggaaacacacuauacugcguaaacaaacaagaaggacaaucacucuacguaaaaggugaaccaaucauaaacuucuacgacccauuaguuuucccaucagacgaauuugaugccuccauaucacaaguaaaugaaaaaauaaaucaaucccuagcauucauacgaaaaucugaugaauuacuucacaaugucaacgucggaaaaucaaccacuaacauaaugauaacaacaauuauaauaguaauaauaguaauacuccuacuauuaauagccgucggucuuuuccuauacugcaaagcacgauaaggacuaguggaagcauuuuccuggcugauuaaaagaaauuacucagcuauggucaucuguuccuguuagaaggcuaugcagcauauuauauacuaugcgcauguuaugaaaugcauaauaaaaaauuuuaaaaaaucuaaaagaucuaaaaaaaaaaaaaaaaaaaaaaaaaaaaaaaaaaaaaaaaaaaaaaaaaaaaaaaaaaaaaaaaugcaucccccccccccccccccccccccccccccccaaaggcucuuuucagagccaccagaauu

SEQ ID NO: 16017 - RNA, 1910 nt, Artificial Sequence
  mRNA product Design f-2 comprising derived and/or modified sequence from HRSV(Memphis-37)__AIY60640.1__F-del_DSCav1_mut3 (opt11)
gggagagcggcucggccauuuugucccagucaguccggaggcugcggcugcagaaguaccgccugcggaguaacugcaaagaagcuuaccauggaacuacccauccucaaaaccaacgccaucaccacaauccuagcugccgucacccuaugcuucgcaagcagccaaaacaucacagaagaauuuuaccaaucaaccugcuccgccgucuccaaaggguaccuaggugcccuccgcaccggcugguacacgucugucauaaccaucgaacucuccaacaucaaagaaaucaaauguaacggaacagacgcaaaagucaaacuaaucaaacaagaacuagacaaauacaaaaacgccguaaccgaccuccaacugcucaugcaauccacccccgcugccggcuccgggagcgcaaucugcucuggaaucgccguaugcaaaguccuccaccucgaaggagaaguaaacaaaaucaaaaacgcgcuccucaguaccaacaaagccgucgucucucuaucaaacggcguaucgguccucaccuucaaaguccucgaccuaaagaacuacauagacaaacaacuccuccccauccuaaacaaacaauccugcucaaucccaaacaucgaaaccgugaucgaguuccaacagaaaaacaaccgccuacucgaaaucacccgagaguucucagucaacgcaggagucaccacccccgucucaacauacaugcuuaccaacagcgaacuccuaucccucaucaacgacaugccaaucacaaacgaccaaaagaaacucaugagcaacaacguccagaucguaagacaacaaagcuacagcaucaugugcaucaucaaagaagaaguacuagcauacgucguccaacucccccucuacggcgucaucgacacccccugcuggaaacuccacaccucaccccucugcacaaccaacaccaaagaaggcuccaauaucugccucacacgcaccgaccgcggcugguacugcgacaacgccggcuccgucuccuucuucccucaagccgaaaccugcaaaguccaguccaacagagucuucugcgacaccaugaacucccuaacacuuccaucagaagucaaccuuuguaacaucgacaucuucaaucccaaauacgacuguaaaauaaugaccucaaaaacugacgugucaagcucaguuaucaccucccuaggggccaucgucuccugcuacggcaaaacaaaaugcaccgcauccaacaaaaaucgcggaaucaucaaaacauucuccaacggaugcgacuacgucucaaacaagggaguagauaccguaagcguuggcaacacccucuacugcguaaacaaacaagaaggccaaucacucuacgucaaaggcgaacccauaaucaacuucuacgacccccucgucuucccuuccgaugaguucgacgccagcaucucccaagucaacgagaaaauaaaccagucacucgcauucauccgcaaaagcgacgaacuccuccacaacguaaacguaggcaaauccacaaccaauaucaugauaaccacaaucaucaucgugaucaucgucauccuccuccuccucauagcugucggacucuuccucuacuguaaagcacgcugaggacuaguggaagcauuuuccuggcugauuaaaagaaauuacucagcuauggucaucuguuccuguuagaaggcuaugcagcauauuauauacuaugcgcauguuaugaaaugcauaauaaaaaauuuuaaaaaaucuaaaagaucuaaaaaaaaaaaaaaaaaaaaaaaaaaaaaaaaaaaaaaaaaaaaaaaaaaaaaaaaaaaaaaaaugcaucccccccccccccccccccccccccccccccaaaggcucuuuucagagccaccagaauu

SEQ ID NO: 16018 - RNA, 1901 nt, Artificial Sequence
  mRNA product Design f-3 comprising derived and/or modified sequence from HRSV(Memphis-37)__AIY60640.1__F-del_DSCav1_mut3 (opt1)
gggagagucccgcagucggcguccagcggcucugcuuguucgugugugugucguugcaggccuuauucaagcuuaccauggagcugcccauccucaagaccaacgccaucaccacgauccuggccgcggugacccugugcuucgccagcucccagaacaucaccgaggaguucuaccagagcacgugcuccgccgucagcaagggcuaccucggcgcccugcgcaccgggugguacaccagcgugaucaccaucgagcuguccaacaucaaggagaucaagugcaacggcaccgacgccaaggugaagcucaucaagcaggagcuggacaaguacaagaacgcggucacggaccugcagcuccugaugcagagcaccccggccgccggcuccgggagcgcgaucugcuccggcaucgccgucugcaaggugcugcaccucgagggcgaggugaacaagaucaagaacgcccugcuguccaccaacaaggccgucgugagccucuccaacggggugagcguccugaccuucaaggugcuggaccucaagaacuacaucgacaagcagcugcugcccauccugaacaagcagagcugcuccauccccaacaucgagaccgucaucgaguuccagcagaagaacaaccgccuccuggagaucacgcgggaguucagcgugaacgcgggcgugaccacccccgucuccaccuacaugcugacgaacagcgagcuccugucccugaucaacgacaugccgaucaccaacgaccagaagaagcucaugagcaacaacgugcagaucgugcgccagcaguccuacagcaucaugugcaucaucaaggaggagguccuggccuacguggugcagcugccccucuacggggucaucgacacccccugcuggaagcugcacaccagcccccugugcacgaccaacaccaaggagggcuccaacaucugccucacccggacggaccgcgggugguacugcgacaacgccggcagcguguccuucuucccgcaggccgagaccugcaagguccagagcaaccggguguucugcgacaccaugaacucccugacccugcccagcgaggugaaccucugcaacaucgacaucuucaaccccaaguacgacugcaagaucaugacguccaagaccgacgucagcuccagcgugaucaccucccugggcgccaucgugagcugcuacgggaagaccaagugcacggcgagcaacaagaaccgcggcaucaucaagaccuucuccaacgggugcgacuacgucagcaacaagggcguggacaccguguccgucggcaacacccuguacugcgugaacaagcaggagggccagagccucuacgugaagggggagcccaucaucaacuucuacgacccgcuggucuuccccuccgacgaguucgacgccagcaucucccaggugaacgagaagaucaaccagagccuggccuucauccggaaguccgacgagcuccugcacaacgugaacgucggcaagagcaccacgaacaucaugaucaccaccaucaucaucgugaucaucgugauccugcugcuccugaucgccgucgggcuguuccucuacugcaaggcccgcugaggacuaguacuggcugcaucucccuuuccucuguccuccauccuucucccaggauggugaagggggaccugguacccagugauccccaccccaggauccuaaaucaugacuuaccugcuaauaaaaacucauuggaaaagugagaagaucuaaaaaaaaaaaaaaaaaaaaaaaaaaaaaaaaaaaaaaaaaaaaaaaaaaaaaaaaaaaaaaaaugcaucccccccccccccccccccccccccccccccaaaggcucuuuucagagccaccagaauu

SEQ ID NO: 16019 - RNA, 1901 nt, Artificial Sequence
  mRNA product Design f-3 comprising derived and/or modified sequence from HRSV(Memphis-37)__AIY60640.1__F-del_DSCav1_mut3 (opt1)
gggagagucccgcagucggcguccagcggcucugcuuguucgugugugugucguugcaggccuuauucaagcuuaccauggagcugcccauccucaagaccaacgccaucaccacgauccuggccgcggugacccugugcuucgccagcucccagaacaucaccgaggaguucuaccagagcacgugcuccgccgucagcaagggcuaccucggggcccugcgcaccggcugguacaccuccgugaucaccaucgagcugagcaacaucaaggagaucaagugcaacgggaccgacgccaaggugaagcucaucaagcaggagcuggacaaguacaagaacgcggucacggaccugcagcuccugaugcaguccaccccggccgccggcagcggguccgccaucugcagcggcaucgcggugugcaaggugcugcaccucgagggcgaggucaacaagaucaagaacgcccugcuguccaccaacaaggccguggugagccucuccaacggggucagcgugcugaccuucaaggugcuggaccucaagaacuacaucgacaagcagcugcugcccauccucaacaagcaguccugcagcauccccaacaucgagacggucaucgaguuccagcagaagaacaaccggcugcuggagaucacccgcgaguucuccgugaacgccggcgugaccacccccgucagcacguacaugcucaccaacuccgagcugcugagccucaucaacgacaugccgaucaccaacgaccagaagaagcugaugagcaacaacgugcagaucgugcggcagcaguccuacagcaucaugugcaucaucaaggaggagguccuggccuacguggugcagcucccccuguacggggucaucgacacccccugcuggaagcugcacacgagcccccucugcaccaccaacaccaaggagggcuccaacaucugccugacgcgcaccgaccgggggugguacugcgacaacgcgggcuccgugagcuucuucccgcaggccgagaccugcaaggugcaguccaaccgcgucuucugcgacaccaugaacagccugacgcuccccuccgaggugaaccugugcaacaucgacaucuucaaccccaaguacgacugcaagaucaugaccagcaagaccgacgucuccagcuccgugaucaccagccugggcgccaucguguccugcuacgggaagacgaagugcaccgccagcaacaagaaccggggcaucaucaagaccuucuccaacgggugcgacuacgucagcaacaagggcguggacaccguguccgucggcaacacgcucuacugcgugaacaagcaggaggggcagagccuguacgugaagggcgagcccaucaucaacuucuacgacccgcuggucuuccccagcgacgaguucgacgccuccaucagccaggugaacgagaagaucaaccagucccucgcguucauccgcaagagcgacgagcugcugcacaacgugaacgucgggaaguccaccaccaacaucaugaucaccaccaucaucaucgugaucaucgugauccuccugcugcucaucgccgucggccuguuccuguacugcaaggcccggugaggacuaguacuggcugcaucucccuuuccucuguccuccauccuucucccaggauggugaagggggaccugguacccagugauccccaccccaggauccuaaaucaugacuuaccugcuaauaaaaacucauuggaaaagugagaagaucuaaaaaaaaaaaaaaaaaaaaaaaaaaaaaaaaaaaaaaaaaaaaaaaaaaaaaaaaaaaaaaaaugcaucccccccccccccccccccccccccccccccaaaggcucuuuucagagccaccagaauu

SEQ ID NO: 16020 - RNA, 1901 nt, Artificial Sequence
  mRNA product Design f-3 comprising derived and/or modified sequence from HRSV(Memphis-37)__AIY60640.1__F-del_DSCav1_mut3 (opt2)
gggagagucccgcagucggcguccagcggcucugcuuguucgugugugugucguugcaggccuuauucaagcuuaccauggagcuccccauccucaagaccaacgccaucaccaccauccucgccgccgucacccucugcuucgccuccucccagaacaucaccgaggaguucuaccaguccaccugcuccgccgucuccaagggcuaccucggcgcccuccgcaccggcugguacaccuccgucaucaccaucgagcucuccaacaucaaggagaucaagugcaacggcaccgacgccaaggucaagcucaucaagcaggagcucgacaaguacaagaacgccgucaccgaccuccagcuccucaugcaguccacccccgccgccggcuccggcuccgccaucugcuccggcaucgccgucugcaagguccuccaccucgagggcgaggucaacaagaucaagaacgcccuccucuccaccaacaaggccgucgucucccucuccaacggcgucuccguccucaccuucaagguccucgaccucaagaacuacaucgacaagcagcuccuccccauccucaacaagcaguccugcuccauccccaacaucgagaccgucaucgaguuccagcagaagaacaaccgccuccucgagaucacccgcgaguucuccgucaacgccggcgucaccacccccgucuccaccuacaugcucaccaacuccgagcuccucucccucaucaacgacaugcccaucaccaacgaccagaagaagcucauguccaacaacguccagaucguccgccagcaguccuacuccaucaugugcaucaucaaggaggagguccucgccuacgucguccagcucccccucuacggcgucaucgacacccccugcuggaagcuccacaccuccccccucugcaccaccaacaccaaggagggcuccaacaucugccucacccgcaccgaccgcggcugguacugcgacaacgccggcuccgucuccuucuucccccaggccgagaccugcaagguccaguccaaccgcgucuucugcgacaccaugaacucccucacccuccccuccgaggucaaccucugcaacaucgacaucuucaaccccaaguacgacugcaagaucaugaccuccaagaccgacgucuccuccuccgucaucaccucccucggcgccaucgucuccugcuacggcaagaccaagugcaccgccuccaacaagaaccgcggcaucaucaagaccuucuccaacggcugcgacuacgucuccaacaagggcgucgacaccgucuccgucggcaacacccucuacugcgucaacaagcaggagggccagucccucuacgucaagggcgagcccaucaucaacuucuacgacccccucgucuuccccuccgacgaguucgacgccuccaucucccaggucaacgagaagaucaaccagucccucgccuucauccgcaaguccgacgagcuccuccacaacgucaacgucggcaaguccaccaccaacaucaugaucaccaccaucaucaucgucaucaucgucauccuccuccuccucaucgccgucggccucuuccucuacugcaaggcccgcugaggacuaguacuggcugcaucucccuuuccucuguccuccauccuucucccaggauggugaagggggaccugguacccagugauccccaccccaggauccuaaaucaugacuuaccugcuaauaaaaacucauuggaaaagugagaagaucuaaaaaaaaaaaaaaaaaaaaaaaaaaaaaaaaaaaaaaaaaaaaaaaaaaaaaaaaaaaaaaaaugcaucccccccccccccccccccccccccccccccaaaggcucuuuucagagccaccagaauu

SEQ ID NO: 16021 - RNA, 1901 nt, Artificial Sequence
  mRNA product Design f-3 comprising derived and/or modified sequence from HRSV(Memphis-37)__AIY60640.1__F-del_DSCav1_mut3 (opt3)
gggagagucccgcagucggcguccagcggcucugcuuguucgugugugugucguugcaggccuuauucaagcuuaccauggagcugcccauccucaagaccaacgccauuacaacuauacuugcugcagugacgcugugcuucgccagcucccagaauaucaccgaagaguuuuaccaaucuacauguucagcggucaguaaaggcuauuugggggcuuuaagaacuggaugguacaccagcguuauuacaaucgaacuguccaacauuaaggagaucaaaugcaaugguaccgacgccaaggugaaacuaauaaagcaggaacucgauaaguauaaaaacgcaguaacugaccugcagcuucugaugcagucuacuccugccgcuggcucggggucagcaaucuguagcggaauugccgugugcaaggucuugcaccucgagggcgaggugaauaaaaucaagaacgcucugcugaguaccaauaaagccguugugucccucucuaacggugucagcguguuaacguucaagguacuggaucuuaagaauuacauugacaaacaauugcugccaauccuaaacaagcaguccuguucaauaccgaauauugaaacuguuaucgaguuucagcagaaaaacaauaggcuccuggaaauuacccgggaguucagugugaacgcgggggucacaacucccgugagcaccuauaugcuuacaaauucugagcuguugucccucaucaacgauaugccuaucaccaacgaccaaaagaaacugaugucaaauaacgugcagauuguccgccagcagagcuacaguauaaugugcaucauuaaggaagagguuuuagcauaugugguacaacugccacucuacggagugaucgauacgcccuguuggaaacuucauacuucuccucugugcacaaccaauacuaaggaaggcuccaacauauguuugacacgaaccgaccguggcugguacugcgauaaugccgggagcgucucguuuuucccacaggcugagacguguaaggugcagucuaacagaguuuucugcgacaccaugaacucccuaacacugcccucagaagugaaucucugcaauauugauaucuucaacccuaaauaugacuguaagaucaugacaaguaaaaccgaugucagcuccucugugauuacaagccugggagccaucguaucaugcuacgguaagacuaaauguaccgcaaguaauaagaacaggggcauuauaaagacauuuuccaaugggugcgacuauguuagcaacaaaggaguggacaccgucucugugggcaauacucuuuacugugucaacaagcaagagggucagucacuguaugugaaaggggagccaaucauuaacuucuacgauccguugguuuuucccagugacgaauuugaugcuagcaucucccaggugaaugagaagaucaaccagucucucgccuuuauucggaaaucggacgaacuguuacacaauguaaacgucggaaagagcacgacaaauauaaugaucaccacuauuaucauugugaucauaguuauccugcuacuccugauugcggugggccuuuucuuguauugcaaggcccgcugaggacuaguacuggcugcaucucccuuuccucuguccuccauccuucucccaggauggugaagggggaccugguacccagugauccccaccccaggauccuaaaucaugacuuaccugcuaauaaaaacucauuggaaaagugagaagaucuaaaaaaaaaaaaaaaaaaaaaaaaaaaaaaaaaaaaaaaaaaaaaaaaaaaaaaaaaaaaaaaaugcaucccccccccccccccccccccccccccccccaaaggcucuuuucagagccaccagaauu

SEQ ID NO: 16022 - RNA, 1901 nt, Artificial Sequence
  mRNA product Design f-3 comprising derived and/or modified sequence from HRSV(Memphis-37)__AIY60640.1__F-del_DSCav1_mut3 (opt4)
gggagagucccgcagucggcguccagcggcucugcuuguucgugugugugucguugcaggccuuauucaagcuuaccauggagcugcccauccugaagaccaacgccaucaccaccauccuggccgccgugacccugugcuucgccagcagccagaacaucaccgaggaguucuaccagagcaccugcagcgccgugagcaagggcuaccugggcgcccugagaaccggcugguacaccagcgugaucaccaucgagcugagcaacaucaaggagaucaagugcaacggcaccgacgccaaggugaagcugaucaagcaggagcuggacaaguacaagaacgccgugaccgaccugcagcugcugaugcagagcacccccgccgccggcagcggcagcgccaucugcagcggcaucgccgugugcaaggugcugcaccuggagggcgaggugaacaagaucaagaacgcccugcugagcaccaacaaggccguggugagccugagcaacggcgugagcgugcugaccuucaaggugcuggaccugaagaacuacaucgacaagcagcugcugcccauccugaacaagcagagcugcagcauccccaacaucgagaccgugaucgaguuccagcagaagaacaacagacugcuggagaucaccagagaguucagcgugaacgccggcgugaccacccccgugagcaccuacaugcugaccaacagcgagcugcugagccugaucaacgacaugcccaucaccaacgaccagaagaagcugaugagcaacaacgugcagaucgugagacagcagagcuacagcaucaugugcaucaucaaggaggaggugcuggccuacguggugcagcugccccuguacggcgugaucgacacccccugcuggaagcugcacaccagcccccugugcaccaccaacaccaaggagggcagcaacaucugccugaccagaaccgacagaggcugguacugcgacaacgccggcagcgugagcuucuucccccaggccgagaccugcaaggugcagagcaacagaguguucugcgacaccaugaacagccugacccugcccagcgaggugaaccugugcaacaucgacaucuucaaccccaaguacgacugcaagaucaugaccagcaagaccgacgugagcagcagcgugaucaccagccugggcgccaucgugagcugcuacggcaagaccaagugcaccgccagcaacaagaacagaggcaucaucaagaccuucagcaacggcugcgacuacgugagcaacaagggcguggacaccgugagcgugggcaacacccuguacugcgugaacaagcaggagggccagagccuguacgugaagggcgagcccaucaucaacuucuacgacccccugguguuccccagcgacgaguucgacgccagcaucagccaggugaacgagaagaucaaccagagccuggccuucaucagaaagagcgacgagcugcugcacaacgugaacgugggcaagagcaccaccaacaucaugaucaccaccaucaucaucgugaucaucgugauccugcugcugcugaucgccgugggccuguuccuguacugcaaggccagaugaggacuaguacuggcugcaucucccuuuccucuguccuccauccuucucccaggauggugaagggggaccugguacccagugauccccaccccaggauccuaaaucaugacuuaccugcuaauaaaaacucauuggaaaagugagaagaucuaaaaaaaaaaaaaaaaaaaaaaaaaaaaaaaaaaaaaaaaaaaaaaaaaaaaaaaaaaaaaaaaugcaucccccccccccccccccccccccccccccccaaaggcucuuuucagagccaccagaauu

SEQ ID NO: 16023 - RNA, 1901 nt, Artificial Sequence
  mRNA product Design f-3 comprising derived and/or modified sequence from HRSV(Memphis-37)__AIY60640.1__F-del_DSCav1_mut3 (opt5)
gggagagucccgcagucggcguccagcggcucugcuuguucgugugugugucguugcaggccuuauucaagcuuaccauggagcugcccauccucaagaccaacgccauuacaacgauccuggcugccgugacccuuugcuucgcgagcucccagaauauuacagaagaguuuuaccaaucuaccuguagcgcugucuccaaaggcuaucugggggcccucagaacaggaugguacaccucuguuaucacaauugaacugagcaacaucaaggagaucaaaugcaauggcaccgacgccaaggugaaacuuauuaagcaggaacuggauaaguauaaaaacgcugugacggaccuccagcugcugaugcaguccaccccugccgcugggucuggaagcgccaucuguuccggcauugcggucugcaaggugcuccaccuggagggggagguuaauaaaaucaagaacgcccuucugagcacaaauaaagcuguggucucucucuccaacggagugagcguucugaccuucaaggugcuugaucugaagaauuacauugacaaacaacuccugccgauccugaacaagcagucuuguuccauucccaauaucgaaacagucaucgaguuucagcagaaaaacaaucggcuccuggaaauuacccgcgaguucagcgugaacgccggcgugacgacaccugucucuaccuauaugcuuacaaauuccgagcugcucagccugaucaacgauaugcccauuaccaacgaccaaaagaaacuuauguccaauaacguucagaucgugagacagcagucuuacagcauuaugugcaucaucaaggaagaggugcuggcuuaugucgugcaacucccucuguacggcguuauugauacccccuguuggaaacugcauacauccccucucugcacgaccaauacaaaggaagggagcaacaucugucugacccggacagaccgcggaugguacugcgauaaugccggcucuguguccuuuuucccgcaggcggagaccuguaagguccagagcaacagaguguuuugcgacacgaugaacucucuuacacugcccagcgaaguuaaucucugcaauauugauaucuucaacccuaaauaugacuguaagauuaugaccuccaaaaccgaugugucuagcuccgucaucacaagccugggggccaucgugucuugcuacggaaagaccaaauguacagcuuccaauaagaaccggggcauuaucaagacguuuagcaaugggugcgacuaugucucuaacaaaggaguggacaccguuuccgugggcaauacacuuuacugugucaacaagcaagagggccagagccuguaugugaaaggggagcccauuaucaacuucuacgauccucucguuuuucccuccgacgaguucgaugccucuauuagccaggugaaugaaaagaucaaccagucccuggcuuuuauucgcaaaucugacgaacugcuccacaaugucaacgugggaaagagcaccacaaauaucaugaucaccacgauuaucauugugaucauuguuauccugcuucugcucaucgccgucggccuguuccuguauugcaaggccagaugaggacuaguacuggcugcaucucccuuuccucuguccuccauccuucucccaggauggugaagggggaccugguacccagugauccccaccccaggauccuaaaucaugacuuaccugcuaauaaaaacucauuggaaaagugagaagaucuaaaaaaaaaaaaaaaaaaaaaaaaaaaaaaaaaaaaaaaaaaaaaaaaaaaaaaaaaaaaaaaaugcaucccccccccccccccccccccccccccccccaaaggcucuuuucagagccaccagaauu

SEQ ID NO: 16024 - RNA, 1901 nt, Artificial Sequence
  mRNA product Design f-3 comprising derived and/or modified sequence from HRSV(Memphis-37)__AIY60640.1__F-del_DSCav1_mut3 (opt6)
gggagagucccgcagucggcguccagcggcucugcuuguucgugugugugucguugcaggccuuauucaagcuuaccauggaacuacccauccuaaaaacaaaugccauaaccacaauacucgccgcuguaacacuauguuucgcuaguucacaaaacauuacagaagaauuuuaccaauccacaugcucagcaguaucaaaaggauaccuaggugcacuaagaacaggaugguacacaagcguaauuacaauagaauuauccaauauuaaagaaauaaaauguaacggcacugacgcuaaaguaaaauuaaucaaacaagaacuagacaaauacaaaaacgcaguaacagaccuacaauuacucaugcaauccacacccgcagcaggaucaggcucagccauaugcucagguauagcaguaugcaaaguacuccaccuugaaggagaaguaaacaaaauaaaaaacgcauuacuaucaacaaacaaagcaguaguaucacuaucaaacggagucucugucuuaaccuuuaaaguauuagauuuaaaaaacuacauagacaaacaacuauuaccaauucuaaauaaacaaucauguucuauaccaaauauagaaacaguaauagaauuucaacaaaaaaacaaccgauuacuagaaaucacaagagaauuuucugucaacgccggcguaaccaccccagucucaacauauaugcuaacaaauagugaacucuuauccuuaauaaacgacaugccaauaacaaaugaccaaaaaaaauuaauguccaauaacguacaaauagucagacaacagucauacucaauaauguguaucaucaaagaagaaguauuagcauacguaguucaacuaccccuauacggcguaauagacacaccauguuggaaacuacacacaucacccuuaugcacaaccaauaccaaagaaggaucuaacauaugccuaaccagaacagacagaggcugguacugcgacaacgcagguucagucucauucuucccacaagccgaaacaugcaaaguccaauccaacagaguauuuugcgacacuaugaacucacuaacucuaccuucagaagucaaccuuuguaacauagacauauuuaacccaaaauacgauuguaaaauaaugaccagcaaaacagacgucucaucaagcguaauaacaucacuuggcgcaauagucuccugcuacggaaaaacaaaaugcacagcauccaacaaaaacagaggcaucauaaaaaccuucuccaacggcugcgacuauguaagcaacaaaggugucgauacaguaucaguaggaaacacacuauacugcguaaacaaacaagaaggacaaucacucuacguaaaaggugaaccaaucauaaacuucuacgacccauuaguuuucccaucagacgaauuugaugccuccauaucacaaguaaaugaaaaaauaaaucaaucccuagcauucauacgaaaaucugaugaauuacuucacaaugucaacgucggaaaaucaaccacuaacauaaugauaacaacaauuauaauaguaauaauaguaauacuccuacuauuaauagccgucggucuuuuccuauacugcaaagcacgauaaggacuaguacuggcugcaucucccuuuccucuguccuccauccuucucccaggauggugaagggggaccugguacccagugauccccaccccaggauccuaaaucaugacuuaccugcuaauaaaaacucauuggaaaagugagaagaucuaaaaaaaaaaaaaaaaaaaaaaaaaaaaaaaaaaaaaaaaaaaaaaaaaaaaaaaaaaaaaaaaugcaucccccccccccccccccccccccccccccccaaaggcucuuuucagagccaccagaauu

SEQ ID NO: 16025 - RNA, 1901 nt, Artificial Sequence
  mRNA product Design f-3 comprising derived and/or modified sequence from HRSV(Memphis-37)__AIY60640.1__F-del_DSCav1_mut3 (opt11)
gggagagucccgcagucggcguccagcggcucugcuuguucgugugugugucguugcaggccuuauucaagcuuaccauggaacuacccauccucaaaaccaacgccaucaccacaauccuagcugccgucacccuaugcuucgcaagcagccaaaacaucacagaagaauuuuaccaaucaaccugcuccgccgucuccaaaggguaccuaggugcccuccgcaccggcugguacacgucugucauaaccaucgaacucuccaacaucaaagaaaucaaauguaacggaacagacgcaaaagucaaacuaaucaaacaagaacuagacaaauacaaaaacgccguaaccgaccuccaacugcucaugcaauccacccccgcugccggcuccgggagcgcaaucugcucuggaaucgccguaugcaaaguccuccaccucgaaggagaaguaaacaaaaucaaaaacgcgcuccucaguaccaacaaagccgucgucucucuaucaaacggcguaucgguccucaccuucaaaguccucgaccuaaagaacuacauagacaaacaacuccuccccauccuaaacaaacaauccugcucaaucccaaacaucgaaaccgugaucgaguuccaacagaaaaacaaccgccuacucgaaaucacccgagaguucucagucaacgcaggagucaccacccccgucucaacauacaugcuuaccaacagcgaacuccuaucccucaucaacgacaugccaaucacaaacgaccaaaagaaacucaugagcaacaacguccagaucguaagacaacaaagcuacagcaucaugugcaucaucaaagaagaaguacuagcauacgucguccaacucccccucuacggcgucaucgacacccccugcuggaaacuccacaccucaccccucugcacaaccaacaccaaagaaggcuccaauaucugccucacacgcaccgaccgcggcugguacugcgacaacgccggcuccgucuccuucuucccucaagccgaaaccugcaaaguccaguccaacagagucuucugcgacaccaugaacucccuaacacuuccaucagaagucaaccuuuguaacaucgacaucuucaaucccaaauacgacuguaaaauaaugaccucaaaaacugacgugucaagcucaguuaucaccucccuaggggccaucgucuccugcuacggcaaaacaaaaugcaccgcauccaacaaaaaucgcggaaucaucaaaacauucuccaacggaugcgacuacgucucaaacaagggaguagauaccguaagcguuggcaacacccucuacugcguaaacaaacaagaaggccaaucacucuacgucaaaggcgaacccauaaucaacuucuacgacccccucgucuucccuuccgaugaguucgacgccagcaucucccaagucaacgagaaaauaaaccagucacucgcauucauccgcaaaagcgacgaacuccuccacaacguaaacguaggcaaauccacaaccaauaucaugauaaccacaaucaucaucgugaucaucgucauccuccuccuccucauagcugucggacucuuccucuacuguaaagcacgcugaggacuaguacuggcugcaucucccuuuccucuguccuccauccuucucccaggauggugaagggggaccugguacccagugauccccaccccaggauccuaaaucaugacuuaccugcuaauaaaaacucauuggaaaagugagaagaucuaaaaaaaaaaaaaaaaaaaaaaaaaaaaaaaaaaaaaaaaaaaaaaaaaaaaaaaaaaaaaaaaugcaucccccccccccccccccccccccccccccccaaaggcucuuuucagagccaccagaauu

SEQ ID NO: 16026 - RNA, 2117 nt, Artificial Sequence
  mRNA product Design f-4 comprising derived and/or modified sequence from HRSV(Memphis-37)__AIY60640.1__F-del_DSCav1_mut3 (opt1)
gggagagucccgcagucggcguccagcggcucugcuuguucgugugugugucguugcaggccuuauucaagcuuaccauggagcugcccauccucaagaccaacgccaucaccacgauccuggccgcggugacccugugcuucgccagcucccagaacaucaccgaggaguucuaccagagcacgugcuccgccgucagcaagggcuaccucggcgcccugcgcaccgggugguacaccagcgugaucaccaucgagcuguccaacaucaaggagaucaagugcaacggcaccgacgccaaggugaagcucaucaagcaggagcuggacaaguacaagaacgcggucacggaccugcagcuccugaugcagagcaccccggccgccggcuccgggagcgcgaucugcuccggcaucgccgucugcaaggugcugcaccucgagggcgaggugaacaagaucaagaacgcccugcuguccaccaacaaggccgucgugagccucuccaacggggugagcguccugaccuucaaggugcuggaccucaagaacuacaucgacaagcagcugcugcccauccugaacaagcagagcugcuccauccccaacaucgagaccgucaucgaguuccagcagaagaacaaccgccuccuggagaucacgcgggaguucagcgugaacgcgggcgugaccacccccgucuccaccuacaugcugacgaacagcgagcuccugucccugaucaacgacaugccgaucaccaacgaccagaagaagcucaugagcaacaacgugcagaucgugcgccagcaguccuacagcaucaugugcaucaucaaggaggagguccuggccuacguggugcagcugccccucuacggggucaucgacacccccugcuggaagcugcacaccagcccccugugcacgaccaacaccaaggagggcuccaacaucugccucacccggacggaccgcgggugguacugcgacaacgccggcagcguguccuucuucccgcaggccgagaccugcaagguccagagcaaccggguguucugcgacaccaugaacucccugacccugcccagcgaggugaaccucugcaacaucgacaucuucaaccccaaguacgacugcaagaucaugacguccaagaccgacgucagcuccagcgugaucaccucccugggcgccaucgugagcugcuacgggaagaccaagugcacggcgagcaacaagaaccgcggcaucaucaagaccuucuccaacgggugcgacuacgucagcaacaagggcguggacaccguguccgucggcaacacccuguacugcgugaacaagcaggagggccagagccucuacgugaagggggagcccaucaucaacuucuacgacccgcuggucuuccccuccgacgaguucgacgccagcaucucccaggugaacgagaagaucaaccagagccuggccuucauccggaaguccgacgagcuccugcacaacgugaacgucggcaagagcaccacgaacaucaugaucaccaccaucaucaucgugaucaucgugauccugcugcuccugaucgccgucgggcuguuccucuacugcaaggcccgcugaggacuagugaagggaacacccaaauuuaauucagccuuaagcacaauuaauuaagagugaaacguaauuguacaagcaguuggucacccaccauagggcaugaucaacaccgcaaccuuuccuuuuucccccagugauucugaaaaaccccucuucccuucagcuugcuuagauguuccaaauuuaguaagcuuaaggcggccuacagaagaaaaagaaaaaaaaggccacaaaaguucccucucacuuucaguaaauaaaauaaaagcagcaacagaaauaaagaaauaaaugaaauucaaaaugaaauaaauauuguguugugcagcauuaaaaaaucaauaaaaauuaaaaaugagcaagaucuaaaaaaaaaaaaaaaaaaaaaaaaaaaaaaaaaaaaaaaaaaaaaaaaaaaaaaaaaaaaaaaaugcaucccccccccccccccccccccccccccccccaaaggcucuuuucagagccaccagaauu

SEQ ID NO: 16027 - RNA, 2117 nt, Artificial Sequence
  mRNA product Design f-4 comprising derived and/or modified sequence from HRSV(Memphis-37)__AIY60640.1__F-del_DSCav1_mut3 (opt1)
gggagagucccgcagucggcguccagcggcucugcuuguucgugugugugucguugcaggccuuauucaagcuuaccauggagcugcccauccucaagaccaacgccaucaccacgauccuggccgcggugacccugugcuucgccagcucccagaacaucaccgaggaguucuaccagagcacgugcuccgccgucagcaagggcuaccucggggcccugcgcaccggcugguacaccuccgugaucaccaucgagcugagcaacaucaaggagaucaagugcaacgggaccgacgccaaggugaagcucaucaagcaggagcuggacaaguacaagaacgcggucacggaccugcagcuccugaugcaguccaccccggccgccggcagcggguccgccaucugcagcggcaucgcggugugcaaggugcugcaccucgagggcgaggucaacaagaucaagaacgcccugcuguccaccaacaaggccguggugagccucuccaacggggucagcgugcugaccuucaaggugcuggaccucaagaacuacaucgacaagcagcugcugcccauccucaacaagcaguccugcagcauccccaacaucgagacggucaucgaguuccagcagaagaacaaccggcugcuggagaucacccgcgaguucuccgugaacgccggcgugaccacccccgucagcacguacaugcucaccaacuccgagcugcugagccucaucaacgacaugccgaucaccaacgaccagaagaagcugaugagcaacaacgugcagaucgugcggcagcaguccuacagcaucaugugcaucaucaaggaggagguccuggccuacguggugcagcucccccuguacggggucaucgacacccccugcuggaagcugcacacgagcccccucugcaccaccaacaccaaggagggcuccaacaucugccugacgcgcaccgaccgggggugguacugcgacaacgcgggcuccgugagcuucuucccgcaggccgagaccugcaaggugcaguccaaccgcgucuucugcgacaccaugaacagccugacgcuccccuccgaggugaaccugugcaacaucgacaucuucaaccccaaguacgacugcaagaucaugaccagcaagaccgacgucuccagcuccgugaucaccagccugggcgccaucguguccugcuacgggaagacgaagugcaccgccagcaacaagaaccggggcaucaucaagaccuucuccaacgggugcgacuacgucagcaacaagggcguggacaccguguccgucggcaacacgcucuacugcgugaacaagcaggaggggcagagccuguacgugaagggcgagcccaucaucaacuucuacgacccgcuggucuuccccagcgacgaguucgacgccuccaucagccaggugaacgagaagaucaaccagucccucgcguucauccgcaagagcgacgagcugcugcacaacgugaacgucgggaaguccaccaccaacaucaugaucaccaccaucaucaucgugaucaucgugauccuccugcugcucaucgccgucggccuguuccuguacugcaaggcccggugaggacuagugaagggaacacccaaauuuaauucagccuuaagcacaauuaauuaagagugaaacguaauuguacaagcaguuggucacccaccauagggcaugaucaacaccgcaaccuuuccuuuuucccccagugauucugaaaaaccccucuucccuucagcuugcuuagauguuccaaauuuaguaagcuuaaggcggccuacagaagaaaaagaaaaaaaaggccacaaaaguucccucucacuuucaguaaauaaaauaaaagcagcaacagaaauaaagaaauaaaugaaauucaaaaugaaauaaauauuguguugugcagcauuaaaaaaucaauaaaaauuaaaaaugagcaagaucuaaaaaaaaaaaaaaaaaaaaaaaaaaaaaaaaaaaaaaaaaaaaaaaaaaaaaaaaaaaaaaaaugcaucccccccccccccccccccccccccccccccaaaggcucuuuucagagccaccagaauu

SEQ ID NO: 16028 - RNA, 2117 nt, Artificial Sequence
  mRNA product Design f-4 comprising derived and/or modified sequence from HRSV(Memphis-37)__AIY60640.1__F-del_DSCav1_mut3 (opt2)
gggagagucccgcagucggcguccagcggcucugcuuguucgugugugugucguugcaggccuuauucaagcuuaccauggagcuccccauccucaagaccaacgccaucaccaccauccucgccgccgucacccucugcuucgccuccucccagaacaucaccgaggaguucuaccaguccaccugcuccgccgucuccaagggcuaccucggcgcccuccgcaccggcugguacaccuccgucaucaccaucgagcucuccaacaucaaggagaucaagugcaacggcaccgacgccaaggucaagcucaucaagcaggagcucgacaaguacaagaacgccgucaccgaccuccagcuccucaugcaguccacccccgccgccggcuccggcuccgccaucugcuccggcaucgccgucugcaagguccuccaccucgagggcgaggucaacaagaucaagaacgcccuccucuccaccaacaaggccgucgucucccucuccaacggcgucuccguccucaccuucaagguccucgaccucaagaacuacaucgacaagcagcuccuccccauccucaacaagcaguccugcuccauccccaacaucgagaccgucaucgaguuccagcagaagaacaaccgccuccucgagaucacccgcgaguucuccgucaacgccggcgucaccacccccgucuccaccuacaugcucaccaacuccgagcuccucucccucaucaacgacaugcccaucaccaacgaccagaagaagcucauguccaacaacguccagaucguccgccagcaguccuacuccaucaugugcaucaucaaggaggagguccucgccuacgucguccagcucccccucuacggcgucaucgacacccccugcuggaagcuccacaccuccccccucugcaccaccaacaccaaggagggcuccaacaucugccucacccgcaccgaccgcggcugguacugcgacaacgccggcuccgucuccuucuucccccaggccgagaccugcaagguccaguccaaccgcgucuucugcgacaccaugaacucccucacccuccccuccgaggucaaccucugcaacaucgacaucuucaaccccaaguacgacugcaagaucaugaccuccaagaccgacgucuccuccuccgucaucaccucccucggcgccaucgucuccugcuacggcaagaccaagugcaccgccuccaacaagaaccgcggcaucaucaagaccuucuccaacggcugcgacuacgucuccaacaagggcgucgacaccgucuccgucggcaacacccucuacugcgucaacaagcaggagggccagucccucuacgucaagggcgagcccaucaucaacuucuacgacccccucgucuuccccuccgacgaguucgacgccuccaucucccaggucaacgagaagaucaaccagucccucgccuucauccgcaaguccgacgagcuccuccacaacgucaacgucggcaaguccaccaccaacaucaugaucaccaccaucaucaucgucaucaucgucauccuccuccuccucaucgccgucggccucuuccucuacugcaaggcccgcugaggacuagugaagggaacacccaaauuuaauucagccuuaagcacaauuaauuaagagugaaacguaauuguacaagcaguuggucacccaccauagggcaugaucaacaccgcaaccuuuccuuuuucccccagugauucugaaaaaccccucuucccuucagcuugcuuagauguuccaaauuuaguaagcuuaaggcggccuacagaagaaaaagaaaaaaaaggccacaaaaguucccucucacuuucaguaaauaaaauaaaagcagcaacagaaauaaagaaauaaaugaaauucaaaaugaaauaaauauuguguugugcagcauuaaaaaaucaauaaaaauuaaaaaugagcaagaucuaaaaaaaaaaaaaaaaaaaaaaaaaaaaaaaaaaaaaaaaaaaaaaaaaaaaaaaaaaaaaaaaugcaucccccccccccccccccccccccccccccccaaaggcucuuuucagagccaccagaauu

SEQ ID NO: 16029 - RNA, 2117 nt, Artificial Sequence
  mRNA product Design f-4 comprising derived and/or modified sequence from HRSV(Memphis-37)__AIY60640.1__F-del_DSCav1_mut3 (opt3)
gggagagucccgcagucggcguccagcggcucugcuuguucgugugugugucguugcaggccuuauucaagcuuaccauggagcugcccauccucaagaccaacgccauuacaacuauacuugcugcagugacgcugugcuucgccagcucccagaauaucaccgaagaguuuuaccaaucuacauguucagcggucaguaaaggcuauuugggggcuuuaagaacuggaugguacaccagcguuauuacaaucgaacuguccaacauuaaggagaucaaaugcaaugguaccgacgccaaggugaaacuaauaaagcaggaacucgauaaguauaaaaacgcaguaacugaccugcagcuucugaugcagucuacuccugccgcuggcucggggucagcaaucuguagcggaauugccgugugcaaggucuugcaccucgagggcgaggugaauaaaaucaagaacgcucugcugaguaccaauaaagccguugugucccucucuaacggugucagcguguuaacguucaagguacuggaucuuaagaauuacauugacaaacaauugcugccaauccuaaacaagcaguccuguucaauaccgaauauugaaacuguuaucgaguuucagcagaaaaacaauaggcuccuggaaauuacccgggaguucagugugaacgcgggggucacaacucccgugagcaccuauaugcuuacaaauucugagcuguugucccucaucaacgauaugccuaucaccaacgaccaaaagaaacugaugucaaauaacgugcagauuguccgccagcagagcuacaguauaaugugcaucauuaaggaagagguuuuagcauaugugguacaacugccacucuacggagugaucgauacgcccuguuggaaacuucauacuucuccucugugcacaaccaauacuaaggaaggcuccaacauauguuugacacgaaccgaccguggcugguacugcgauaaugccgggagcgucucguuuuucccacaggcugagacguguaaggugcagucuaacagaguuuucugcgacaccaugaacucccuaacacugcccucagaagugaaucucugcaauauugauaucuucaacccuaaauaugacuguaagaucaugacaaguaaaaccgaugucagcuccucugugauuacaagccugggagccaucguaucaugcuacgguaagacuaaauguaccgcaaguaauaagaacaggggcauuauaaagacauuuuccaaugggugcgacuauguuagcaacaaaggaguggacaccgucucugugggcaauacucuuuacugugucaacaagcaagagggucagucacuguaugugaaaggggagccaaucauuaacuucuacgauccguugguuuuucccagugacgaauuugaugcuagcaucucccaggugaaugagaagaucaaccagucucucgccuuuauucggaaaucggacgaacuguuacacaauguaaacgucggaaagagcacgacaaauauaaugaucaccacuauuaucauugugaucauaguuauccugcuacuccugauugcggugggccuuuucuuguauugcaaggcccgcugaggacuagugaagggaacacccaaauuuaauucagccuuaagcacaauuaauuaagagugaaacguaauuguacaagcaguuggucacccaccauagggcaugaucaacaccgcaaccuuuccuuuuucccccagugauucugaaaaaccccucuucccuucagcuugcuuagauguuccaaauuuaguaagcuuaaggcggccuacagaagaaaaagaaaaaaaaggccacaaaaguucccucucacuuucaguaaauaaaauaaaagcagcaacagaaauaaagaaauaaaugaaauucaaaaugaaauaaauauuguguugugcagcauuaaaaaaucaauaaaaauuaaaaaugagcaagaucuaaaaaaaaaaaaaaaaaaaaaaaaaaaaaaaaaaaaaaaaaaaaaaaaaaaaaaaaaaaaaaaaugcaucccccccccccccccccccccccccccccccaaaggcucuuuucagagccaccagaauu

SEQ ID NO: 16030 - RNA, 2117 nt, Artificial Sequence
  mRNA product Design f-4 comprising derived and/or modified sequence from HRSV(Memphis-37)__AIY60640.1__F-del_DSCav1_mut3 (opt4)
gggagagucccgcagucggcguccagcggcucugcuuguucgugugugugucguugcaggccuuauucaagcuuaccauggagcugcccauccugaagaccaacgccaucaccaccauccuggccgccgugacccugugcuucgccagcagccagaacaucaccgaggaguucuaccagagcaccugcagcgccgugagcaagggcuaccugggcgcccugagaaccggcugguacaccagcgugaucaccaucgagcugagcaacaucaaggagaucaagugcaacggcaccgacgccaaggugaagcugaucaagcaggagcuggacaaguacaagaacgccgugaccgaccugcagcugcugaugcagagcacccccgccgccggcagcggcagcgccaucugcagcggcaucgccgugugcaaggugcugcaccuggagggcgaggugaacaagaucaagaacgcccugcugagcaccaacaaggccguggugagccugagcaacggcgugagcgugcugaccuucaaggugcuggaccugaagaacuacaucgacaagcagcugcugcccauccugaacaagcagagcugcagcauccccaacaucgagaccgugaucgaguuccagcagaagaacaacagacugcuggagaucaccagagaguucagcgugaacgccggcgugaccacccccgugagcaccuacaugcugaccaacagcgagcugcugagccugaucaacgacaugcccaucaccaacgaccagaagaagcugaugagcaacaacgugcagaucgugagacagcagagcuacagcaucaugugcaucaucaaggaggaggugcuggccuacguggugcagcugccccuguacggcgugaucgacacccccugcuggaagcugcacaccagcccccugugcaccaccaacaccaaggagggcagcaacaucugccugaccagaaccgacagaggcugguacugcgacaacgccggcagcgugagcuucuucccccaggccgagaccugcaaggugcagagcaacagaguguucugcgacaccaugaacagccugacccugcccagcgaggugaaccugugcaacaucgacaucuucaaccccaaguacgacugcaagaucaugaccagcaagaccgacgugagcagcagcgugaucaccagccugggcgccaucgugagcugcuacggcaagaccaagugcaccgccagcaacaagaacagaggcaucaucaagaccuucagcaacggcugcgacuacgugagcaacaagggcguggacaccgugagcgugggcaacacccuguacugcgugaacaagcaggagggccagagccuguacgugaagggcgagcccaucaucaacuucuacgacccccugguguuccccagcgacgaguucgacgccagcaucagccaggugaacgagaagaucaaccagagccuggccuucaucagaaagagcgacgagcugcugcacaacgugaacgugggcaagagcaccaccaacaucaugaucaccaccaucaucaucgugaucaucgugauccugcugcugcugaucgccgugggccuguuccuguacugcaaggccagaugaggacuagugaagggaacacccaaauuuaauucagccuuaagcacaauuaauuaagagugaaacguaauuguacaagcaguuggucacccaccauagggcaugaucaacaccgcaaccuuuccuuuuucccccagugauucugaaaaaccccucuucccuucagcuugcuuagauguuccaaauuuaguaagcuuaaggcggccuacagaagaaaaagaaaaaaaaggccacaaaaguucccucucacuuucaguaaauaaaauaaaagcagcaacagaaauaaagaaauaaaugaaauucaaaaugaaauaaauauuguguugugcagcauuaaaaaaucaauaaaaauuaaaaaugagcaagaucuaaaaaaaaaaaaaaaaaaaaaaaaaaaaaaaaaaaaaaaaaaaaaaaaaaaaaaaaaaaaaaaaugcaucccccccccccccccccccccccccccccccaaaggcucuuuucagagccaccagaauu

SEQ ID NO: 16031 - RNA, 2117 nt, Artificial Sequence
  mRNA product Design f-4 comprising derived and/or modified sequence from HRSV(Memphis-37)__AIY60640.1__F-del_DSCav1_mut3 (opt5)
gggagagucccgcagucggcguccagcggcucugcuuguucgugugugugucguugcaggccuuauucaagcuuaccauggagcugcccauccucaagaccaacgccauuacaacgauccuggcugccgugacccuuugcuucgcgagcucccagaauauuacagaagaguuuuaccaaucuaccuguagcgcugucuccaaaggcuaucugggggcccucagaacaggaugguacaccucuguuaucacaauugaacugagcaacaucaaggagaucaaaugcaauggcaccgacgccaaggugaaacuuauuaagcaggaacuggauaaguauaaaaacgcugugacggaccuccagcugcugaugcaguccaccccugccgcugggucuggaagcgccaucuguuccggcauugcggucugcaaggugcuccaccuggagggggagguuaauaaaaucaagaacgcccuucugagcacaaauaaagcuguggucucucucuccaacggagugagcguucugaccuucaaggugcuugaucugaagaauuacauugacaaacaacuccugccgauccugaacaagcagucuuguuccauucccaauaucgaaacagucaucgaguuucagcagaaaaacaaucggcuccuggaaauuacccgcgaguucagcgugaacgccggcgugacgacaccugucucuaccuauaugcuuacaaauuccgagcugcucagccugaucaacgauaugcccauuaccaacgaccaaaagaaacuuauguccaauaacguucagaucgugagacagcagucuuacagcauuaugugcaucaucaaggaagaggugcuggcuuaugucgugcaacucccucuguacggcguuauugauacccccuguuggaaacugcauacauccccucucugcacgaccaauacaaaggaagggagcaacaucugucugacccggacagaccgcggaugguacugcgauaaugccggcucuguguccuuuuucccgcaggcggagaccuguaagguccagagcaacagaguguuuugcgacacgaugaacucucuuacacugcccagcgaaguuaaucucugcaauauugauaucuucaacccuaaauaugacuguaagauuaugaccuccaaaaccgaugugucuagcuccgucaucacaagccugggggccaucgugucuugcuacggaaagaccaaauguacagcuuccaauaagaaccggggcauuaucaagacguuuagcaaugggugcgacuaugucucuaacaaaggaguggacaccguuuccgugggcaauacacuuuacugugucaacaagcaagagggccagagccuguaugugaaaggggagcccauuaucaacuucuacgauccucucguuuuucccuccgacgaguucgaugccucuauuagccaggugaaugaaaagaucaaccagucccuggcuuuuauucgcaaaucugacgaacugcuccacaaugucaacgugggaaagagcaccacaaauaucaugaucaccacgauuaucauugugaucauuguuauccugcuucugcucaucgccgucggccuguuccuguauugcaaggccagaugaggacuagugaagggaacacccaaauuuaauucagccuuaagcacaauuaauuaagagugaaacguaauuguacaagcaguuggucacccaccauagggcaugaucaacaccgcaaccuuuccuuuuucccccagugauucugaaaaaccccucuucccuucagcuugcuuagauguuccaaauuuaguaagcuuaaggcggccuacagaagaaaaagaaaaaaaaggccacaaaaguucccucucacuuucaguaaauaaaauaaaagcagcaacagaaauaaagaaauaaaugaaauucaaaaugaaauaaauauuguguugugcagcauuaaaaaaucaauaaaaauuaaaaaugagcaagaucuaaaaaaaaaaaaaaaaaaaaaaaaaaaaaaaaaaaaaaaaaaaaaaaaaaaaaaaaaaaaaaaaugcaucccccccccccccccccccccccccccccccaaaggcucuuuucagagccaccagaauu

SEQ ID NO: 16032 - RNA, 2117 nt, Artificial Sequence
  mRNA product Design f-4 comprising derived and/or modified sequence from HRSV(Memphis-37)__AIY60640.1__F-del_DSCav1_mut3 (opt6)
gggagagucccgcagucggcguccagcggcucugcuuguucgugugugugucguugcaggccuuauucaagcuuaccauggaacuacccauccuaaaaacaaaugccauaaccacaauacucgccgcuguaacacuauguuucgcuaguucacaaaacauuacagaagaauuuuaccaauccacaugcucagcaguaucaaaaggauaccuaggugcacuaagaacaggaugguacacaagcguaauuacaauagaauuauccaauauuaaagaaauaaaauguaacggcacugacgcuaaaguaaaauuaaucaaacaagaacuagacaaauacaaaaacgcaguaacagaccuacaauuacucaugcaauccacacccgcagcaggaucaggcucagccauaugcucagguauagcaguaugcaaaguacuccaccuugaaggagaaguaaacaaaauaaaaaacgcauuacuaucaacaaacaaagcaguaguaucacuaucaaacggagucucugucuuaaccuuuaaaguauuagauuuaaaaaacuacauagacaaacaacuauuaccaauucuaaauaaacaaucauguucuauaccaaauauagaaacaguaauagaauuucaacaaaaaaacaaccgauuacuagaaaucacaagagaauuuucugucaacgccggcguaaccaccccagucucaacauauaugcuaacaaauagugaacucuuauccuuaauaaacgacaugccaauaacaaaugaccaaaaaaaauuaauguccaauaacguacaaauagucagacaacagucauacucaauaauguguaucaucaaagaagaaguauuagcauacguaguucaacuaccccuauacggcguaauagacacaccauguuggaaacuacacacaucacccuuaugcacaaccaauaccaaagaaggaucuaacauaugccuaaccagaacagacagaggcugguacugcgacaacgcagguucagucucauucuucccacaagccgaaacaugcaaaguccaauccaacagaguauuuugcgacacuaugaacucacuaacucuaccuucagaagucaaccuuuguaacauagacauauuuaacccaaaauacgauuguaaaauaaugaccagcaaaacagacgucucaucaagcguaauaacaucacuuggcgcaauagucuccugcuacggaaaaacaaaaugcacagcauccaacaaaaacagaggcaucauaaaaaccuucuccaacggcugcgacuauguaagcaacaaaggugucgauacaguaucaguaggaaacacacuauacugcguaaacaaacaagaaggacaaucacucuacguaaaaggugaaccaaucauaaacuucuacgacccauuaguuuucccaucagacgaauuugaugccuccauaucacaaguaaaugaaaaaauaaaucaaucccuagcauucauacgaaaaucugaugaauuacuucacaaugucaacgucggaaaaucaaccacuaacauaaugauaacaacaauuauaauaguaauaauaguaauacuccuacuauuaauagccgucggucuuuuccuauacugcaaagcacgauaaggacuagugaagggaacacccaaauuuaauucagccuuaagcacaauuaauuaagagugaaacguaauuguacaagcaguuggucacccaccauagggcaugaucaacaccgcaaccuuuccuuuuucccccagugauucugaaaaaccccucuucccuucagcuugcuuagauguuccaaauuuaguaagcuuaaggcggccuacagaagaaaaagaaaaaaaaggccacaaaaguucccucucacuuucaguaaauaaaauaaaagcagcaacagaaauaaagaaauaaaugaaauucaaaaugaaauaaauauuguguugugcagcauuaaaaaaucaauaaaaauuaaaaaugagcaagaucuaaaaaaaaaaaaaaaaaaaaaaaaaaaaaaaaaaaaaaaaaaaaaaaaaaaaaaaaaaaaaaaaugcaucccccccccccccccccccccccccccccccaaaggcucuuuucagagccaccagaauu

SEQ ID NO: 16033 - RNA, 2117 nt, Artificial Sequence
  mRNA product Design f-4 comprising derived and/or modified sequence from HRSV(Memphis-37)__AIY60640.1__F-del_DSCav1_mut3 (opt11)
gggagagucccgcagucggcguccagcggcucugcuuguucgugugugugucguugcaggccuuauucaagcuuaccauggaacuacccauccucaaaaccaacgccaucaccacaauccuagcugccgucacccuaugcuucgcaagcagccaaaacaucacagaagaauuuuaccaaucaaccugcuccgccgucuccaaaggguaccuaggugcccuccgcaccggcugguacacgucugucauaaccaucgaacucuccaacaucaaagaaaucaaauguaacggaacagacgcaaaagucaaacuaaucaaacaagaacuagacaaauacaaaaacgccguaaccgaccuccaacugcucaugcaauccacccccgcugccggcuccgggagcgcaaucugcucuggaaucgccguaugcaaaguccuccaccucgaaggagaaguaaacaaaaucaaaaacgcgcuccucaguaccaacaaagccgucgucucucuaucaaacggcguaucgguccucaccuucaaaguccucgaccuaaagaacuacauagacaaacaacuccuccccauccuaaacaaacaauccugcucaaucccaaacaucgaaaccgugaucgaguuccaacagaaaaacaaccgccuacucgaaaucacccgagaguucucagucaacgcaggagucaccacccccgucucaacauacaugcuuaccaacagcgaacuccuaucccucaucaacgacaugccaaucacaaacgaccaaaagaaacucaugagcaacaacguccagaucguaagacaacaaagcuacagcaucaugugcaucaucaaagaagaaguacuagcauacgucguccaacucccccucuacggcgucaucgacacccccugcuggaaacuccacaccucaccccucugcacaaccaacaccaaagaaggcuccaauaucugccucacacgcaccgaccgcggcugguacugcgacaacgccggcuccgucuccuucuucccucaagccgaaaccugcaaaguccaguccaacagagucuucugcgacaccaugaacucccuaacacuuccaucagaagucaaccuuuguaacaucgacaucuucaaucccaaauacgacuguaaaauaaugaccucaaaaacugacgugucaagcucaguuaucaccucccuaggggccaucgucuccugcuacggcaaaacaaaaugcaccgcauccaacaaaaaucgcggaaucaucaaaacauucuccaacggaugcgacuacgucucaaacaagggaguagauaccguaagcguuggcaacacccucuacugcguaaacaaacaagaaggccaaucacucuacgucaaaggcgaacccauaaucaacuucuacgacccccucgucuucccuuccgaugaguucgacgccagcaucucccaagucaacgagaaaauaaaccagucacucgcauucauccgcaaaagcgacgaacuccuccacaacguaaacguaggcaaauccacaaccaauaucaugauaaccacaaucaucaucgugaucaucgucauccuccuccuccucauagcugucggacucuuccucuacuguaaagcacgcugaggacuagugaagggaacacccaaauuuaauucagccuuaagcacaauuaauuaagagugaaacguaauuguacaagcaguuggucacccaccauagggcaugaucaacaccgcaaccuuuccuuuuucccccagugauucugaaaaaccccucuucccuucagcuugcuuagauguuccaaauuuaguaagcuuaaggcggccuacagaagaaaaagaaaaaaaaggccacaaaaguucccucucacuuucaguaaauaaaauaaaagcagcaacagaaauaaagaaauaaaugaaauucaaaaugaaauaaauauuguguugugcagcauuaaaaaaucaauaaaaauuaaaaaugagcaagaucuaaaaaaaaaaaaaaaaaaaaaaaaaaaaaaaaaaaaaaaaaaaaaaaaaaaaaaaaaaaaaaaaugcaucccccccccccccccccccccccccccccccaaaggcucuuuucagagccaccagaauu

SEQ ID NO: 16034 - RNA, 1893 nt, Artificial Sequence
  mRNA product Design f-5 comprising derived and/or modified sequence from HRSV(Memphis-37)__AIY60640.1__F-del_DSCav1_mut3 (opt1)
gggagacuuucccauucuguagcagaauuugguguugccuguggucuuggucccgcggagaagcuuaccauggagcugcccauccucaagaccaacgccaucaccacgauccuggccgcggugacccugugcuucgccagcucccagaacaucaccgaggaguucuaccagagcacgugcuccgccgucagcaagggcuaccucggcgcccugcgcaccgggugguacaccagcgugaucaccaucgagcuguccaacaucaaggagaucaagugcaacggcaccgacgccaaggugaagcucaucaagcaggagcuggacaaguacaagaacgcggucacggaccugcagcuccugaugcagagcaccccggccgccggcuccgggagcgcgaucugcuccggcaucgccgucugcaaggugcugcaccucgagggcgaggugaacaagaucaagaacgcccugcuguccaccaacaaggccgucgugagccucuccaacggggugagcguccugaccuucaaggugcuggaccucaagaacuacaucgacaagcagcugcugcccauccugaacaagcagagcugcuccauccccaacaucgagaccgucaucgaguuccagcagaagaacaaccgccuccuggagaucacgcgggaguucagcgugaacgcgggcgugaccacccccgucuccaccuacaugcugacgaacagcgagcuccugucccugaucaacgacaugccgaucaccaacgaccagaagaagcucaugagcaacaacgugcagaucgugcgccagcaguccuacagcaucaugugcaucaucaaggaggagguccuggccuacguggugcagcugccccucuacggggucaucgacacccccugcuggaagcugcacaccagcccccugugcacgaccaacaccaaggagggcuccaacaucugccucacccggacggaccgcgggugguacugcgacaacgccggcagcguguccuucuucccgcaggccgagaccugcaagguccagagcaaccggguguucugcgacaccaugaacucccugacccugcccagcgaggugaaccucugcaacaucgacaucuucaaccccaaguacgacugcaagaucaugacguccaagaccgacgucagcuccagcgugaucaccucccugggcgccaucgugagcugcuacgggaagaccaagugcacggcgagcaacaagaaccgcggcaucaucaagaccuucuccaacgggugcgacuacgucagcaacaagggcguggacaccguguccgucggcaacacccuguacugcgugaacaagcaggagggccagagccucuacgugaagggggagcccaucaucaacuucuacgacccgcuggucuuccccuccgacgaguucgacgccagcaucucccaggugaacgagaagaucaaccagagccuggccuucauccggaaguccgacgagcuccugcacaacgugaacgucggcaagagcaccacgaacaucaugaucaccaccaucaucaucgugaucaucgugauccugcugcuccugaucgccgucgggcuguuccucuacugcaaggcccgcugaggacuaguacuggcugcaucucccuuuccucuguccuccauccuucucccaggauggugaagggggaccugguacccagugauccccaccccaggauccuaaaucaugacuuaccugcuaauaaaaacucauuggaaaagugagaagaucuaaaaaaaaaaaaaaaaaaaaaaaaaaaaaaaaaaaaaaaaaaaaaaaaaaaaaaaaaaaaaaaaugcaucccccccccccccccccccccccccccccccaaaggcucuuuucagagccaccagaauu

SEQ ID NO: 16035 - RNA, 1893 nt, Artificial Sequence
  mRNA product Design f-5 comprising derived and/or modified sequence from HRSV(Memphis-37)__AIY60640.1__F-del_DSCav1_mut3 (opt1)
gggagacuuucccauucuguagcagaauuugguguugccuguggucuuggucccgcggagaagcuuaccauggagcugcccauccucaagaccaacgccaucaccacgauccuggccgcggugacccugugcuucgccagcucccagaacaucaccgaggaguucuaccagagcacgugcuccgccgucagcaagggcuaccucggggcccugcgcaccggcugguacaccuccgugaucaccaucgagcugagcaacaucaaggagaucaagugcaacgggaccgacgccaaggugaagcucaucaagcaggagcuggacaaguacaagaacgcggucacggaccugcagcuccugaugcaguccaccccggccgccggcagcggguccgccaucugcagcggcaucgcggugugcaaggugcugcaccucgagggcgaggucaacaagaucaagaacgcccugcuguccaccaacaaggccguggugagccucuccaacggggucagcgugcugaccuucaaggugcuggaccucaagaacuacaucgacaagcagcugcugcccauccucaacaagcaguccugcagcauccccaacaucgagacggucaucgaguuccagcagaagaacaaccggcugcuggagaucacccgcgaguucuccgugaacgccggcgugaccacccccgucagcacguacaugcucaccaacuccgagcugcugagccucaucaacgacaugccgaucaccaacgaccagaagaagcugaugagcaacaacgugcagaucgugcggcagcaguccuacagcaucaugugcaucaucaaggaggagguccuggccuacguggugcagcucccccuguacggggucaucgacacccccugcuggaagcugcacacgagcccccucugcaccaccaacaccaaggagggcuccaacaucugccugacgcgcaccgaccgggggugguacugcgacaacgcgggcuccgugagcuucuucccgcaggccgagaccugcaaggugcaguccaaccgcgucuucugcgacaccaugaacagccugacgcuccccuccgaggugaaccugugcaacaucgacaucuucaaccccaaguacgacugcaagaucaugaccagcaagaccgacgucuccagcuccgugaucaccagccugggcgccaucguguccugcuacgggaagacgaagugcaccgccagcaacaagaaccggggcaucaucaagaccuucuccaacgggugcgacuacgucagcaacaagggcguggacaccguguccgucggcaacacgcucuacugcgugaacaagcaggaggggcagagccuguacgugaagggcgagcccaucaucaacuucuacgacccgcuggucuuccccagcgacgaguucgacgccuccaucagccaggugaacgagaagaucaaccagucccucgcguucauccgcaagagcgacgagcugcugcacaacgugaacgucgggaaguccaccaccaacaucaugaucaccaccaucaucaucgugaucaucgugauccuccugcugcucaucgccgucggccuguuccuguacugcaaggcccggugaggacuaguacuggcugcaucucccuuuccucuguccuccauccuucucccaggauggugaagggggaccugguacccagugauccccaccccaggauccuaaaucaugacuuaccugcuaauaaaaacucauuggaaaagugagaagaucuaaaaaaaaaaaaaaaaaaaaaaaaaaaaaaaaaaaaaaaaaaaaaaaaaaaaaaaaaaaaaaaaugcaucccccccccccccccccccccccccccccccaaaggcucuuuucagagccaccagaauu

SEQ ID NO: 16036 - RNA, 1893 nt, Artificial Sequence
  mRNA product Design f-5 comprising derived and/or modified sequence from HRSV(Memphis-37)__AIY60640.1__F-del_DSCav1_mut3 (opt2)
gggagacuuucccauucuguagcagaauuugguguugccuguggucuuggucccgcggagaagcuuaccauggagcuccccauccucaagaccaacgccaucaccaccauccucgccgccgucacccucugcuucgccuccucccagaacaucaccgaggaguucuaccaguccaccugcuccgccgucuccaagggcuaccucggcgcccuccgcaccggcugguacaccuccgucaucaccaucgagcucuccaacaucaaggagaucaagugcaacggcaccgacgccaaggucaagcucaucaagcaggagcucgacaaguacaagaacgccgucaccgaccuccagcuccucaugcaguccacccccgccgccggcuccggcuccgccaucugcuccggcaucgccgucugcaagguccuccaccucgagggcgaggucaacaagaucaagaacgcccuccucuccaccaacaaggccgucgucucccucuccaacggcgucuccguccucaccuucaagguccucgaccucaagaacuacaucgacaagcagcuccuccccauccucaacaagcaguccugcuccauccccaacaucgagaccgucaucgaguuccagcagaagaacaaccgccuccucgagaucacccgcgaguucuccgucaacgccggcgucaccacccccgucuccaccuacaugcucaccaacuccgagcuccucucccucaucaacgacaugcccaucaccaacgaccagaagaagcucauguccaacaacguccagaucguccgccagcaguccuacuccaucaugugcaucaucaaggaggagguccucgccuacgucguccagcucccccucuacggcgucaucgacacccccugcuggaagcuccacaccuccccccucugcaccaccaacaccaaggagggcuccaacaucugccucacccgcaccgaccgcggcugguacugcgacaacgccggcuccgucuccuucuucccccaggccgagaccugcaagguccaguccaaccgcgucuucugcgacaccaugaacucccucacccuccccuccgaggucaaccucugcaacaucgacaucuucaaccccaaguacgacugcaagaucaugaccuccaagaccgacgucuccuccuccgucaucaccucccucggcgccaucgucuccugcuacggcaagaccaagugcaccgccuccaacaagaaccgcggcaucaucaagaccuucuccaacggcugcgacuacgucuccaacaagggcgucgacaccgucuccgucggcaacacccucuacugcgucaacaagcaggagggccagucccucuacgucaagggcgagcccaucaucaacuucuacgacccccucgucuuccccuccgacgaguucgacgccuccaucucccaggucaacgagaagaucaaccagucccucgccuucauccgcaaguccgacgagcuccuccacaacgucaacgucggcaaguccaccaccaacaucaugaucaccaccaucaucaucgucaucaucgucauccuccuccuccucaucgccgucggccucuuccucuacugcaaggcccgcugaggacuaguacuggcugcaucucccuuuccucuguccuccauccuucucccaggauggugaagggggaccugguacccagugauccccaccccaggauccuaaaucaugacuuaccugcuaauaaaaacucauuggaaaagugagaagaucuaaaaaaaaaaaaaaaaaaaaaaaaaaaaaaaaaaaaaaaaaaaaaaaaaaaaaaaaaaaaaaaaugcaucccccccccccccccccccccccccccccccaaaggcucuuuucagagccaccagaauu

SEQ ID NO: 16037 - RNA, 1893 nt, Artificial Sequence
  mRNA product Design f-5 comprising derived and/or modified sequence from HRSV(Memphis-37)__AIY60640.1__F-del_DSCav1_mut3 (opt3)
gggagacuuucccauucuguagcagaauuugguguugccuguggucuuggucccgcggagaagcuuaccauggagcugcccauccucaagaccaacgccauuacaacuauacuugcugcagugacgcugugcuucgccagcucccagaauaucaccgaagaguuuuaccaaucuacauguucagcggucaguaaaggcuauuugggggcuuuaagaacuggaugguacaccagcguuauuacaaucgaacuguccaacauuaaggagaucaaaugcaaugguaccgacgccaaggugaaacuaauaaagcaggaacucgauaaguauaaaaacgcaguaacugaccugcagcuucugaugcagucuacuccugccgcuggcucggggucagcaaucuguagcggaauugccgugugcaaggucuugcaccucgagggcgaggugaauaaaaucaagaacgcucugcugaguaccaauaaagccguugugucccucucuaacggugucagcguguuaacguucaagguacuggaucuuaagaauuacauugacaaacaauugcugccaauccuaaacaagcaguccuguucaauaccgaauauugaaacuguuaucgaguuucagcagaaaaacaauaggcuccuggaaauuacccgggaguucagugugaacgcgggggucacaacucccgugagcaccuauaugcuuacaaauucugagcuguugucccucaucaacgauaugccuaucaccaacgaccaaaagaaacugaugucaaauaacgugcagauuguccgccagcagagcuacaguauaaugugcaucauuaaggaagagguuuuagcauaugugguacaacugccacucuacggagugaucgauacgcccuguuggaaacuucauacuucuccucugugcacaaccaauacuaaggaaggcuccaacauauguuugacacgaaccgaccguggcugguacugcgauaaugccgggagcgucucguuuuucccacaggcugagacguguaaggugcagucuaacagaguuuucugcgacaccaugaacucccuaacacugcccucagaagugaaucucugcaauauugauaucuucaacccuaaauaugacuguaagaucaugacaaguaaaaccgaugucagcuccucugugauuacaagccugggagccaucguaucaugcuacgguaagacuaaauguaccgcaaguaauaagaacaggggcauuauaaagacauuuuccaaugggugcgacuauguuagcaacaaaggaguggacaccgucucugugggcaauacucuuuacugugucaacaagcaagagggucagucacuguaugugaaaggggagccaaucauuaacuucuacgauccguugguuuuucccagugacgaauuugaugcuagcaucucccaggugaaugagaagaucaaccagucucucgccuuuauucggaaaucggacgaacuguuacacaauguaaacgucggaaagagcacgacaaauauaaugaucaccacuauuaucauugugaucauaguuauccugcuacuccugauugcggugggccuuuucuuguauugcaaggcccgcugaggacuaguacuggcugcaucucccuuuccucuguccuccauccuucucccaggauggugaagggggaccugguacccagugauccccaccccaggauccuaaaucaugacuuaccugcuaauaaaaacucauuggaaaagugagaagaucuaaaaaaaaaaaaaaaaaaaaaaaaaaaaaaaaaaaaaaaaaaaaaaaaaaaaaaaaaaaaaaaaugcaucccccccccccccccccccccccccccccccaaaggcucuuuucagagccaccagaauu

SEQ ID NO: 16038 - RNA, 1893 nt, Artificial Sequence
  mRNA product Design f-5 comprising derived and/or modified sequence from HRSV(Memphis-37)__AIY60640.1__F-del_DSCav1_mut3 (opt4)
gggagacuuucccauucuguagcagaauuugguguugccuguggucuuggucccgcggagaagcuuaccauggagcugcccauccugaagaccaacgccaucaccaccauccuggccgccgugacccugugcuucgccagcagccagaacaucaccgaggaguucuaccagagcaccugcagcgccgugagcaagggcuaccugggcgcccugagaaccggcugguacaccagcgugaucaccaucgagcugagcaacaucaaggagaucaagugcaacggcaccgacgccaaggugaagcugaucaagcaggagcuggacaaguacaagaacgccgugaccgaccugcagcugcugaugcagagcacccccgccgccggcagcggcagcgccaucugcagcggcaucgccgugugcaaggugcugcaccuggagggcgaggugaacaagaucaagaacgcccugcugagcaccaacaaggccguggugagccugagcaacggcgugagcgugcugaccuucaaggugcuggaccugaagaacuacaucgacaagcagcugcugcccauccugaacaagcagagcugcagcauccccaacaucgagaccgugaucgaguuccagcagaagaacaacagacugcuggagaucaccagagaguucagcgugaacgccggcgugaccacccccgugagcaccuacaugcugaccaacagcgagcugcugagccugaucaacgacaugcccaucaccaacgaccagaagaagcugaugagcaacaacgugcagaucgugagacagcagagcuacagcaucaugugcaucaucaaggaggaggugcuggccuacguggugcagcugccccuguacggcgugaucgacacccccugcuggaagcugcacaccagcccccugugcaccaccaacaccaaggagggcagcaacaucugccugaccagaaccgacagaggcugguacugcgacaacgccggcagcgugagcuucuucccccaggccgagaccugcaaggugcagagcaacagaguguucugcgacaccaugaacagccugacccugcccagcgaggugaaccugugcaacaucgacaucuucaaccccaaguacgacugcaagaucaugaccagcaagaccgacgugagcagcagcgugaucaccagccugggcgccaucgugagcugcuacggcaagaccaagugcaccgccagcaacaagaacagaggcaucaucaagaccuucagcaacggcugcgacuacgugagcaacaagggcguggacaccgugagcgugggcaacacccuguacugcgugaacaagcaggagggccagagccuguacgugaagggcgagcccaucaucaacuucuacgacccccugguguuccccagcgacgaguucgacgccagcaucagccaggugaacgagaagaucaaccagagccuggccuucaucagaaagagcgacgagcugcugcacaacgugaacgugggcaagagcaccaccaacaucaugaucaccaccaucaucaucgugaucaucgugauccugcugcugcugaucgccgugggccuguuccuguacugcaaggccagaugaggacuaguacuggcugcaucucccuuuccucuguccuccauccuucucccaggauggugaagggggaccugguacccagugauccccaccccaggauccuaaaucaugacuuaccugcuaauaaaaacucauuggaaaagugagaagaucuaaaaaaaaaaaaaaaaaaaaaaaaaaaaaaaaaaaaaaaaaaaaaaaaaaaaaaaaaaaaaaaaugcaucccccccccccccccccccccccccccccccaaaggcucuuuucagagccaccagaauu

SEQ ID NO: 16039 - RNA, 1893 nt, Artificial Sequence
  mRNA product Design f-5 comprising derived and/or modified sequence from HRSV(Memphis-37)__AIY60640.1__F-del_DSCav1_mut3 (opt5)
gggagacuuucccauucuguagcagaauuugguguugccuguggucuuggucccgcggagaagcuuaccauggagcugcccauccucaagaccaacgccauuacaacgauccuggcugccgugacccuuugcuucgcgagcucccagaauauuacagaagaguuuuaccaaucuaccuguagcgcugucuccaaaggcuaucugggggcccucagaacaggaugguacaccucuguuaucacaauugaacugagcaacaucaaggagaucaaaugcaauggcaccgacgccaaggugaaacuuauuaagcaggaacuggauaaguauaaaaacgcugugacggaccuccagcugcugaugcaguccaccccugccgcugggucuggaagcgccaucuguuccggcauugcggucugcaaggugcuccaccuggagggggagguuaauaaaaucaagaacgcccuucugagcacaaauaaagcuguggucucucucuccaacggagugagcguucugaccuucaaggugcuugaucugaagaauuacauugacaaacaacuccugccgauccugaacaagcagucuuguuccauucccaauaucgaaacagucaucgaguuucagcagaaaaacaaucggcuccuggaaauuacccgcgaguucagcgugaacgccggcgugacgacaccugucucuaccuauaugcuuacaaauuccgagcugcucagccugaucaacgauaugcccauuaccaacgaccaaaagaaacuuauguccaauaacguucagaucgugagacagcagucuuacagcauuaugugcaucaucaaggaagaggugcuggcuuaugucgugcaacucccucuguacggcguuauugauacccccuguuggaaacugcauacauccccucucugcacgaccaauacaaaggaagggagcaacaucugucugacccggacagaccgcggaugguacugcgauaaugccggcucuguguccuuuuucccgcaggcggagaccuguaagguccagagcaacagaguguuuugcgacacgaugaacucucuuacacugcccagcgaaguuaaucucugcaauauugauaucuucaacccuaaauaugacuguaagauuaugaccuccaaaaccgaugugucuagcuccgucaucacaagccugggggccaucgugucuugcuacggaaagaccaaauguacagcuuccaauaagaaccggggcauuaucaagacguuuagcaaugggugcgacuaugucucuaacaaaggaguggacaccguuuccgugggcaauacacuuuacugugucaacaagcaagagggccagagccuguaugugaaaggggagcccauuaucaacuucuacgauccucucguuuuucccuccgacgaguucgaugccucuauuagccaggugaaugaaaagaucaaccagucccuggcuuuuauucgcaaaucugacgaacugcuccacaaugucaacgugggaaagagcaccacaaauaucaugaucaccacgauuaucauugugaucauuguuauccugcuucugcucaucgccgucggccuguuccuguauugcaaggccagaugaggacuaguacuggcugcaucucccuuuccucuguccuccauccuucucccaggauggugaagggggaccugguacccagugauccccaccccaggauccuaaaucaugacuuaccugcuaauaaaaacucauuggaaaagugagaagaucuaaaaaaaaaaaaaaaaaaaaaaaaaaaaaaaaaaaaaaaaaaaaaaaaaaaaaaaaaaaaaaaaugcaucccccccccccccccccccccccccccccccaaaggcucuuuucagagccaccagaauu

SEQ ID NO: 16040 - RNA, 1893 nt, Artificial Sequence
  mRNA product Design f-5 comprising derived and/or modified sequence from HRSV(Memphis-37)__AIY60640.1__F-del_DSCav1_mut3 (opt6)
gggagacuuucccauucuguagcagaauuugguguugccuguggucuuggucccgcggagaagcuuaccauggaacuacccauccuaaaaacaaaugccauaaccacaauacucgccgcuguaacacuauguuucgcuaguucacaaaacauuacagaagaauuuuaccaauccacaugcucagcaguaucaaaaggauaccuaggugcacuaagaacaggaugguacacaagcguaauuacaauagaauuauccaauauuaaagaaauaaaauguaacggcacugacgcuaaaguaaaauuaaucaaacaagaacuagacaaauacaaaaacgcaguaacagaccuacaauuacucaugcaauccacacccgcagcaggaucaggcucagccauaugcucagguauagcaguaugcaaaguacuccaccuugaaggagaaguaaacaaaauaaaaaacgcauuacuaucaacaaacaaagcaguaguaucacuaucaaacggagucucugucuuaaccuuuaaaguauuagauuuaaaaaacuacauagacaaacaacuauuaccaauucuaaauaaacaaucauguucuauaccaaauauagaaacaguaauagaauuucaacaaaaaaacaaccgauuacuagaaaucacaagagaauuuucugucaacgccggcguaaccaccccagucucaacauauaugcuaacaaauagugaacucuuauccuuaauaaacgacaugccaauaacaaaugaccaaaaaaaauuaauguccaauaacguacaaauagucagacaacagucauacucaauaauguguaucaucaaagaagaaguauuagcauacguaguucaacuaccccuauacggcguaauagacacaccauguuggaaacuacacacaucacccuuaugcacaaccaauaccaaagaaggaucuaacauaugccuaaccagaacagacagaggcugguacugcgacaacgcagguucagucucauucuucccacaagccgaaacaugcaaaguccaauccaacagaguauuuugcgacacuaugaacucacuaacucuaccuucagaagucaaccuuuguaacauagacauauuuaacccaaaauacgauuguaaaauaaugaccagcaaaacagacgucucaucaagcguaauaacaucacuuggcgcaauagucuccugcuacggaaaaacaaaaugcacagcauccaacaaaaacagaggcaucauaaaaaccuucuccaacggcugcgacuauguaagcaacaaaggugucgauacaguaucaguaggaaacacacuauacugcguaaacaaacaagaaggacaaucacucuacguaaaaggugaaccaaucauaaacuucuacgacccauuaguuuucccaucagacgaauuugaugccuccauaucacaaguaaaugaaaaaauaaaucaaucccuagcauucauacgaaaaucugaugaauuacuucacaaugucaacgucggaaaaucaaccacuaacauaaugauaacaacaauuauaauaguaauaauaguaauacuccuacuauuaauagccgucggucuuuuccuauacugcaaagcacgauaaggacuaguacuggcugcaucucccuuuccucuguccuccauccuucucccaggauggugaagggggaccugguacccagugauccccaccccaggauccuaaaucaugacuuaccugcuaauaaaaacucauuggaaaagugagaagaucuaaaaaaaaaaaaaaaaaaaaaaaaaaaaaaaaaaaaaaaaaaaaaaaaaaaaaaaaaaaaaaaaugcaucccccccccccccccccccccccccccccccaaaggcucuuuucagagccaccagaauu

SEQ ID NO: 16041 - RNA, 1893 nt, Artificial Sequence
  mRNA product Design f-5 comprising derived and/or modified sequence from HRSV(Memphis-37)__AIY60640.1__F-del_DSCav1_mut3 (opt11)
gggagacuuucccauucuguagcagaauuugguguugccuguggucuuggucccgcggagaagcuuaccauggaacuacccauccucaaaaccaacgccaucaccacaauccuagcugccgucacccuaugcuucgcaagcagccaaaacaucacagaagaauuuuaccaaucaaccugcuccgccgucuccaaaggguaccuaggugcccuccgcaccggcugguacacgucugucauaaccaucgaacucuccaacaucaaagaaaucaaauguaacggaacagacgcaaaagucaaacuaaucaaacaagaacuagacaaauacaaaaacgccguaaccgaccuccaacugcucaugcaauccacccccgcugccggcuccgggagcgcaaucugcucuggaaucgccguaugcaaaguccuccaccucgaaggagaaguaaacaaaaucaaaaacgcgcuccucaguaccaacaaagccgucgucucucuaucaaacggcguaucgguccucaccuucaaaguccucgaccuaaagaacuacauagacaaacaacuccuccccauccuaaacaaacaauccugcucaaucccaaacaucgaaaccgugaucgaguuccaacagaaaaacaaccgccuacucgaaaucacccgagaguucucagucaacgcaggagucaccacccccgucucaacauacaugcuuaccaacagcgaacuccuaucccucaucaacgacaugccaaucacaaacgaccaaaagaaacucaugagcaacaacguccagaucguaagacaacaaagcuacagcaucaugugcaucaucaaagaagaaguacuagcauacgucguccaacucccccucuacggcgucaucgacacccccugcuggaaacuccacaccucaccccucugcacaaccaacaccaaagaaggcuccaauaucugccucacacgcaccgaccgcggcugguacugcgacaacgccggcuccgucuccuucuucccucaagccgaaaccugcaaaguccaguccaacagagucuucugcgacaccaugaacucccuaacacuuccaucagaagucaaccuuuguaacaucgacaucuucaaucccaaauacgacuguaaaauaaugaccucaaaaacugacgugucaagcucaguuaucaccucccuaggggccaucgucuccugcuacggcaaaacaaaaugcaccgcauccaacaaaaaucgcggaaucaucaaaacauucuccaacggaugcgacuacgucucaaacaagggaguagauaccguaagcguuggcaacacccucuacugcguaaacaaacaagaaggccaaucacucuacgucaaaggcgaacccauaaucaacuucuacgacccccucgucuucccuuccgaugaguucgacgccagcaucucccaagucaacgagaaaauaaaccagucacucgcauucauccgcaaaagcgacgaacuccuccacaacguaaacguaggcaaauccacaaccaauaucaugauaaccacaaucaucaucgugaucaucgucauccuccuccuccucauagcugucggacucuuccucuacuguaaagcacgcugaggacuaguacuggcugcaucucccuuuccucuguccuccauccuucucccaggauggugaagggggaccugguacccagugauccccaccccaggauccuaaaucaugacuuaccugcuaauaaaaacucauuggaaaagugagaagaucuaaaaaaaaaaaaaaaaaaaaaaaaaaaaaaaaaaaaaaaaaaaaaaaaaaaaaaaaaaaaaaaaugcaucccccccccccccccccccccccccccccccaaaggcucuuuucagagccaccagaauu

SEQ ID NO: 16042 - RNA, 1889 nt, Artificial Sequence
  mRNA product Design g-1 comprising derived and/or modified sequence from HRSV(Memphis-37)__AIY60640.1__F-del_DSCav1_mut3 (opt1)
gggagacuuucccauucuguagcagaauuugguguugccuguggucuuggucccgcggagaagcuuaccauggagcugcccauccucaagaccaacgccaucaccacgauccuggccgcggugacccugugcuucgccagcucccagaacaucaccgaggaguucuaccagagcacgugcuccgccgucagcaagggcuaccucggcgcccugcgcaccgggugguacaccagcgugaucaccaucgagcuguccaacaucaaggagaucaagugcaacggcaccgacgccaaggugaagcucaucaagcaggagcuggacaaguacaagaacgcggucacggaccugcagcuccugaugcagagcaccccggccgccggcuccgggagcgcgaucugcuccggcaucgccgucugcaaggugcugcaccucgagggcgaggugaacaagaucaagaacgcccugcuguccaccaacaaggccgucgugagccucuccaacggggugagcguccugaccuucaaggugcuggaccucaagaacuacaucgacaagcagcugcugcccauccugaacaagcagagcugcuccauccccaacaucgagaccgucaucgaguuccagcagaagaacaaccgccuccuggagaucacgcgggaguucagcgugaacgcgggcgugaccacccccgucuccaccuacaugcugacgaacagcgagcuccugucccugaucaacgacaugccgaucaccaacgaccagaagaagcucaugagcaacaacgugcagaucgugcgccagcaguccuacagcaucaugugcaucaucaaggaggagguccuggccuacguggugcagcugccccucuacggggucaucgacacccccugcuggaagcugcacaccagcccccugugcacgaccaacaccaaggagggcuccaacaucugccucacccggacggaccgcgggugguacugcgacaacgccggcagcguguccuucuucccgcaggccgagaccugcaagguccagagcaaccggguguucugcgacaccaugaacucccugacccugcccagcgaggugaaccucugcaacaucgacaucuucaaccccaaguacgacugcaagaucaugacguccaagaccgacgucagcuccagcgugaucaccucccugggcgccaucgugagcugcuacgggaagaccaagugcacggcgagcaacaagaaccgcggcaucaucaagaccuucuccaacgggugcgacuacgucagcaacaagggcguggacaccguguccgucggcaacacccuguacugcgugaacaagcaggagggccagagccucuacgugaagggggagcccaucaucaacuucuacgacccgcuggucuuccccuccgacgaguucgacgccagcaucucccaggugaacgagaagaucaaccagagccuggccuucauccggaaguccgacgagcuccugcacaacgugaacgucggcaagagcaccacgaacaucaugaucaccaccaucaucaucgugaucaucgugauccugcugcuccugaucgccgucgggcuguuccucuacugcaaggcccgcugaggacuaguggaagcauuuuccuggcugauuaaaagaaauuacucagcuauggucaucuguuccuguuagaaggcuaugcagcauauuauauacuaugcgcauguuaugaaaugcauaauaaaaaauuuuaaaaaaucuaaaagaucuaaaaaaaaaaaaaaaaaaaaaaaaaaaaaaaaaaaaaaaaaaaaaaaaaaaaaaaaaaaaaaaaugcaucccccccccccccccccccccccccccccccaaaggcucuuuucagagccaccagaauu

SEQ ID NO: 16043 - RNA, 1889 nt, Artificial Sequence
  mRNA product Design g-1 comprising derived and/or modified sequence from HRSV(Memphis-37)__AIY60640.1__F-del_DSCav1_mut3 (opt1)
gggagacuuucccauucuguagcagaauuugguguugccuguggucuuggucccgcggagaagcuuaccauggagcugcccauccucaagaccaacgccaucaccacgauccuggccgcggugacccugugcuucgccagcucccagaacaucaccgaggaguucuaccagagcacgugcuccgccgucagcaagggcuaccucggggcccugcgcaccggcugguacaccuccgugaucaccaucgagcugagcaacaucaaggagaucaagugcaacgggaccgacgccaaggugaagcucaucaagcaggagcuggacaaguacaagaacgcggucacggaccugcagcuccugaugcaguccaccccggccgccggcagcggguccgccaucugcagcggcaucgcggugugcaaggugcugcaccucgagggcgaggucaacaagaucaagaacgcccugcuguccaccaacaaggccguggugagccucuccaacggggucagcgugcugaccuucaaggugcuggaccucaagaacuacaucgacaagcagcugcugcccauccucaacaagcaguccugcagcauccccaacaucgagacggucaucgaguuccagcagaagaacaaccggcugcuggagaucacccgcgaguucuccgugaacgccggcgugaccacccccgucagcacguacaugcucaccaacuccgagcugcugagccucaucaacgacaugccgaucaccaacgaccagaagaagcugaugagcaacaacgugcagaucgugcggcagcaguccuacagcaucaugugcaucaucaaggaggagguccuggccuacguggugcagcucccccuguacggggucaucgacacccccugcuggaagcugcacacgagcccccucugcaccaccaacaccaaggagggcuccaacaucugccugacgcgcaccgaccgggggugguacugcgacaacgcgggcuccgugagcuucuucccgcaggccgagaccugcaaggugcaguccaaccgcgucuucugcgacaccaugaacagccugacgcuccccuccgaggugaaccugugcaacaucgacaucuucaaccccaaguacgacugcaagaucaugaccagcaagaccgacgucuccagcuccgugaucaccagccugggcgccaucguguccugcuacgggaagacgaagugcaccgccagcaacaagaaccggggcaucaucaagaccuucuccaacgggugcgacuacgucagcaacaagggcguggacaccguguccgucggcaacacgcucuacugcgugaacaagcaggaggggcagagccuguacgugaagggcgagcccaucaucaacuucuacgacccgcuggucuuccccagcgacgaguucgacgccuccaucagccaggugaacgagaagaucaaccagucccucgcguucauccgcaagagcgacgagcugcugcacaacgugaacgucgggaaguccaccaccaacaucaugaucaccaccaucaucaucgugaucaucgugauccuccugcugcucaucgccgucggccuguuccuguacugcaaggcccggugaggacuaguggaagcauuuuccuggcugauuaaaagaaauuacucagcuauggucaucuguuccuguuagaaggcuaugcagcauauuauauacuaugcgcauguuaugaaaugcauaauaaaaaauuuuaaaaaaucuaaaagaucuaaaaaaaaaaaaaaaaaaaaaaaaaaaaaaaaaaaaaaaaaaaaaaaaaaaaaaaaaaaaaaaaugcaucccccccccccccccccccccccccccccccaaaggcucuuuucagagccaccagaauu

SEQ ID NO: 16044 - RNA, 1889 nt, Artificial Sequence
  mRNA product Design g-1 comprising derived and/or modified sequence from HRSV(Memphis-37)__AIY60640.1__F-del_DSCav1_mut3 (opt2)
gggagacuuucccauucuguagcagaauuugguguugccuguggucuuggucccgcggagaagcuuaccauggagcuccccauccucaagaccaacgccaucaccaccauccucgccgccgucacccucugcuucgccuccucccagaacaucaccgaggaguucuaccaguccaccugcuccgccgucuccaagggcuaccucggcgcccuccgcaccggcugguacaccuccgucaucaccaucgagcucuccaacaucaaggagaucaagugcaacggcaccgacgccaaggucaagcucaucaagcaggagcucgacaaguacaagaacgccgucaccgaccuccagcuccucaugcaguccacccccgccgccggcuccggcuccgccaucugcuccggcaucgccgucugcaagguccuccaccucgagggcgaggucaacaagaucaagaacgcccuccucuccaccaacaaggccgucgucucccucuccaacggcgucuccguccucaccuucaagguccucgaccucaagaacuacaucgacaagcagcuccuccccauccucaacaagcaguccugcuccauccccaacaucgagaccgucaucgaguuccagcagaagaacaaccgccuccucgagaucacccgcgaguucuccgucaacgccggcgucaccacccccgucuccaccuacaugcucaccaacuccgagcuccucucccucaucaacgacaugcccaucaccaacgaccagaagaagcucauguccaacaacguccagaucguccgccagcaguccuacuccaucaugugcaucaucaaggaggagguccucgccuacgucguccagcucccccucuacggcgucaucgacacccccugcuggaagcuccacaccuccccccucugcaccaccaacaccaaggagggcuccaacaucugccucacccgcaccgaccgcggcugguacugcgacaacgccggcuccgucuccuucuucccccaggccgagaccugcaagguccaguccaaccgcgucuucugcgacaccaugaacucccucacccuccccuccgaggucaaccucugcaacaucgacaucuucaaccccaaguacgacugcaagaucaugaccuccaagaccgacgucuccuccuccgucaucaccucccucggcgccaucgucuccugcuacggcaagaccaagugcaccgccuccaacaagaaccgcggcaucaucaagaccuucuccaacggcugcgacuacgucuccaacaagggcgucgacaccgucuccgucggcaacacccucuacugcgucaacaagcaggagggccagucccucuacgucaagggcgagcccaucaucaacuucuacgacccccucgucuuccccuccgacgaguucgacgccuccaucucccaggucaacgagaagaucaaccagucccucgccuucauccgcaaguccgacgagcuccuccacaacgucaacgucggcaaguccaccaccaacaucaugaucaccaccaucaucaucgucaucaucgucauccuccuccuccucaucgccgucggccucuuccucuacugcaaggcccgcugaggacuaguggaagcauuuuccuggcugauuaaaagaaauuacucagcuauggucaucuguuccuguuagaaggcuaugcagcauauuauauacuaugcgcauguuaugaaaugcauaauaaaaaauuuuaaaaaaucuaaaagaucuaaaaaaaaaaaaaaaaaaaaaaaaaaaaaaaaaaaaaaaaaaaaaaaaaaaaaaaaaaaaaaaaugcaucccccccccccccccccccccccccccccccaaaggcucuuuucagagccaccagaauu

SEQ ID NO: 16045 - RNA, 1889 nt, Artificial Sequence
  mRNA product Design g-1 comprising derived and/or modified sequence from HRSV(Memphis-37)__AIY60640.1__F-del_DSCav1_mut3 (opt3)
gggagacuuucccauucuguagcagaauuugguguugccuguggucuuggucccgcggagaagcuuaccauggagcugcccauccucaagaccaacgccauuacaacuauacuugcugcagugacgcugugcuucgccagcucccagaauaucaccgaagaguuuuaccaaucuacauguucagcggucaguaaaggcuauuugggggcuuuaagaacuggaugguacaccagcguuauuacaaucgaacuguccaacauuaaggagaucaaaugcaaugguaccgacgccaaggugaaacuaauaaagcaggaacucgauaaguauaaaaacgcaguaacugaccugcagcuucugaugcagucuacuccugccgcuggcucggggucagcaaucuguagcggaauugccgugugcaaggucuugcaccucgagggcgaggugaauaaaaucaagaacgcucugcugaguaccaauaaagccguugugucccucucuaacggugucagcguguuaacguucaagguacuggaucuuaagaauuacauugacaaacaauugcugccaauccuaaacaagcaguccuguucaauaccgaauauugaaacuguuaucgaguuucagcagaaaaacaauaggcuccuggaaauuacccgggaguucagugugaacgcgggggucacaacucccgugagcaccuauaugcuuacaaauucugagcuguugucccucaucaacgauaugccuaucaccaacgaccaaaagaaacugaugucaaauaacgugcagauuguccgccagcagagcuacaguauaaugugcaucauuaaggaagagguuuuagcauaugugguacaacugccacucuacggagugaucgauacgcccuguuggaaacuucauacuucuccucugugcacaaccaauacuaaggaaggcuccaacauauguuugacacgaaccgaccguggcugguacugcgauaaugccgggagcgucucguuuuucccacaggcugagacguguaaggugcagucuaacagaguuuucugcgacaccaugaacucccuaacacugcccucagaagugaaucucugcaauauugauaucuucaacccuaaauaugacuguaagaucaugacaaguaaaaccgaugucagcuccucugugauuacaagccugggagccaucguaucaugcuacgguaagacuaaauguaccgcaaguaauaagaacaggggcauuauaaagacauuuuccaaugggugcgacuauguuagcaacaaaggaguggacaccgucucugugggcaauacucuuuacugugucaacaagcaagagggucagucacuguaugugaaaggggagccaaucauuaacuucuacgauccguugguuuuucccagugacgaauuugaugcuagcaucucccaggugaaugagaagaucaaccagucucucgccuuuauucggaaaucggacgaacuguuacacaauguaaacgucggaaagagcacgacaaauauaaugaucaccacuauuaucauugugaucauaguuauccugcuacuccugauugcggugggccuuuucuuguauugcaaggcccgcugaggacuaguggaagcauuuuccuggcugauuaaaagaaauuacucagcuauggucaucuguuccuguuagaaggcuaugcagcauauuauauacuaugcgcauguuaugaaaugcauaauaaaaaauuuuaaaaaaucuaaaagaucuaaaaaaaaaaaaaaaaaaaaaaaaaaaaaaaaaaaaaaaaaaaaaaaaaaaaaaaaaaaaaaaaugcaucccccccccccccccccccccccccccccccaaaggcucuuuucagagccaccagaauu

SEQ ID NO: 16046 - RNA, 1889 nt, Artificial Sequence
  mRNA product Design g-1 comprising derived and/or modified sequence from HRSV(Memphis-37)__AIY60640.1__F-del_DSCav1_mut3 (opt4)
gggagacuuucccauucuguagcagaauuugguguugccuguggucuuggucccgcggagaagcuuaccauggagcugcccauccugaagaccaacgccaucaccaccauccuggccgccgugacccugugcuucgccagcagccagaacaucaccgaggaguucuaccagagcaccugcagcgccgugagcaagggcuaccugggcgcccugagaaccggcugguacaccagcgugaucaccaucgagcugagcaacaucaaggagaucaagugcaacggcaccgacgccaaggugaagcugaucaagcaggagcuggacaaguacaagaacgccgugaccgaccugcagcugcugaugcagagcacccccgccgccggcagcggcagcgccaucugcagcggcaucgccgugugcaaggugcugcaccuggagggcgaggugaacaagaucaagaacgcccugcugagcaccaacaaggccguggugagccugagcaacggcgugagcgugcugaccuucaaggugcuggaccugaagaacuacaucgacaagcagcugcugcccauccugaacaagcagagcugcagcauccccaacaucgagaccgugaucgaguuccagcagaagaacaacagacugcuggagaucaccagagaguucagcgugaacgccggcgugaccacccccgugagcaccuacaugcugaccaacagcgagcugcugagccugaucaacgacaugcccaucaccaacgaccagaagaagcugaugagcaacaacgugcagaucgugagacagcagagcuacagcaucaugugcaucaucaaggaggaggugcuggccuacguggugcagcugccccuguacggcgugaucgacacccccugcuggaagcugcacaccagcccccugugcaccaccaacaccaaggagggcagcaacaucugccugaccagaaccgacagaggcugguacugcgacaacgccggcagcgugagcuucuucccccaggccgagaccugcaaggugcagagcaacagaguguucugcgacaccaugaacagccugacccugcccagcgaggugaaccugugcaacaucgacaucuucaaccccaaguacgacugcaagaucaugaccagcaagaccgacgugagcagcagcgugaucaccagccugggcgccaucgugagcugcuacggcaagaccaagugcaccgccagcaacaagaacagaggcaucaucaagaccuucagcaacggcugcgacuacgugagcaacaagggcguggacaccgugagcgugggcaacacccuguacugcgugaacaagcaggagggccagagccuguacgugaagggcgagcccaucaucaacuucuacgacccccugguguuccccagcgacgaguucgacgccagcaucagccaggugaacgagaagaucaaccagagccuggccuucaucagaaagagcgacgagcugcugcacaacgugaacgugggcaagagcaccaccaacaucaugaucaccaccaucaucaucgugaucaucgugauccugcugcugcugaucgccgugggccuguuccuguacugcaaggccagaugaggacuaguggaagcauuuuccuggcugauuaaaagaaauuacucagcuauggucaucuguuccuguuagaaggcuaugcagcauauuauauacuaugcgcauguuaugaaaugcauaauaaaaaauuuuaaaaaaucuaaaagaucuaaaaaaaaaaaaaaaaaaaaaaaaaaaaaaaaaaaaaaaaaaaaaaaaaaaaaaaaaaaaaaaaugcaucccccccccccccccccccccccccccccccaaaggcucuuuucagagccaccagaauu

SEQ ID NO: 16047 - RNA, 1889 nt, Artificial Sequence
  mRNA product Design g-1 comprising derived and/or modified sequence from HRSV(Memphis-37)__AIY60640.1__F-del_DSCav1_mut3 (opt5)
gggagacuuucccauucuguagcagaauuugguguugccuguggucuuggucccgcggagaagcuuaccauggagcugcccauccucaagaccaacgccauuacaacgauccuggcugccgugacccuuugcuucgcgagcucccagaauauuacagaagaguuuuaccaaucuaccuguagcgcugucuccaaaggcuaucugggggcccucagaacaggaugguacaccucuguuaucacaauugaacugagcaacaucaaggagaucaaaugcaauggcaccgacgccaaggugaaacuuauuaagcaggaacuggauaaguauaaaaacgcugugacggaccuccagcugcugaugcaguccaccccugccgcugggucuggaagcgccaucuguuccggcauugcggucugcaaggugcuccaccuggagggggagguuaauaaaaucaagaacgcccuucugagcacaaauaaagcuguggucucucucuccaacggagugagcguucugaccuucaaggugcuugaucugaagaauuacauugacaaacaacuccugccgauccugaacaagcagucuuguuccauucccaauaucgaaacagucaucgaguuucagcagaaaaacaaucggcuccuggaaauuacccgcgaguucagcgugaacgccggcgugacgacaccugucucuaccuauaugcuuacaaauuccgagcugcucagccugaucaacgauaugcccauuaccaacgaccaaaagaaacuuauguccaauaacguucagaucgugagacagcagucuuacagcauuaugugcaucaucaaggaagaggugcuggcuuaugucgugcaacucccucuguacggcguuauugauacccccuguuggaaacugcauacauccccucucugcacgaccaauacaaaggaagggagcaacaucugucugacccggacagaccgcggaugguacugcgauaaugccggcucuguguccuuuuucccgcaggcggagaccuguaagguccagagcaacagaguguuuugcgacacgaugaacucucuuacacugcccagcgaaguuaaucucugcaauauugauaucuucaacccuaaauaugacuguaagauuaugaccuccaaaaccgaugugucuagcuccgucaucacaagccugggggccaucgugucuugcuacggaaagaccaaauguacagcuuccaauaagaaccggggcauuaucaagacguuuagcaaugggugcgacuaugucucuaacaaaggaguggacaccguuuccgugggcaauacacuuuacugugucaacaagcaagagggccagagccuguaugugaaaggggagcccauuaucaacuucuacgauccucucguuuuucccuccgacgaguucgaugccucuauuagccaggugaaugaaaagaucaaccagucccuggcuuuuauucgcaaaucugacgaacugcuccacaaugucaacgugggaaagagcaccacaaauaucaugaucaccacgauuaucauugugaucauuguuauccugcuucugcucaucgccgucggccuguuccuguauugcaaggccagaugaggacuaguggaagcauuuuccuggcugauuaaaagaaauuacucagcuauggucaucuguuccuguuagaaggcuaugcagcauauuauauacuaugcgcauguuaugaaaugcauaauaaaaaauuuuaaaaaaucuaaaagaucuaaaaaaaaaaaaaaaaaaaaaaaaaaaaaaaaaaaaaaaaaaaaaaaaaaaaaaaaaaaaaaaaugcaucccccccccccccccccccccccccccccccaaaggcucuuuucagagccaccagaauu

SEQ ID NO: 16048 - RNA, 1889 nt, Artificial Sequence
  mRNA product Design g-1 comprising derived and/or modified sequence from HRSV(Memphis-37)__AIY60640.1__F-del_DSCav1_mut3 (opt6)
gggagacuuucccauucuguagcagaauuugguguugccuguggucuuggucccgcggagaagcuuaccauggaacuacccauccuaaaaacaaaugccauaaccacaauacucgccgcuguaacacuauguuucgcuaguucacaaaacauuacagaagaauuuuaccaauccacaugcucagcaguaucaaaaggauaccuaggugcacuaagaacaggaugguacacaagcguaauuacaauagaauuauccaauauuaaagaaauaaaauguaacggcacugacgcuaaaguaaaauuaaucaaacaagaacuagacaaauacaaaaacgcaguaacagaccuacaauuacucaugcaauccacacccgcagcaggaucaggcucagccauaugcucagguauagcaguaugcaaaguacuccaccuugaaggagaaguaaacaaaauaaaaaacgcauuacuaucaacaaacaaagcaguaguaucacuaucaaacggagucucugucuuaaccuuuaaaguauuagauuuaaaaaacuacauagacaaacaacuauuaccaauucuaaauaaacaaucauguucuauaccaaauauagaaacaguaauagaauuucaacaaaaaaacaaccgauuacuagaaaucacaagagaauuuucugucaacgccggcguaaccaccccagucucaacauauaugcuaacaaauagugaacucuuauccuuaauaaacgacaugccaauaacaaaugaccaaaaaaaauuaauguccaauaacguacaaauagucagacaacagucauacucaauaauguguaucaucaaagaagaaguauuagcauacguaguucaacuaccccuauacggcguaauagacacaccauguuggaaacuacacacaucacccuuaugcacaaccaauaccaaagaaggaucuaacauaugccuaaccagaacagacagaggcugguacugcgacaacgcagguucagucucauucuucccacaagccgaaacaugcaaaguccaauccaacagaguauuuugcgacacuaugaacucacuaacucuaccuucagaagucaaccuuuguaacauagacauauuuaacccaaaauacgauuguaaaauaaugaccagcaaaacagacgucucaucaagcguaauaacaucacuuggcgcaauagucuccugcuacggaaaaacaaaaugcacagcauccaacaaaaacagaggcaucauaaaaaccuucuccaacggcugcgacuauguaagcaacaaaggugucgauacaguaucaguaggaaacacacuauacugcguaaacaaacaagaaggacaaucacucuacguaaaaggugaaccaaucauaaacuucuacgacccauuaguuuucccaucagacgaauuugaugccuccauaucacaaguaaaugaaaaaauaaaucaaucccuagcauucauacgaaaaucugaugaauuacuucacaaugucaacgucggaaaaucaaccacuaacauaaugauaacaacaauuauaauaguaauaauaguaauacuccuacuauuaauagccgucggucuuuuccuauacugcaaagcacgauaaggacuaguggaagcauuuuccuggcugauuaaaagaaauuacucagcuauggucaucuguuccuguuagaaggcuaugcagcauauuauauacuaugcgcauguuaugaaaugcauaauaaaaaauuuuaaaaaaucuaaaagaucuaaaaaaaaaaaaaaaaaaaaaaaaaaaaaaaaaaaaaaaaaaaaaaaaaaaaaaaaaaaaaaaaugcaucccccccccccccccccccccccccccccccaaaggcucuuuucagagccaccagaauu

SEQ ID NO: 16049 - RNA, 1889 nt, Artificial Sequence
  mRNA product Design g-1 comprising derived and/or modified sequence from HRSV(Memphis-37)__AIY60640.1__F-del_DSCav1_mut3 (opt11)
gggagacuuucccauucuguagcagaauuugguguugccuguggucuuggucccgcggagaagcuuaccauggaacuacccauccucaaaaccaacgccaucaccacaauccuagcugccgucacccuaugcuucgcaagcagccaaaacaucacagaagaauuuuaccaaucaaccugcuccgccgucuccaaaggguaccuaggugcccuccgcaccggcugguacacgucugucauaaccaucgaacucuccaacaucaaagaaaucaaauguaacggaacagacgcaaaagucaaacuaaucaaacaagaacuagacaaauacaaaaacgccguaaccgaccuccaacugcucaugcaauccacccccgcugccggcuccgggagcgcaaucugcucuggaaucgccguaugcaaaguccuccaccucgaaggagaaguaaacaaaaucaaaaacgcgcuccucaguaccaacaaagccgucgucucucuaucaaacggcguaucgguccucaccuucaaaguccucgaccuaaagaacuacauagacaaacaacuccuccccauccuaaacaaacaauccugcucaaucccaaacaucgaaaccgugaucgaguuccaacagaaaaacaaccgccuacucgaaaucacccgagaguucucagucaacgcaggagucaccacccccgucucaacauacaugcuuaccaacagcgaacuccuaucccucaucaacgacaugccaaucacaaacgaccaaaagaaacucaugagcaacaacguccagaucguaagacaacaaagcuacagcaucaugugcaucaucaaagaagaaguacuagcauacgucguccaacucccccucuacggcgucaucgacacccccugcuggaaacuccacaccucaccccucugcacaaccaacaccaaagaaggcuccaauaucugccucacacgcaccgaccgcggcugguacugcgacaacgccggcuccgucuccuucuucccucaagccgaaaccugcaaaguccaguccaacagagucuucugcgacaccaugaacucccuaacacuuccaucagaagucaaccuuuguaacaucgacaucuucaaucccaaauacgacuguaaaauaaugaccucaaaaacugacgugucaagcucaguuaucaccucccuaggggccaucgucuccugcuacggcaaaacaaaaugcaccgcauccaacaaaaaucgcggaaucaucaaaacauucuccaacggaugcgacuacgucucaaacaagggaguagauaccguaagcguuggcaacacccucuacugcguaaacaaacaagaaggccaaucacucuacgucaaaggcgaacccauaaucaacuucuacgacccccucgucuucccuuccgaugaguucgacgccagcaucucccaagucaacgagaaaauaaaccagucacucgcauucauccgcaaaagcgacgaacuccuccacaacguaaacguaggcaaauccacaaccaauaucaugauaaccacaaucaucaucgugaucaucgucauccuccuccuccucauagcugucggacucuuccucuacuguaaagcacgcugaggacuaguggaagcauuuuccuggcugauuaaaagaaauuacucagcuauggucaucuguuccuguuagaaggcuaugcagcauauuauauacuaugcgcauguuaugaaaugcauaauaaaaaauuuuaaaaaaucuaaaagaucuaaaaaaaaaaaaaaaaaaaaaaaaaaaaaaaaaaaaaaaaaaaaaaaaaaaaaaaaaaaaaaaaugcaucccccccccccccccccccccccccccccccaaaggcucuuuucagagccaccagaauu

SEQ ID NO: 16050 - RNA, 1904 nt, Artificial Sequence
  mRNA product Design g-2 comprising derived and/or modified sequence from HRSV(Memphis-37)__AIY60640.1__F-del_DSCav1_mut3 (opt1)
gggagaguccgcucagccagguugcagaagcggcuuagcguguguccuaaucuucucucugcguguagguaggccugugccgcaaacaagcuuaccauggagcugcccauccucaagaccaacgccaucaccacgauccuggccgcggugacccugugcuucgccagcucccagaacaucaccgaggaguucuaccagagcacgugcuccgccgucagcaagggcuaccucggcgcccugcgcaccgggugguacaccagcgugaucaccaucgagcuguccaacaucaaggagaucaagugcaacggcaccgacgccaaggugaagcucaucaagcaggagcuggacaaguacaagaacgcggucacggaccugcagcuccugaugcagagcaccccggccgccggcuccgggagcgcgaucugcuccggcaucgccgucugcaaggugcugcaccucgagggcgaggugaacaagaucaagaacgcccugcuguccaccaacaaggccgucgugagccucuccaacggggugagcguccugaccuucaaggugcuggaccucaagaacuacaucgacaagcagcugcugcccauccugaacaagcagagcugcuccauccccaacaucgagaccgucaucgaguuccagcagaagaacaaccgccuccuggagaucacgcgggaguucagcgugaacgcgggcgugaccacccccgucuccaccuacaugcugacgaacagcgagcuccugucccugaucaacgacaugccgaucaccaacgaccagaagaagcucaugagcaacaacgugcagaucgugcgccagcaguccuacagcaucaugugcaucaucaaggaggagguccuggccuacguggugcagcugccccucuacggggucaucgacacccccugcuggaagcugcacaccagcccccugugcacgaccaacaccaaggagggcuccaacaucugccucacccggacggaccgcgggugguacugcgacaacgccggcagcguguccuucuucccgcaggccgagaccugcaagguccagagcaaccggguguucugcgacaccaugaacucccugacccugcccagcgaggugaaccucugcaacaucgacaucuucaaccccaaguacgacugcaagaucaugacguccaagaccgacgucagcuccagcgugaucaccucccugggcgccaucgugagcugcuacgggaagaccaagugcacggcgagcaacaagaaccgcggcaucaucaagaccuucuccaacgggugcgacuacgucagcaacaagggcguggacaccguguccgucggcaacacccuguacugcgugaacaagcaggagggccagagccucuacgugaagggggagcccaucaucaacuucuacgacccgcuggucuuccccuccgacgaguucgacgccagcaucucccaggugaacgagaagaucaaccagagccuggccuucauccggaaguccgacgagcuccugcacaacgugaacgucggcaagagcaccacgaacaucaugaucaccaccaucaucaucgugaucaucgugauccugcugcuccugaucgccgucgggcuguuccucuacugcaaggcccgcugaggacuaguaauaaggaaacuguaugaaugucugugggcaggaagugaagagauccuucuguaaagguuuuuggaauuaugucugcugaauaauaaacuuuuuugaaauaauaaaucugguagaaaaaugagaucuaaaaaaaaaaaaaaaaaaaaaaaaaaaaaaaaaaaaaaaaaaaaaaaaaaaaaaaaaaaaaaaaugcaucccccccccccccccccccccccccccccccaaaggcucuuuucagagccaccagaauu

SEQ ID NO: 16051 - RNA, 1904 nt, Artificial Sequence
  mRNA product Design g-2 comprising derived and/or modified sequence from HRSV(Memphis-37)__AIY60640.1__F-del_DSCav1_mut3 (opt1)
gggagaguccgcucagccagguugcagaagcggcuuagcguguguccuaaucuucucucugcguguagguaggccugugccgcaaacaagcuuaccauggagcugcccauccucaagaccaacgccaucaccacgauccuggccgcggugacccugugcuucgccagcucccagaacaucaccgaggaguucuaccagagcacgugcuccgccgucagcaagggcuaccucggggcccugcgcaccggcugguacaccuccgugaucaccaucgagcugagcaacaucaaggagaucaagugcaacgggaccgacgccaaggugaagcucaucaagcaggagcuggacaaguacaagaacgcggucacggaccugcagcuccugaugcaguccaccccggccgccggcagcggguccgccaucugcagcggcaucgcggugugcaaggugcugcaccucgagggcgaggucaacaagaucaagaacgcccugcuguccaccaacaaggccguggugagccucuccaacggggucagcgugcugaccuucaaggugcuggaccucaagaacuacaucgacaagcagcugcugcccauccucaacaagcaguccugcagcauccccaacaucgagacggucaucgaguuccagcagaagaacaaccggcugcuggagaucacccgcgaguucuccgugaacgccggcgugaccacccccgucagcacguacaugcucaccaacuccgagcugcugagccucaucaacgacaugccgaucaccaacgaccagaagaagcugaugagcaacaacgugcagaucgugcggcagcaguccuacagcaucaugugcaucaucaaggaggagguccuggccuacguggugcagcucccccuguacggggucaucgacacccccugcuggaagcugcacacgagcccccucugcaccaccaacaccaaggagggcuccaacaucugccugacgcgcaccgaccgggggugguacugcgacaacgcgggcuccgugagcuucuucccgcaggccgagaccugcaaggugcaguccaaccgcgucuucugcgacaccaugaacagccugacgcuccccuccgaggugaaccugugcaacaucgacaucuucaaccccaaguacgacugcaagaucaugaccagcaagaccgacgucuccagcuccgugaucaccagccugggcgccaucguguccugcuacgggaagacgaagugcaccgccagcaacaagaaccggggcaucaucaagaccuucuccaacgggugcgacuacgucagcaacaagggcguggacaccguguccgucggcaacacgcucuacugcgugaacaagcaggaggggcagagccuguacgugaagggcgagcccaucaucaacuucuacgacccgcuggucuuccccagcgacgaguucgacgccuccaucagccaggugaacgagaagaucaaccagucccucgcguucauccgcaagagcgacgagcugcugcacaacgugaacgucgggaaguccaccaccaacaucaugaucaccaccaucaucaucgugaucaucgugauccuccugcugcucaucgccgucggccuguuccuguacugcaaggcccggugaggacuaguaauaaggaaacuguaugaaugucugugggcaggaagugaagagauccuucuguaaagguuuuuggaauuaugucugcugaauaauaaacuuuuuugaaauaauaaaucugguagaaaaaugagaucuaaaaaaaaaaaaaaaaaaaaaaaaaaaaaaaaaaaaaaaaaaaaaaaaaaaaaaaaaaaaaaaaugcaucccccccccccccccccccccccccccccccaaaggcucuuuucagagccaccagaauu

SEQ ID NO: 16052 - RNA, 1904 nt, Artificial Sequence
  mRNA product Design g-2 comprising derived and/or modified sequence from HRSV(Memphis-37)__AIY60640.1__F-del_DSCav1_mut3 (opt2)
gggagaguccgcucagccagguugcagaagcggcuuagcguguguccuaaucuucucucugcguguagguaggccugugccgcaaacaagcuuaccauggagcuccccauccucaagaccaacgccaucaccaccauccucgccgccgucacccucugcuucgccuccucccagaacaucaccgaggaguucuaccaguccaccugcuccgccgucuccaagggcuaccucggcgcccuccgcaccggcugguacaccuccgucaucaccaucgagcucuccaacaucaaggagaucaagugcaacggcaccgacgccaaggucaagcucaucaagcaggagcucgacaaguacaagaacgccgucaccgaccuccagcuccucaugcaguccacccccgccgccggcuccggcuccgccaucugcuccggcaucgccgucugcaagguccuccaccucgagggcgaggucaacaagaucaagaacgcccuccucuccaccaacaaggccgucgucucccucuccaacggcgucuccguccucaccuucaagguccucgaccucaagaacuacaucgacaagcagcuccuccccauccucaacaagcaguccugcuccauccccaacaucgagaccgucaucgaguuccagcagaagaacaaccgccuccucgagaucacccgcgaguucuccgucaacgccggcgucaccacccccgucuccaccuacaugcucaccaacuccgagcuccucucccucaucaacgacaugcccaucaccaacgaccagaagaagcucauguccaacaacguccagaucguccgccagcaguccuacuccaucaugugcaucaucaaggaggagguccucgccuacgucguccagcucccccucuacggcgucaucgacacccccugcuggaagcuccacaccuccccccucugcaccaccaacaccaaggagggcuccaacaucugccucacccgcaccgaccgcggcugguacugcgacaacgccggcuccgucuccuucuucccccaggccgagaccugcaagguccaguccaaccgcgucuucugcgacaccaugaacucccucacccuccccuccgaggucaaccucugcaacaucgacaucuucaaccccaaguacgacugcaagaucaugaccuccaagaccgacgucuccuccuccgucaucaccucccucggcgccaucgucuccugcuacggcaagaccaagugcaccgccuccaacaagaaccgcggcaucaucaagaccuucuccaacggcugcgacuacgucuccaacaagggcgucgacaccgucuccgucggcaacacccucuacugcgucaacaagcaggagggccagucccucuacgucaagggcgagcccaucaucaacuucuacgacccccucgucuuccccuccgacgaguucgacgccuccaucucccaggucaacgagaagaucaaccagucccucgccuucauccgcaaguccgacgagcuccuccacaacgucaacgucggcaaguccaccaccaacaucaugaucaccaccaucaucaucgucaucaucgucauccuccuccuccucaucgccgucggccucuuccucuacugcaaggcccgcugaggacuaguaauaaggaaacuguaugaaugucugugggcaggaagugaagagauccuucuguaaagguuuuuggaauuaugucugcugaauaauaaacuuuuuugaaauaauaaaucugguagaaaaaugagaucuaaaaaaaaaaaaaaaaaaaaaaaaaaaaaaaaaaaaaaaaaaaaaaaaaaaaaaaaaaaaaaaaugcaucccccccccccccccccccccccccccccccaaaggcucuuuucagagccaccagaauu

SEQ ID NO: 16053 - RNA, 1904 nt, Artificial Sequence
  mRNA product Design g-2 comprising derived and/or modified sequence from HRSV(Memphis-37)__AIY60640.1__F-del_DSCav1_mut3 (opt3)
gggagaguccgcucagccagguugcagaagcggcuuagcguguguccuaaucuucucucugcguguagguaggccugugccgcaaacaagcuuaccauggagcugcccauccucaagaccaacgccauuacaacuauacuugcugcagugacgcugugcuucgccagcucccagaauaucaccgaagaguuuuaccaaucuacauguucagcggucaguaaaggcuauuugggggcuuuaagaacuggaugguacaccagcguuauuacaaucgaacuguccaacauuaaggagaucaaaugcaaugguaccgacgccaaggugaaacuaauaaagcaggaacucgauaaguauaaaaacgcaguaacugaccugcagcuucugaugcagucuacuccugccgcuggcucggggucagcaaucuguagcggaauugccgugugcaaggucuugcaccucgagggcgaggugaauaaaaucaagaacgcucugcugaguaccaauaaagccguugugucccucucuaacggugucagcguguuaacguucaagguacuggaucuuaagaauuacauugacaaacaauugcugccaauccuaaacaagcaguccuguucaauaccgaauauugaaacuguuaucgaguuucagcagaaaaacaauaggcuccuggaaauuacccgggaguucagugugaacgcgggggucacaacucccgugagcaccuauaugcuuacaaauucugagcuguugucccucaucaacgauaugccuaucaccaacgaccaaaagaaacugaugucaaauaacgugcagauuguccgccagcagagcuacaguauaaugugcaucauuaaggaagagguuuuagcauaugugguacaacugccacucuacggagugaucgauacgcccuguuggaaacuucauacuucuccucugugcacaaccaauacuaaggaaggcuccaacauauguuugacacgaaccgaccguggcugguacugcgauaaugccgggagcgucucguuuuucccacaggcugagacguguaaggugcagucuaacagaguuuucugcgacaccaugaacucccuaacacugcccucagaagugaaucucugcaauauugauaucuucaacccuaaauaugacuguaagaucaugacaaguaaaaccgaugucagcuccucugugauuacaagccugggagccaucguaucaugcuacgguaagacuaaauguaccgcaaguaauaagaacaggggcauuauaaagacauuuuccaaugggugcgacuauguuagcaacaaaggaguggacaccgucucugugggcaauacucuuuacugugucaacaagcaagagggucagucacuguaugugaaaggggagccaaucauuaacuucuacgauccguugguuuuucccagugacgaauuugaugcuagcaucucccaggugaaugagaagaucaaccagucucucgccuuuauucggaaaucggacgaacuguuacacaauguaaacgucggaaagagcacgacaaauauaaugaucaccacuauuaucauugugaucauaguuauccugcuacuccugauugcggugggccuuuucuuguauugcaaggcccgcugaggacuaguaauaaggaaacuguaugaaugucugugggcaggaagugaagagauccuucuguaaagguuuuuggaauuaugucugcugaauaauaaacuuuuuugaaauaauaaaucugguagaaaaaugagaucuaaaaaaaaaaaaaaaaaaaaaaaaaaaaaaaaaaaaaaaaaaaaaaaaaaaaaaaaaaaaaaaaugcaucccccccccccccccccccccccccccccccaaaggcucuuuucagagccaccagaauu

SEQ ID NO: 16054 - RNA, 1904 nt, Artificial Sequence
  mRNA product Design g-2 comprising derived and/or modified sequence from HRSV(Memphis-37)__AIY60640.1__F-del_DSCav1_mut3 (opt4)
gggagaguccgcucagccagguugcagaagcggcuuagcguguguccuaaucuucucucugcguguagguaggccugugccgcaaacaagcuuaccauggagcugcccauccugaagaccaacgccaucaccaccauccuggccgccgugacccugugcuucgccagcagccagaacaucaccgaggaguucuaccagagcaccugcagcgccgugagcaagggcuaccugggcgcccugagaaccggcugguacaccagcgugaucaccaucgagcugagcaacaucaaggagaucaagugcaacggcaccgacgccaaggugaagcugaucaagcaggagcuggacaaguacaagaacgccgugaccgaccugcagcugcugaugcagagcacccccgccgccggcagcggcagcgccaucugcagcggcaucgccgugugcaaggugcugcaccuggagggcgaggugaacaagaucaagaacgcccugcugagcaccaacaaggccguggugagccugagcaacggcgugagcgugcugaccuucaaggugcuggaccugaagaacuacaucgacaagcagcugcugcccauccugaacaagcagagcugcagcauccccaacaucgagaccgugaucgaguuccagcagaagaacaacagacugcuggagaucaccagagaguucagcgugaacgccggcgugaccacccccgugagcaccuacaugcugaccaacagcgagcugcugagccugaucaacgacaugcccaucaccaacgaccagaagaagcugaugagcaacaacgugcagaucgugagacagcagagcuacagcaucaugugcaucaucaaggaggaggugcuggccuacguggugcagcugccccuguacggcgugaucgacacccccugcuggaagcugcacaccagcccccugugcaccaccaacaccaaggagggcagcaacaucugccugaccagaaccgacagaggcugguacugcgacaacgccggcagcgugagcuucuucccccaggccgagaccugcaaggugcagagcaacagaguguucugcgacaccaugaacagccugacccugcccagcgaggugaaccugugcaacaucgacaucuucaaccccaaguacgacugcaagaucaugaccagcaagaccgacgugagcagcagcgugaucaccagccugggcgccaucgugagcugcuacggcaagaccaagugcaccgccagcaacaagaacagaggcaucaucaagaccuucagcaacggcugcgacuacgugagcaacaagggcguggacaccgugagcgugggcaacacccuguacugcgugaacaagcaggagggccagagccuguacgugaagggcgagcccaucaucaacuucuacgacccccugguguuccccagcgacgaguucgacgccagcaucagccaggugaacgagaagaucaaccagagccuggccuucaucagaaagagcgacgagcugcugcacaacgugaacgugggcaagagcaccaccaacaucaugaucaccaccaucaucaucgugaucaucgugauccugcugcugcugaucgccgugggccuguuccuguacugcaaggccagaugaggacuaguaauaaggaaacuguaugaaugucugugggcaggaagugaagagauccuucuguaaagguuuuuggaauuaugucugcugaauaauaaacuuuuuugaaauaauaaaucugguagaaaaaugagaucuaaaaaaaaaaaaaaaaaaaaaaaaaaaaaaaaaaaaaaaaaaaaaaaaaaaaaaaaaaaaaaaaugcaucccccccccccccccccccccccccccccccaaaggcucuuuucagagccaccagaauu

SEQ ID NO: 16055 - RNA, 1904 nt, Artificial Sequence
  mRNA product Design g-2 comprising derived and/or modified sequence from HRSV(Memphis-37)__AIY60640.1__F-del_DSCav1_mut3 (opt5)
gggagaguccgcucagccagguugcagaagcggcuuagcguguguccuaaucuucucucugcguguagguaggccugugccgcaaacaagcuuaccauggagcugcccauccucaagaccaacgccauuacaacgauccuggcugccgugacccuuugcuucgcgagcucccagaauauuacagaagaguuuuaccaaucuaccuguagcgcugucuccaaaggcuaucugggggcccucagaacaggaugguacaccucuguuaucacaauugaacugagcaacaucaaggagaucaaaugcaauggcaccgacgccaaggugaaacuuauuaagcaggaacuggauaaguauaaaaacgcugugacggaccuccagcugcugaugcaguccaccccugccgcugggucuggaagcgccaucuguuccggcauugcggucugcaaggugcuccaccuggagggggagguuaauaaaaucaagaacgcccuucugagcacaaauaaagcuguggucucucucuccaacggagugagcguucugaccuucaaggugcuugaucugaagaauuacauugacaaacaacuccugccgauccugaacaagcagucuuguuccauucccaauaucgaaacagucaucgaguuucagcagaaaaacaaucggcuccuggaaauuacccgcgaguucagcgugaacgccggcgugacgacaccugucucuaccuauaugcuuacaaauuccgagcugcucagccugaucaacgauaugcccauuaccaacgaccaaaagaaacuuauguccaauaacguucagaucgugagacagcagucuuacagcauuaugugcaucaucaaggaagaggugcuggcuuaugucgugcaacucccucuguacggcguuauugauacccccuguuggaaacugcauacauccccucucugcacgaccaauacaaaggaagggagcaacaucugucugacccggacagaccgcggaugguacugcgauaaugccggcucuguguccuuuuucccgcaggcggagaccuguaagguccagagcaacagaguguuuugcgacacgaugaacucucuuacacugcccagcgaaguuaaucucugcaauauugauaucuucaacccuaaauaugacuguaagauuaugaccuccaaaaccgaugugucuagcuccgucaucacaagccugggggccaucgugucuugcuacggaaagaccaaauguacagcuuccaauaagaaccggggcauuaucaagacguuuagcaaugggugcgacuaugucucuaacaaaggaguggacaccguuuccgugggcaauacacuuuacugugucaacaagcaagagggccagagccuguaugugaaaggggagcccauuaucaacuucuacgauccucucguuuuucccuccgacgaguucgaugccucuauuagccaggugaaugaaaagaucaaccagucccuggcuuuuauucgcaaaucugacgaacugcuccacaaugucaacgugggaaagagcaccacaaauaucaugaucaccacgauuaucauugugaucauuguuauccugcuucugcucaucgccgucggccuguuccuguauugcaaggccagaugaggacuaguaauaaggaaacuguaugaaugucugugggcaggaagugaagagauccuucuguaaagguuuuuggaauuaugucugcugaauaauaaacuuuuuugaaauaauaaaucugguagaaaaaugagaucuaaaaaaaaaaaaaaaaaaaaaaaaaaaaaaaaaaaaaaaaaaaaaaaaaaaaaaaaaaaaaaaaugcaucccccccccccccccccccccccccccccccaaaggcucuuuucagagccaccagaauu

SEQ ID NO: 16056 - RNA, 1904 nt, Artificial Sequence
  mRNA product Design g-2 comprising derived and/or modified sequence from HRSV(Memphis-37)__AIY60640.1__F-del_DSCav1_mut3 (opt6)
gggagaguccgcucagccagguugcagaagcggcuuagcguguguccuaaucuucucucugcguguagguaggccugugccgcaaacaagcuuaccauggaacuacccauccuaaaaacaaaugccauaaccacaauacucgccgcuguaacacuauguuucgcuaguucacaaaacauuacagaagaauuuuaccaauccacaugcucagcaguaucaaaaggauaccuaggugcacuaagaacaggaugguacacaagcguaauuacaauagaauuauccaauauuaaagaaauaaaauguaacggcacugacgcuaaaguaaaauuaaucaaacaagaacuagacaaauacaaaaacgcaguaacagaccuacaauuacucaugcaauccacacccgcagcaggaucaggcucagccauaugcucagguauagcaguaugcaaaguacuccaccuugaaggagaaguaaacaaaauaaaaaacgcauuacuaucaacaaacaaagcaguaguaucacuaucaaacggagucucugucuuaaccuuuaaaguauuagauuuaaaaaacuacauagacaaacaacuauuaccaauucuaaauaaacaaucauguucuauaccaaauauagaaacaguaauagaauuucaacaaaaaaacaaccgauuacuagaaaucacaagagaauuuucugucaacgccggcguaaccaccccagucucaacauauaugcuaacaaauagugaacucuuauccuuaauaaacgacaugccaauaacaaaugaccaaaaaaaauuaauguccaauaacguacaaauagucagacaacagucauacucaauaauguguaucaucaaagaagaaguauuagcauacguaguucaacuaccccuauacggcguaauagacacaccauguuggaaacuacacacaucacccuuaugcacaaccaauaccaaagaaggaucuaacauaugccuaaccagaacagacagaggcugguacugcgacaacgcagguucagucucauucuucccacaagccgaaacaugcaaaguccaauccaacagaguauuuugcgacacuaugaacucacuaacucuaccuucagaagucaaccuuuguaacauagacauauuuaacccaaaauacgauuguaaaauaaugaccagcaaaacagacgucucaucaagcguaauaacaucacuuggcgcaauagucuccugcuacggaaaaacaaaaugcacagcauccaacaaaaacagaggcaucauaaaaaccuucuccaacggcugcgacuauguaagcaacaaaggugucgauacaguaucaguaggaaacacacuauacugcguaaacaaacaagaaggacaaucacucuacguaaaaggugaaccaaucauaaacuucuacgacccauuaguuuucccaucagacgaauuugaugccuccauaucacaaguaaaugaaaaaauaaaucaaucccuagcauucauacgaaaaucugaugaauuacuucacaaugucaacgucggaaaaucaaccacuaacauaaugauaacaacaauuauaauaguaauaauaguaauacuccuacuauuaauagccgucggucuuuuccuauacugcaaagcacgauaaggacuaguaauaaggaaacuguaugaaugucugugggcaggaagugaagagauccuucuguaaagguuuuuggaauuaugucugcugaauaauaaacuuuuuugaaauaauaaaucugguagaaaaaugagaucuaaaaaaaaaaaaaaaaaaaaaaaaaaaaaaaaaaaaaaaaaaaaaaaaaaaaaaaaaaaaaaaaugcaucccccccccccccccccccccccccccccccaaaggcucuuuucagagccaccagaauu

SEQ ID NO: 16057 - RNA, 1904 nt, Artificial Sequence
  mRNA product Design g-2 comprising derived and/or modified sequence from HRSV(Memphis-37)__AIY60640.1__F-del_DSCav1_mut3 (opt11)
gggagaguccgcucagccagguugcagaagcggcuuagcguguguccuaaucuucucucugcguguagguaggccugugccgcaaacaagcuuaccauggaacuacccauccucaaaaccaacgccaucaccacaauccuagcugccgucacccuaugcuucgcaagcagccaaaacaucacagaagaauuuuaccaaucaaccugcuccgccgucuccaaaggguaccuaggugcccuccgcaccggcugguacacgucugucauaaccaucgaacucuccaacaucaaagaaaucaaauguaacggaacagacgcaaaagucaaacuaaucaaacaagaacuagacaaauacaaaaacgccguaaccgaccuccaacugcucaugcaauccacccccgcugccggcuccgggagcgcaaucugcucuggaaucgccguaugcaaaguccuccaccucgaaggagaaguaaacaaaaucaaaaacgcgcuccucaguaccaacaaagccgucgucucucuaucaaacggcguaucgguccucaccuucaaaguccucgaccuaaagaacuacauagacaaacaacuccuccccauccuaaacaaacaauccugcucaaucccaaacaucgaaaccgugaucgaguuccaacagaaaaacaaccgccuacucgaaaucacccgagaguucucagucaacgcaggagucaccacccccgucucaacauacaugcuuaccaacagcgaacuccuaucccucaucaacgacaugccaaucacaaacgaccaaaagaaacucaugagcaacaacguccagaucguaagacaacaaagcuacagcaucaugugcaucaucaaagaagaaguacuagcauacgucguccaacucccccucuacggcgucaucgacacccccugcuggaaacuccacaccucaccccucugcacaaccaacaccaaagaaggcuccaauaucugccucacacgcaccgaccgcggcugguacugcgacaacgccggcuccgucuccuucuucccucaagccgaaaccugcaaaguccaguccaacagagucuucugcgacaccaugaacucccuaacacuuccaucagaagucaaccuuuguaacaucgacaucuucaaucccaaauacgacuguaaaauaaugaccucaaaaacugacgugucaagcucaguuaucaccucccuaggggccaucgucuccugcuacggcaaaacaaaaugcaccgcauccaacaaaaaucgcggaaucaucaaaacauucuccaacggaugcgacuacgucucaaacaagggaguagauaccguaagcguuggcaacacccucuacugcguaaacaaacaagaaggccaaucacucuacgucaaaggcgaacccauaaucaacuucuacgacccccucgucuucccuuccgaugaguucgacgccagcaucucccaagucaacgagaaaauaaaccagucacucgcauucauccgcaaaagcgacgaacuccuccacaacguaaacguaggcaaauccacaaccaauaucaugauaaccacaaucaucaucgugaucaucgucauccuccuccuccucauagcugucggacucuuccucuacuguaaagcacgcugaggacuaguaauaaggaaacuguaugaaugucugugggcaggaagugaagagauccuucuguaaagguuuuuggaauuaugucugcugaauaauaaacuuuuuugaaauaauaaaucugguagaaaaaugagaucuaaaaaaaaaaaaaaaaaaaaaaaaaaaaaaaaaaaaaaaaaaaaaaaaaaaaaaaaaaaaaaaaugcaucccccccccccccccccccccccccccccccaaaggcucuuuucagagccaccagaauu

SEQ ID NO: 16058 - RNA, 2136 nt, Artificial Sequence
  mRNA product Design g-3 comprising derived and/or modified sequence from HRSV(Memphis-37)__AIY60640.1__F-del_DSCav1_mut3 (opt1)
gggagaguccgcucagccagguugcagaagcggcuuagcguguguccuaaucuucucucugcguguagguaggccugugccgcaaacaagcuuaccauggagcugcccauccucaagaccaacgccaucaccacgauccuggccgcggugacccugugcuucgccagcucccagaacaucaccgaggaguucuaccagagcacgugcuccgccgucagcaagggcuaccucggcgcccugcgcaccgggugguacaccagcgugaucaccaucgagcuguccaacaucaaggagaucaagugcaacggcaccgacgccaaggugaagcucaucaagcaggagcuggacaaguacaagaacgcggucacggaccugcagcuccugaugcagagcaccccggccgccggcuccgggagcgcgaucugcuccggcaucgccgucugcaaggugcugcaccucgagggcgaggugaacaagaucaagaacgcccugcuguccaccaacaaggccgucgugagccucuccaacggggugagcguccugaccuucaaggugcuggaccucaagaacuacaucgacaagcagcugcugcccauccugaacaagcagagcugcuccauccccaacaucgagaccgucaucgaguuccagcagaagaacaaccgccuccuggagaucacgcgggaguucagcgugaacgcgggcgugaccacccccgucuccaccuacaugcugacgaacagcgagcuccugucccugaucaacgacaugccgaucaccaacgaccagaagaagcucaugagcaacaacgugcagaucgugcgccagcaguccuacagcaucaugugcaucaucaaggaggagguccuggccuacguggugcagcugccccucuacggggucaucgacacccccugcuggaagcugcacaccagcccccugugcacgaccaacaccaaggagggcuccaacaucugccucacccggacggaccgcgggugguacugcgacaacgccggcagcguguccuucuucccgcaggccgagaccugcaagguccagagcaaccggguguucugcgacaccaugaacucccugacccugcccagcgaggugaaccucugcaacaucgacaucuucaaccccaaguacgacugcaagaucaugacguccaagaccgacgucagcuccagcgugaucaccucccugggcgccaucgugagcugcuacgggaagaccaagugcacggcgagcaacaagaaccgcggcaucaucaagaccuucuccaacgggugcgacuacgucagcaacaagggcguggacaccguguccgucggcaacacccuguacugcgugaacaagcaggagggccagagccucuacgugaagggggagcccaucaucaacuucuacgacccgcuggucuuccccuccgacgaguucgacgccagcaucucccaggugaacgagaagaucaaccagagccuggccuucauccggaaguccgacgagcuccugcacaacgugaacgucggcaagagcaccacgaacaucaugaucaccaccaucaucaucgugaucaucgugauccugcugcuccugaucgccgucgggcuguuccucuacugcaaggcccgcugaggacuagugaagggaacacccaaauuuaauucagccuuaagcacaauuaauuaagagugaaacguaauuguacaagcaguuggucacccaccauagggcaugaucaacaccgcaaccuuuccuuuuucccccagugauucugaaaaaccccucuucccuucagcuugcuuagauguuccaaauuuaguaagcuuaaggcggccuacagaagaaaaagaaaaaaaaggccacaaaaguucccucucacuuucaguaaauaaaauaaaagcagcaacagaaauaaagaaauaaaugaaauucaaaaugaaauaaauauuguguugugcagcauuaaaaaaucaauaaaaauuaaaaaugagcaagaucuaaaaaaaaaaaaaaaaaaaaaaaaaaaaaaaaaaaaaaaaaaaaaaaaaaaaaaaaaaaaaaaaugcaucccccccccccccccccccccccccccccccaaaggcucuuuucagagccaccagaauu

SEQ ID NO: 16059 - RNA, 2136 nt, Artificial Sequence
  mRNA product Design g-3 comprising derived and/or modified sequence from HRSV(Memphis-37)__AIY60640.1__F-del_DSCav1_mut3 (opt1)
gggagaguccgcucagccagguugcagaagcggcuuagcguguguccuaaucuucucucugcguguagguaggccugugccgcaaacaagcuuaccauggagcugcccauccucaagaccaacgccaucaccacgauccuggccgcggugacccugugcuucgccagcucccagaacaucaccgaggaguucuaccagagcacgugcuccgccgucagcaagggcuaccucggggcccugcgcaccggcugguacaccuccgugaucaccaucgagcugagcaacaucaaggagaucaagugcaacgggaccgacgccaaggugaagcucaucaagcaggagcuggacaaguacaagaacgcggucacggaccugcagcuccugaugcaguccaccccggccgccggcagcggguccgccaucugcagcggcaucgcggugugcaaggugcugcaccucgagggcgaggucaacaagaucaagaacgcccugcuguccaccaacaaggccguggugagccucuccaacggggucagcgugcugaccuucaaggugcuggaccucaagaacuacaucgacaagcagcugcugcccauccucaacaagcaguccugcagcauccccaacaucgagacggucaucgaguuccagcagaagaacaaccggcugcuggagaucacccgcgaguucuccgugaacgccggcgugaccacccccgucagcacguacaugcucaccaacuccgagcugcugagccucaucaacgacaugccgaucaccaacgaccagaagaagcugaugagcaacaacgugcagaucgugcggcagcaguccuacagcaucaugugcaucaucaaggaggagguccuggccuacguggugcagcucccccuguacggggucaucgacacccccugcuggaagcugcacacgagcccccucugcaccaccaacaccaaggagggcuccaacaucugccugacgcgcaccgaccgggggugguacugcgacaacgcgggcuccgugagcuucuucccgcaggccgagaccugcaaggugcaguccaaccgcgucuucugcgacaccaugaacagccugacgcuccccuccgaggugaaccugugcaacaucgacaucuucaaccccaaguacgacugcaagaucaugaccagcaagaccgacgucuccagcuccgugaucaccagccugggcgccaucguguccugcuacgggaagacgaagugcaccgccagcaacaagaaccggggcaucaucaagaccuucuccaacgggugcgacuacgucagcaacaagggcguggacaccguguccgucggcaacacgcucuacugcgugaacaagcaggaggggcagagccuguacgugaagggcgagcccaucaucaacuucuacgacccgcuggucuuccccagcgacgaguucgacgccuccaucagccaggugaacgagaagaucaaccagucccucgcguucauccgcaagagcgacgagcugcugcacaacgugaacgucgggaaguccaccaccaacaucaugaucaccaccaucaucaucgugaucaucgugauccuccugcugcucaucgccgucggccuguuccuguacugcaaggcccggugaggacuagugaagggaacacccaaauuuaauucagccuuaagcacaauuaauuaagagugaaacguaauuguacaagcaguuggucacccaccauagggcaugaucaacaccgcaaccuuuccuuuuucccccagugauucugaaaaaccccucuucccuucagcuugcuuagauguuccaaauuuaguaagcuuaaggcggccuacagaagaaaaagaaaaaaaaggccacaaaaguucccucucacuuucaguaaauaaaauaaaagcagcaacagaaauaaagaaauaaaugaaauucaaaaugaaauaaauauuguguugugcagcauuaaaaaaucaauaaaaauuaaaaaugagcaagaucuaaaaaaaaaaaaaaaaaaaaaaaaaaaaaaaaaaaaaaaaaaaaaaaaaaaaaaaaaaaaaaaaugcaucccccccccccccccccccccccccccccccaaaggcucuuuucagagccaccagaauu

SEQ ID NO: 16060 - RNA, 2136 nt, Artificial Sequence
  mRNA product Design g-3 comprising derived and/or modified sequence from HRSV(Memphis-37)__AIY60640.1__F-del_DSCav1_mut3 (opt2)
gggagaguccgcucagccagguugcagaagcggcuuagcguguguccuaaucuucucucugcguguagguaggccugugccgcaaacaagcuuaccauggagcuccccauccucaagaccaacgccaucaccaccauccucgccgccgucacccucugcuucgccuccucccagaacaucaccgaggaguucuaccaguccaccugcuccgccgucuccaagggcuaccucggcgcccuccgcaccggcugguacaccuccgucaucaccaucgagcucuccaacaucaaggagaucaagugcaacggcaccgacgccaaggucaagcucaucaagcaggagcucgacaaguacaagaacgccgucaccgaccuccagcuccucaugcaguccacccccgccgccggcuccggcuccgccaucugcuccggcaucgccgucugcaagguccuccaccucgagggcgaggucaacaagaucaagaacgcccuccucuccaccaacaaggccgucgucucccucuccaacggcgucuccguccucaccuucaagguccucgaccucaagaacuacaucgacaagcagcuccuccccauccucaacaagcaguccugcuccauccccaacaucgagaccgucaucgaguuccagcagaagaacaaccgccuccucgagaucacccgcgaguucuccgucaacgccggcgucaccacccccgucuccaccuacaugcucaccaacuccgagcuccucucccucaucaacgacaugcccaucaccaacgaccagaagaagcucauguccaacaacguccagaucguccgccagcaguccuacuccaucaugugcaucaucaaggaggagguccucgccuacgucguccagcucccccucuacggcgucaucgacacccccugcuggaagcuccacaccuccccccucugcaccaccaacaccaaggagggcuccaacaucugccucacccgcaccgaccgcggcugguacugcgacaacgccggcuccgucuccuucuucccccaggccgagaccugcaagguccaguccaaccgcgucuucugcgacaccaugaacucccucacccuccccuccgaggucaaccucugcaacaucgacaucuucaaccccaaguacgacugcaagaucaugaccuccaagaccgacgucuccuccuccgucaucaccucccucggcgccaucgucuccugcuacggcaagaccaagugcaccgccuccaacaagaaccgcggcaucaucaagaccuucuccaacggcugcgacuacgucuccaacaagggcgucgacaccgucuccgucggcaacacccucuacugcgucaacaagcaggagggccagucccucuacgucaagggcgagcccaucaucaacuucuacgacccccucgucuuccccuccgacgaguucgacgccuccaucucccaggucaacgagaagaucaaccagucccucgccuucauccgcaaguccgacgagcuccuccacaacgucaacgucggcaaguccaccaccaacaucaugaucaccaccaucaucaucgucaucaucgucauccuccuccuccucaucgccgucggccucuuccucuacugcaaggcccgcugaggacuagugaagggaacacccaaauuuaauucagccuuaagcacaauuaauuaagagugaaacguaauuguacaagcaguuggucacccaccauagggcaugaucaacaccgcaaccuuuccuuuuucccccagugauucugaaaaaccccucuucccuucagcuugcuuagauguuccaaauuuaguaagcuuaaggcggccuacagaagaaaaagaaaaaaaaggccacaaaaguucccucucacuuucaguaaauaaaauaaaagcagcaacagaaauaaagaaauaaaugaaauucaaaaugaaauaaauauuguguugugcagcauuaaaaaaucaauaaaaauuaaaaaugagcaagaucuaaaaaaaaaaaaaaaaaaaaaaaaaaaaaaaaaaaaaaaaaaaaaaaaaaaaaaaaaaaaaaaaugcaucccccccccccccccccccccccccccccccaaaggcucuuuucagagccaccagaauu

SEQ ID NO: 16061 - RNA, 2136 nt, Artificial Sequence
  mRNA product Design g-3 comprising derived and/or modified sequence from HRSV(Memphis-37)__AIY60640.1__F-del_DSCav1_mut3 (opt3)
gggagaguccgcucagccagguugcagaagcggcuuagcguguguccuaaucuucucucugcguguagguaggccugugccgcaaacaagcuuaccauggagcugcccauccucaagaccaacgccauuacaacuauacuugcugcagugacgcugugcuucgccagcucccagaauaucaccgaagaguuuuaccaaucuacauguucagcggucaguaaaggcuauuugggggcuuuaagaacuggaugguacaccagcguuauuacaaucgaacuguccaacauuaaggagaucaaaugcaaugguaccgacgccaaggugaaacuaauaaagcaggaacucgauaaguauaaaaacgcaguaacugaccugcagcuucugaugcagucuacuccugccgcuggcucggggucagcaaucuguagcggaauugccgugugcaaggucuugcaccucgagggcgaggugaauaaaaucaagaacgcucugcugaguaccaauaaagccguugugucccucucuaacggugucagcguguuaacguucaagguacuggaucuuaagaauuacauugacaaacaauugcugccaauccuaaacaagcaguccuguucaauaccgaauauugaaacuguuaucgaguuucagcagaaaaacaauaggcuccuggaaauuacccgggaguucagugugaacgcgggggucacaacucccgugagcaccuauaugcuuacaaauucugagcuguugucccucaucaacgauaugccuaucaccaacgaccaaaagaaacugaugucaaauaacgugcagauuguccgccagcagagcuacaguauaaugugcaucauuaaggaagagguuuuagcauaugugguacaacugccacucuacggagugaucgauacgcccuguuggaaacuucauacuucuccucugugcacaaccaauacuaaggaaggcuccaacauauguuugacacgaaccgaccguggcugguacugcgauaaugccgggagcgucucguuuuucccacaggcugagacguguaaggugcagucuaacagaguuuucugcgacaccaugaacucccuaacacugcccucagaagugaaucucugcaauauugauaucuucaacccuaaauaugacuguaagaucaugacaaguaaaaccgaugucagcuccucugugauuacaagccugggagccaucguaucaugcuacgguaagacuaaauguaccgcaaguaauaagaacaggggcauuauaaagacauuuuccaaugggugcgacuauguuagcaacaaaggaguggacaccgucucugugggcaauacucuuuacugugucaacaagcaagagggucagucacuguaugugaaaggggagccaaucauuaacuucuacgauccguugguuuuucccagugacgaauuugaugcuagcaucucccaggugaaugagaagaucaaccagucucucgccuuuauucggaaaucggacgaacuguuacacaauguaaacgucggaaagagcacgacaaauauaaugaucaccacuauuaucauugugaucauaguuauccugcuacuccugauugcggugggccuuuucuuguauugcaaggcccgcugaggacuagugaagggaacacccaaauuuaauucagccuuaagcacaauuaauuaagagugaaacguaauuguacaagcaguuggucacccaccauagggcaugaucaacaccgcaaccuuuccuuuuucccccagugauucugaaaaaccccucuucccuucagcuugcuuagauguuccaaauuuaguaagcuuaaggcggccuacagaagaaaaagaaaaaaaaggccacaaaaguucccucucacuuucaguaaauaaaauaaaagcagcaacagaaauaaagaaauaaaugaaauucaaaaugaaauaaauauuguguugugcagcauuaaaaaaucaauaaaaauuaaaaaugagcaagaucuaaaaaaaaaaaaaaaaaaaaaaaaaaaaaaaaaaaaaaaaaaaaaaaaaaaaaaaaaaaaaaaaugcaucccccccccccccccccccccccccccccccaaaggcucuuuucagagccaccagaauu

SEQ ID NO: 16062 - RNA, 2136 nt, Artificial Sequence
  mRNA product Design g-3 comprising derived and/or modified sequence from HRSV(Memphis-37)__AIY60640.1__F-del_DSCav1_mut3 (opt4)
gggagaguccgcucagccagguugcagaagcggcuuagcguguguccuaaucuucucucugcguguagguaggccugugccgcaaacaagcuuaccauggagcugcccauccugaagaccaacgccaucaccaccauccuggccgccgugacccugugcuucgccagcagccagaacaucaccgaggaguucuaccagagcaccugcagcgccgugagcaagggcuaccugggcgcccugagaaccggcugguacaccagcgugaucaccaucgagcugagcaacaucaaggagaucaagugcaacggcaccgacgccaaggugaagcugaucaagcaggagcuggacaaguacaagaacgccgugaccgaccugcagcugcugaugcagagcacccccgccgccggcagcggcagcgccaucugcagcggcaucgccgugugcaaggugcugcaccuggagggcgaggugaacaagaucaagaacgcccugcugagcaccaacaaggccguggugagccugagcaacggcgugagcgugcugaccuucaaggugcuggaccugaagaacuacaucgacaagcagcugcugcccauccugaacaagcagagcugcagcauccccaacaucgagaccgugaucgaguuccagcagaagaacaacagacugcuggagaucaccagagaguucagcgugaacgccggcgugaccacccccgugagcaccuacaugcugaccaacagcgagcugcugagccugaucaacgacaugcccaucaccaacgaccagaagaagcugaugagcaacaacgugcagaucgugagacagcagagcuacagcaucaugugcaucaucaaggaggaggugcuggccuacguggugcagcugccccuguacggcgugaucgacacccccugcuggaagcugcacaccagcccccugugcaccaccaacaccaaggagggcagcaacaucugccugaccagaaccgacagaggcugguacugcgacaacgccggcagcgugagcuucuucccccaggccgagaccugcaaggugcagagcaacagaguguucugcgacaccaugaacagccugacccugcccagcgaggugaaccugugcaacaucgacaucuucaaccccaaguacgacugcaagaucaugaccagcaagaccgacgugagcagcagcgugaucaccagccugggcgccaucgugagcugcuacggcaagaccaagugcaccgccagcaacaagaacagaggcaucaucaagaccuucagcaacggcugcgacuacgugagcaacaagggcguggacaccgugagcgugggcaacacccuguacugcgugaacaagcaggagggccagagccuguacgugaagggcgagcccaucaucaacuucuacgacccccugguguuccccagcgacgaguucgacgccagcaucagccaggugaacgagaagaucaaccagagccuggccuucaucagaaagagcgacgagcugcugcacaacgugaacgugggcaagagcaccaccaacaucaugaucaccaccaucaucaucgugaucaucgugauccugcugcugcugaucgccgugggccuguuccuguacugcaaggccagaugaggacuagugaagggaacacccaaauuuaauucagccuuaagcacaauuaauuaagagugaaacguaauuguacaagcaguuggucacccaccauagggcaugaucaacaccgcaaccuuuccuuuuucccccagugauucugaaaaaccccucuucccuucagcuugcuuagauguuccaaauuuaguaagcuuaaggcggccuacagaagaaaaagaaaaaaaaggccacaaaaguucccucucacuuucaguaaauaaaauaaaagcagcaacagaaauaaagaaauaaaugaaauucaaaaugaaauaaauauuguguugugcagcauuaaaaaaucaauaaaaauuaaaaaugagcaagaucuaaaaaaaaaaaaaaaaaaaaaaaaaaaaaaaaaaaaaaaaaaaaaaaaaaaaaaaaaaaaaaaaugcaucccccccccccccccccccccccccccccccaaaggcucuuuucagagccaccagaauu

SEQ ID NO: 16063 - RNA, 2136 nt, Artificial Sequence
  mRNA product Design g-3 comprising derived and/or modified sequence from HRSV(Memphis-37)__AIY60640.1__F-del_DSCav1_mut3 (opt5)
gggagaguccgcucagccagguugcagaagcggcuuagcguguguccuaaucuucucucugcguguagguaggccugugccgcaaacaagcuuaccauggagcugcccauccucaagaccaacgccauuacaacgauccuggcugccgugacccuuugcuucgcgagcucccagaauauuacagaagaguuuuaccaaucuaccuguagcgcugucuccaaaggcuaucugggggcccucagaacaggaugguacaccucuguuaucacaauugaacugagcaacaucaaggagaucaaaugcaauggcaccgacgccaaggugaaacuuauuaagcaggaacuggauaaguauaaaaacgcugugacggaccuccagcugcugaugcaguccaccccugccgcugggucuggaagcgccaucuguuccggcauugcggucugcaaggugcuccaccuggagggggagguuaauaaaaucaagaacgcccuucugagcacaaauaaagcuguggucucucucuccaacggagugagcguucugaccuucaaggugcuugaucugaagaauuacauugacaaacaacuccugccgauccugaacaagcagucuuguuccauucccaauaucgaaacagucaucgaguuucagcagaaaaacaaucggcuccuggaaauuacccgcgaguucagcgugaacgccggcgugacgacaccugucucuaccuauaugcuuacaaauuccgagcugcucagccugaucaacgauaugcccauuaccaacgaccaaaagaaacuuauguccaauaacguucagaucgugagacagcagucuuacagcauuaugugcaucaucaaggaagaggugcuggcuuaugucgugcaacucccucuguacggcguuauugauacccccuguuggaaacugcauacauccccucucugcacgaccaauacaaaggaagggagcaacaucugucugacccggacagaccgcggaugguacugcgauaaugccggcucuguguccuuuuucccgcaggcggagaccuguaagguccagagcaacagaguguuuugcgacacgaugaacucucuuacacugcccagcgaaguuaaucucugcaauauugauaucuucaacccuaaauaugacuguaagauuaugaccuccaaaaccgaugugucuagcuccgucaucacaagccugggggccaucgugucuugcuacggaaagaccaaauguacagcuuccaauaagaaccggggcauuaucaagacguuuagcaaugggugcgacuaugucucuaacaaaggaguggacaccguuuccgugggcaauacacuuuacugugucaacaagcaagagggccagagccuguaugugaaaggggagcccauuaucaacuucuacgauccucucguuuuucccuccgacgaguucgaugccucuauuagccaggugaaugaaaagaucaaccagucccuggcuuuuauucgcaaaucugacgaacugcuccacaaugucaacgugggaaagagcaccacaaauaucaugaucaccacgauuaucauugugaucauuguuauccugcuucugcucaucgccgucggccuguuccuguauugcaaggccagaugaggacuagugaagggaacacccaaauuuaauucagccuuaagcacaauuaauuaagagugaaacguaauuguacaagcaguuggucacccaccauagggcaugaucaacaccgcaaccuuuccuuuuucccccagugauucugaaaaaccccucuucccuucagcuugcuuagauguuccaaauuuaguaagcuuaaggcggccuacagaagaaaaagaaaaaaaaggccacaaaaguucccucucacuuucaguaaauaaaauaaaagcagcaacagaaauaaagaaauaaaugaaauucaaaaugaaauaaauauuguguugugcagcauuaaaaaaucaauaaaaauuaaaaaugagcaagaucuaaaaaaaaaaaaaaaaaaaaaaaaaaaaaaaaaaaaaaaaaaaaaaaaaaaaaaaaaaaaaaaaugcaucccccccccccccccccccccccccccccccaaaggcucuuuucagagccaccagaauu

SEQ ID NO: 16064 - RNA, 2136 nt, Artificial Sequence
  mRNA product Design g-3 comprising derived and/or modified sequence from HRSV(Memphis-37)__AIY60640.1__F-del_DSCav1_mut3 (opt6)
gggagaguccgcucagccagguugcagaagcggcuuagcguguguccuaaucuucucucugcguguagguaggccugugccgcaaacaagcuuaccauggaacuacccauccuaaaaacaaaugccauaaccacaauacucgccgcuguaacacuauguuucgcuaguucacaaaacauuacagaagaauuuuaccaauccacaugcucagcaguaucaaaaggauaccuaggugcacuaagaacaggaugguacacaagcguaauuacaauagaauuauccaauauuaaagaaauaaaauguaacggcacugacgcuaaaguaaaauuaaucaaacaagaacuagacaaauacaaaaacgcaguaacagaccuacaauuacucaugcaauccacacccgcagcaggaucaggcucagccauaugcucagguauagcaguaugcaaaguacuccaccuugaaggagaaguaaacaaaauaaaaaacgcauuacuaucaacaaacaaagcaguaguaucacuaucaaacggagucucugucuuaaccuuuaaaguauuagauuuaaaaaacuacauagacaaacaacuauuaccaauucuaaauaaacaaucauguucuauaccaaauauagaaacaguaauagaauuucaacaaaaaaacaaccgauuacuagaaaucacaagagaauuuucugucaacgccggcguaaccaccccagucucaacauauaugcuaacaaauagugaacucuuauccuuaauaaacgacaugccaauaacaaaugaccaaaaaaaauuaauguccaauaacguacaaauagucagacaacagucauacucaauaauguguaucaucaaagaagaaguauuagcauacguaguucaacuaccccuauacggcguaauagacacaccauguuggaaacuacacacaucacccuuaugcacaaccaauaccaaagaaggaucuaacauaugccuaaccagaacagacagaggcugguacugcgacaacgcagguucagucucauucuucccacaagccgaaacaugcaaaguccaauccaacagaguauuuugcgacacuaugaacucacuaacucuaccuucagaagucaaccuuuguaacauagacauauuuaacccaaaauacgauuguaaaauaaugaccagcaaaacagacgucucaucaagcguaauaacaucacuuggcgcaauagucuccugcuacggaaaaacaaaaugcacagcauccaacaaaaacagaggcaucauaaaaaccuucuccaacggcugcgacuauguaagcaacaaaggugucgauacaguaucaguaggaaacacacuauacugcguaaacaaacaagaaggacaaucacucuacguaaaaggugaaccaaucauaaacuucuacgacccauuaguuuucccaucagacgaauuugaugccuccauaucacaaguaaaugaaaaaauaaaucaaucccuagcauucauacgaaaaucugaugaauuacuucacaaugucaacgucggaaaaucaaccacuaacauaaugauaacaacaauuauaauaguaauaauaguaauacuccuacuauuaauagccgucggucuuuuccuauacugcaaagcacgauaaggacuagugaagggaacacccaaauuuaauucagccuuaagcacaauuaauuaagagugaaacguaauuguacaagcaguuggucacccaccauagggcaugaucaacaccgcaaccuuuccuuuuucccccagugauucugaaaaaccccucuucccuucagcuugcuuagauguuccaaauuuaguaagcuuaaggcggccuacagaagaaaaagaaaaaaaaggccacaaaaguucccucucacuuucaguaaauaaaauaaaagcagcaacagaaauaaagaaauaaaugaaauucaaaaugaaauaaauauuguguugugcagcauuaaaaaaucaauaaaaauuaaaaaugagcaagaucuaaaaaaaaaaaaaaaaaaaaaaaaaaaaaaaaaaaaaaaaaaaaaaaaaaaaaaaaaaaaaaaaugcaucccccccccccccccccccccccccccccccaaaggcucuuuucagagccaccagaauu

SEQ ID NO: 16065 - RNA, 2136 nt, Artificial Sequence
  mRNA product Design g-3 comprising derived and/or modified sequence from HRSV(Memphis-37)__AIY60640.1__F-del_DSCav1_mut3 (opt11)
gggagaguccgcucagccagguugcagaagcggcuuagcguguguccuaaucuucucucugcguguagguaggccugugccgcaaacaagcuuaccauggaacuacccauccucaaaaccaacgccaucaccacaauccuagcugccgucacccuaugcuucgcaagcagccaaaacaucacagaagaauuuuaccaaucaaccugcuccgccgucuccaaaggguaccuaggugcccuccgcaccggcugguacacgucugucauaaccaucgaacucuccaacaucaaagaaaucaaauguaacggaacagacgcaaaagucaaacuaaucaaacaagaacuagacaaauacaaaaacgccguaaccgaccuccaacugcucaugcaauccacccccgcugccggcuccgggagcgcaaucugcucuggaaucgccguaugcaaaguccuccaccucgaaggagaaguaaacaaaaucaaaaacgcgcuccucaguaccaacaaagccgucgucucucuaucaaacggcguaucgguccucaccuucaaaguccucgaccuaaagaacuacauagacaaacaacuccuccccauccuaaacaaacaauccugcucaaucccaaacaucgaaaccgugaucgaguuccaacagaaaaacaaccgccuacucgaaaucacccgagaguucucagucaacgcaggagucaccacccccgucucaacauacaugcuuaccaacagcgaacuccuaucccucaucaacgacaugccaaucacaaacgaccaaaagaaacucaugagcaacaacguccagaucguaagacaacaaagcuacagcaucaugugcaucaucaaagaagaaguacuagcauacgucguccaacucccccucuacggcgucaucgacacccccugcuggaaacuccacaccucaccccucugcacaaccaacaccaaagaaggcuccaauaucugccucacacgcaccgaccgcggcugguacugcgacaacgccggcuccgucuccuucuucccucaagccgaaaccugcaaaguccaguccaacagagucuucugcgacaccaugaacucccuaacacuuccaucagaagucaaccuuuguaacaucgacaucuucaaucccaaauacgacuguaaaauaaugaccucaaaaacugacgugucaagcucaguuaucaccucccuaggggccaucgucuccugcuacggcaaaacaaaaugcaccgcauccaacaaaaaucgcggaaucaucaaaacauucuccaacggaugcgacuacgucucaaacaagggaguagauaccguaagcguuggcaacacccucuacugcguaaacaaacaagaaggccaaucacucuacgucaaaggcgaacccauaaucaacuucuacgacccccucgucuucccuuccgaugaguucgacgccagcaucucccaagucaacgagaaaauaaaccagucacucgcauucauccgcaaaagcgacgaacuccuccacaacguaaacguaggcaaauccacaaccaauaucaugauaaccacaaucaucaucgugaucaucgucauccuccuccuccucauagcugucggacucuuccucuacuguaaagcacgcugaggacuagugaagggaacacccaaauuuaauucagccuuaagcacaauuaauuaagagugaaacguaauuguacaagcaguuggucacccaccauagggcaugaucaacaccgcaaccuuuccuuuuucccccagugauucugaaaaaccccucuucccuucagcuugcuuagauguuccaaauuuaguaagcuuaaggcggccuacagaagaaaaagaaaaaaaaggccacaaaaguucccucucacuuucaguaaauaaaauaaaagcagcaacagaaauaaagaaauaaaugaaauucaaaaugaaauaaauauuguguugugcagcauuaaaaaaucaauaaaaauuaaaaaugagcaagaucuaaaaaaaaaaaaaaaaaaaaaaaaaaaaaaaaaaaaaaaaaaaaaaaaaaaaaaaaaaaaaaaaugcaucccccccccccccccccccccccccccccccaaaggcucuuuucagagccaccagaauu

SEQ ID NO: 16066 - RNA, 1931 nt, Artificial Sequence
  mRNA product Design g-4 comprising derived and/or modified sequence from HRSV(Memphis-37)__AIY60640.1__F-del_DSCav1_mut3 (opt1)
gggagacuccugucgggcggaaguaggaggaguagaguuuaaaaacaguacucuuuuuccgguucgggacguaguugaagcaacgacaagccggauaaccgcucuugagacaggaagcuuaccauggagcugcccauccucaagaccaacgccaucaccacgauccuggccgcggugacccugugcuucgccagcucccagaacaucaccgaggaguucuaccagagcacgugcuccgccgucagcaagggcuaccucggcgcccugcgcaccgggugguacaccagcgugaucaccaucgagcuguccaacaucaaggagaucaagugcaacggcaccgacgccaaggugaagcucaucaagcaggagcuggacaaguacaagaacgcggucacggaccugcagcuccugaugcagagcaccccggccgccggcuccgggagcgcgaucugcuccggcaucgccgucugcaaggugcugcaccucgagggcgaggugaacaagaucaagaacgcccugcuguccaccaacaaggccgucgugagccucuccaacggggugagcguccugaccuucaaggugcuggaccucaagaacuacaucgacaagcagcugcugcccauccugaacaagcagagcugcuccauccccaacaucgagaccgucaucgaguuccagcagaagaacaaccgccuccuggagaucacgcgggaguucagcgugaacgcgggcgugaccacccccgucuccaccuacaugcugacgaacagcgagcuccugucccugaucaacgacaugccgaucaccaacgaccagaagaagcucaugagcaacaacgugcagaucgugcgccagcaguccuacagcaucaugugcaucaucaaggaggagguccuggccuacguggugcagcugccccucuacggggucaucgacacccccugcuggaagcugcacaccagcccccugugcacgaccaacaccaaggagggcuccaacaucugccucacccggacggaccgcgggugguacugcgacaacgccggcagcguguccuucuucccgcaggccgagaccugcaagguccagagcaaccggguguucugcgacaccaugaacucccugacccugcccagcgaggugaaccucugcaacaucgacaucuucaaccccaaguacgacugcaagaucaugacguccaagaccgacgucagcuccagcgugaucaccucccugggcgccaucgugagcugcuacgggaagaccaagugcacggcgagcaacaagaaccgcggcaucaucaagaccuucuccaacgggugcgacuacgucagcaacaagggcguggacaccguguccgucggcaacacccuguacugcgugaacaagcaggagggccagagccucuacgugaagggggagcccaucaucaacuucuacgacccgcuggucuuccccuccgacgaguucgacgccagcaucucccaggugaacgagaagaucaaccagagccuggccuucauccggaaguccgacgagcuccugcacaacgugaacgucggcaagagcaccacgaacaucaugaucaccaccaucaucaucgugaucaucgugauccugcugcuccugaucgccgucgggcuguuccucuacugcaaggcccgcugaggacuaguaauaaggaaacuguaugaaugucugugggcaggaagugaagagauccuucuguaaagguuuuuggaauuaugucugcugaauaauaaacuuuuuugaaauaauaaaucugguagaaaaaugagaucuaaaaaaaaaaaaaaaaaaaaaaaaaaaaaaaaaaaaaaaaaaaaaaaaaaaaaaaaaaaaaaaaugcaucccccccccccccccccccccccccccccccaaaggcucuuuucagagccaccagaauu

SEQ ID NO: 16067 - RNA, 1931 nt, Artificial Sequence
  mRNA product Design g-4 comprising derived and/or modified sequence from HRSV(Memphis-37)__AIY60640.1__F-del_DSCav1_mut3 (opt1)
gggagacuccugucgggcggaaguaggaggaguagaguuuaaaaacaguacucuuuuuccgguucgggacguaguugaagcaacgacaagccggauaaccgcucuugagacaggaagcuuaccauggagcugcccauccucaagaccaacgccaucaccacgauccuggccgcggugacccugugcuucgccagcucccagaacaucaccgaggaguucuaccagagcacgugcuccgccgucagcaagggcuaccucggggcccugcgcaccggcugguacaccuccgugaucaccaucgagcugagcaacaucaaggagaucaagugcaacgggaccgacgccaaggugaagcucaucaagcaggagcuggacaaguacaagaacgcggucacggaccugcagcuccugaugcaguccaccccggccgccggcagcggguccgccaucugcagcggcaucgcggugugcaaggugcugcaccucgagggcgaggucaacaagaucaagaacgcccugcuguccaccaacaaggccguggugagccucuccaacggggucagcgugcugaccuucaaggugcuggaccucaagaacuacaucgacaagcagcugcugcccauccucaacaagcaguccugcagcauccccaacaucgagacggucaucgaguuccagcagaagaacaaccggcugcuggagaucacccgcgaguucuccgugaacgccggcgugaccacccccgucagcacguacaugcucaccaacuccgagcugcugagccucaucaacgacaugccgaucaccaacgaccagaagaagcugaugagcaacaacgugcagaucgugcggcagcaguccuacagcaucaugugcaucaucaaggaggagguccuggccuacguggugcagcucccccuguacggggucaucgacacccccugcuggaagcugcacacgagcccccucugcaccaccaacaccaaggagggcuccaacaucugccugacgcgcaccgaccgggggugguacugcgacaacgcgggcuccgugagcuucuucccgcaggccgagaccugcaaggugcaguccaaccgcgucuucugcgacaccaugaacagccugacgcuccccuccgaggugaaccugugcaacaucgacaucuucaaccccaaguacgacugcaagaucaugaccagcaagaccgacgucuccagcuccgugaucaccagccugggcgccaucguguccugcuacgggaagacgaagugcaccgccagcaacaagaaccggggcaucaucaagaccuucuccaacgggugcgacuacgucagcaacaagggcguggacaccguguccgucggcaacacgcucuacugcgugaacaagcaggaggggcagagccuguacgugaagggcgagcccaucaucaacuucuacgacccgcuggucuuccccagcgacgaguucgacgccuccaucagccaggugaacgagaagaucaaccagucccucgcguucauccgcaagagcgacgagcugcugcacaacgugaacgucgggaaguccaccaccaacaucaugaucaccaccaucaucaucgugaucaucgugauccuccugcugcucaucgccgucggccuguuccuguacugcaaggcccggugaggacuaguaauaaggaaacuguaugaaugucugugggcaggaagugaagagauccuucuguaaagguuuuuggaauuaugucugcugaauaauaaacuuuuuugaaauaauaaaucugguagaaaaaugagaucuaaaaaaaaaaaaaaaaaaaaaaaaaaaaaaaaaaaaaaaaaaaaaaaaaaaaaaaaaaaaaaaaugcaucccccccccccccccccccccccccccccccaaaggcucuuuucagagccaccagaauu

SEQ ID NO: 16068 - RNA, 1931 nt, Artificial Sequence
  mRNA product Design g-4 comprising derived and/or modified sequence from HRSV(Memphis-37)__AIY60640.1__F-del_DSCav1_mut3 (opt2)
gggagacuccugucgggcggaaguaggaggaguagaguuuaaaaacaguacucuuuuuccgguucgggacguaguugaagcaacgacaagccggauaaccgcucuugagacaggaagcuuaccauggagcuccccauccucaagaccaacgccaucaccaccauccucgccgccgucacccucugcuucgccuccucccagaacaucaccgaggaguucuaccaguccaccugcuccgccgucuccaagggcuaccucggcgcccuccgcaccggcugguacaccuccgucaucaccaucgagcucuccaacaucaaggagaucaagugcaacggcaccgacgccaaggucaagcucaucaagcaggagcucgacaaguacaagaacgccgucaccgaccuccagcuccucaugcaguccacccccgccgccggcuccggcuccgccaucugcuccggcaucgccgucugcaagguccuccaccucgagggcgaggucaacaagaucaagaacgcccuccucuccaccaacaaggccgucgucucccucuccaacggcgucuccguccucaccuucaagguccucgaccucaagaacuacaucgacaagcagcuccuccccauccucaacaagcaguccugcuccauccccaacaucgagaccgucaucgaguuccagcagaagaacaaccgccuccucgagaucacccgcgaguucuccgucaacgccggcgucaccacccccgucuccaccuacaugcucaccaacuccgagcuccucucccucaucaacgacaugcccaucaccaacgaccagaagaagcucauguccaacaacguccagaucguccgccagcaguccuacuccaucaugugcaucaucaaggaggagguccucgccuacgucguccagcucccccucuacggcgucaucgacacccccugcuggaagcuccacaccuccccccucugcaccaccaacaccaaggagggcuccaacaucugccucacccgcaccgaccgcggcugguacugcgacaacgccggcuccgucuccuucuucccccaggccgagaccugcaagguccaguccaaccgcgucuucugcgacaccaugaacucccucacccuccccuccgaggucaaccucugcaacaucgacaucuucaaccccaaguacgacugcaagaucaugaccuccaagaccgacgucuccuccuccgucaucaccucccucggcgccaucgucuccugcuacggcaagaccaagugcaccgccuccaacaagaaccgcggcaucaucaagaccuucuccaacggcugcgacuacgucuccaacaagggcgucgacaccgucuccgucggcaacacccucuacugcgucaacaagcaggagggccagucccucuacgucaagggcgagcccaucaucaacuucuacgacccccucgucuuccccuccgacgaguucgacgccuccaucucccaggucaacgagaagaucaaccagucccucgccuucauccgcaaguccgacgagcuccuccacaacgucaacgucggcaaguccaccaccaacaucaugaucaccaccaucaucaucgucaucaucgucauccuccuccuccucaucgccgucggccucuuccucuacugcaaggcccgcugaggacuaguaauaaggaaacuguaugaaugucugugggcaggaagugaagagauccuucuguaaagguuuuuggaauuaugucugcugaauaauaaacuuuuuugaaauaauaaaucugguagaaaaaugagaucuaaaaaaaaaaaaaaaaaaaaaaaaaaaaaaaaaaaaaaaaaaaaaaaaaaaaaaaaaaaaaaaaugcaucccccccccccccccccccccccccccccccaaaggcucuuuucagagccaccagaauu

SEQ ID NO: 16069 - RNA, 1931 nt, Artificial Sequence
  mRNA product Design g-4 comprising derived and/or modified sequence from HRSV(Memphis-37)__AIY60640.1__F-del_DSCav1_mut3 (opt3)
gggagacuccugucgggcggaaguaggaggaguagaguuuaaaaacaguacucuuuuuccgguucgggacguaguugaagcaacgacaagccggauaaccgcucuugagacaggaagcuuaccauggagcugcccauccucaagaccaacgccauuacaacuauacuugcugcagugacgcugugcuucgccagcucccagaauaucaccgaagaguuuuaccaaucuacauguucagcggucaguaaaggcuauuugggggcuuuaagaacuggaugguacaccagcguuauuacaaucgaacuguccaacauuaaggagaucaaaugcaaugguaccgacgccaaggugaaacuaauaaagcaggaacucgauaaguauaaaaacgcaguaacugaccugcagcuucugaugcagucuacuccugccgcuggcucggggucagcaaucuguagcggaauugccgugugcaaggucuugcaccucgagggcgaggugaauaaaaucaagaacgcucugcugaguaccaauaaagccguugugucccucucuaacggugucagcguguuaacguucaagguacuggaucuuaagaauuacauugacaaacaauugcugccaauccuaaacaagcaguccuguucaauaccgaauauugaaacuguuaucgaguuucagcagaaaaacaauaggcuccuggaaauuacccgggaguucagugugaacgcgggggucacaacucccgugagcaccuauaugcuuacaaauucugagcuguugucccucaucaacgauaugccuaucaccaacgaccaaaagaaacugaugucaaauaacgugcagauuguccgccagcagagcuacaguauaaugugcaucauuaaggaagagguuuuagcauaugugguacaacugccacucuacggagugaucgauacgcccuguuggaaacuucauacuucuccucugugcacaaccaauacuaaggaaggcuccaacauauguuugacacgaaccgaccguggcugguacugcgauaaugccgggagcgucucguuuuucccacaggcugagacguguaaggugcagucuaacagaguuuucugcgacaccaugaacucccuaacacugcccucagaagugaaucucugcaauauugauaucuucaacccuaaauaugacuguaagaucaugacaaguaaaaccgaugucagcuccucugugauuacaagccugggagccaucguaucaugcuacgguaagacuaaauguaccgcaaguaauaagaacaggggcauuauaaagacauuuuccaaugggugcgacuauguuagcaacaaaggaguggacaccgucucugugggcaauacucuuuacugugucaacaagcaagagggucagucacuguaugugaaaggggagccaaucauuaacuucuacgauccguugguuuuucccagugacgaauuugaugcuagcaucucccaggugaaugagaagaucaaccagucucucgccuuuauucggaaaucggacgaacuguuacacaauguaaacgucggaaagagcacgacaaauauaaugaucaccacuauuaucauugugaucauaguuauccugcuacuccugauugcggugggccuuuucuuguauugcaaggcccgcugaggacuaguaauaaggaaacuguaugaaugucugugggcaggaagugaagagauccuucuguaaagguuuuuggaauuaugucugcugaauaauaaacuuuuuugaaauaauaaaucugguagaaaaaugagaucuaaaaaaaaaaaaaaaaaaaaaaaaaaaaaaaaaaaaaaaaaaaaaaaaaaaaaaaaaaaaaaaaugcaucccccccccccccccccccccccccccccccaaaggcucuuuucagagccaccagaauu

SEQ ID NO: 16070 - RNA, 1931 nt, Artificial Sequence
  mRNA product Design g-4 comprising derived and/or modified sequence from HRSV(Memphis-37)__AIY60640.1__F-del_DSCav1_mut3 (opt4)
gggagacuccugucgggcggaaguaggaggaguagaguuuaaaaacaguacucuuuuuccgguucgggacguaguugaagcaacgacaagccggauaaccgcucuugagacaggaagcuuaccauggagcugcccauccugaagaccaacgccaucaccaccauccuggccgccgugacccugugcuucgccagcagccagaacaucaccgaggaguucuaccagagcaccugcagcgccgugagcaagggcuaccugggcgcccugagaaccggcugguacaccagcgugaucaccaucgagcugagcaacaucaaggagaucaagugcaacggcaccgacgccaaggugaagcugaucaagcaggagcuggacaaguacaagaacgccgugaccgaccugcagcugcugaugcagagcacccccgccgccggcagcggcagcgccaucugcagcggcaucgccgugugcaaggugcugcaccuggagggcgaggugaacaagaucaagaacgcccugcugagcaccaacaaggccguggugagccugagcaacggcgugagcgugcugaccuucaaggugcuggaccugaagaacuacaucgacaagcagcugcugcccauccugaacaagcagagcugcagcauccccaacaucgagaccgugaucgaguuccagcagaagaacaacagacugcuggagaucaccagagaguucagcgugaacgccggcgugaccacccccgugagcaccuacaugcugaccaacagcgagcugcugagccugaucaacgacaugcccaucaccaacgaccagaagaagcugaugagcaacaacgugcagaucgugagacagcagagcuacagcaucaugugcaucaucaaggaggaggugcuggccuacguggugcagcugccccuguacggcgugaucgacacccccugcuggaagcugcacaccagcccccugugcaccaccaacaccaaggagggcagcaacaucugccugaccagaaccgacagaggcugguacugcgacaacgccggcagcgugagcuucuucccccaggccgagaccugcaaggugcagagcaacagaguguucugcgacaccaugaacagccugacccugcccagcgaggugaaccugugcaacaucgacaucuucaaccccaaguacgacugcaagaucaugaccagcaagaccgacgugagcagcagcgugaucaccagccugggcgccaucgugagcugcuacggcaagaccaagugcaccgccagcaacaagaacagaggcaucaucaagaccuucagcaacggcugcgacuacgugagcaacaagggcguggacaccgugagcgugggcaacacccuguacugcgugaacaagcaggagggccagagccuguacgugaagggcgagcccaucaucaacuucuacgacccccugguguuccccagcgacgaguucgacgccagcaucagccaggugaacgagaagaucaaccagagccuggccuucaucagaaagagcgacgagcugcugcacaacgugaacgugggcaagagcaccaccaacaucaugaucaccaccaucaucaucgugaucaucgugauccugcugcugcugaucgccgugggccuguuccuguacugcaaggccagaugaggacuaguaauaaggaaacuguaugaaugucugugggcaggaagugaagagauccuucuguaaagguuuuuggaauuaugucugcugaauaauaaacuuuuuugaaauaauaaaucugguagaaaaaugagaucuaaaaaaaaaaaaaaaaaaaaaaaaaaaaaaaaaaaaaaaaaaaaaaaaaaaaaaaaaaaaaaaaugcaucccccccccccccccccccccccccccccccaaaggcucuuuucagagccaccagaauu

SEQ ID NO: 16071 - RNA, 1931 nt, Artificial Sequence
  mRNA product Design g-4 comprising derived and/or modified sequence from HRSV(Memphis-37)__AIY60640.1__F-del_DSCav1_mut3 (opt5)
gggagacuccugucgggcggaaguaggaggaguagaguuuaaaaacaguacucuuuuuccgguucgggacguaguugaagcaacgacaagccggauaaccgcucuugagacaggaagcuuaccauggagcugcccauccucaagaccaacgccauuacaacgauccuggcugccgugacccuuugcuucgcgagcucccagaauauuacagaagaguuuuaccaaucuaccuguagcgcugucuccaaaggcuaucugggggcccucagaacaggaugguacaccucuguuaucacaauugaacugagcaacaucaaggagaucaaaugcaauggcaccgacgccaaggugaaacuuauuaagcaggaacuggauaaguauaaaaacgcugugacggaccuccagcugcugaugcaguccaccccugccgcugggucuggaagcgccaucuguuccggcauugcggucugcaaggugcuccaccuggagggggagguuaauaaaaucaagaacgcccuucugagcacaaauaaagcuguggucucucucuccaacggagugagcguucugaccuucaaggugcuugaucugaagaauuacauugacaaacaacuccugccgauccugaacaagcagucuuguuccauucccaauaucgaaacagucaucgaguuucagcagaaaaacaaucggcuccuggaaauuacccgcgaguucagcgugaacgccggcgugacgacaccugucucuaccuauaugcuuacaaauuccgagcugcucagccugaucaacgauaugcccauuaccaacgaccaaaagaaacuuauguccaauaacguucagaucgugagacagcagucuuacagcauuaugugcaucaucaaggaagaggugcuggcuuaugucgugcaacucccucuguacggcguuauugauacccccuguuggaaacugcauacauccccucucugcacgaccaauacaaaggaagggagcaacaucugucugacccggacagaccgcggaugguacugcgauaaugccggcucuguguccuuuuucccgcaggcggagaccuguaagguccagagcaacagaguguuuugcgacacgaugaacucucuuacacugcccagcgaaguuaaucucugcaauauugauaucuucaacccuaaauaugacuguaagauuaugaccuccaaaaccgaugugucuagcuccgucaucacaagccugggggccaucgugucuugcuacggaaagaccaaauguacagcuuccaauaagaaccggggcauuaucaagacguuuagcaaugggugcgacuaugucucuaacaaaggaguggacaccguuuccgugggcaauacacuuuacugugucaacaagcaagagggccagagccuguaugugaaaggggagcccauuaucaacuucuacgauccucucguuuuucccuccgacgaguucgaugccucuauuagccaggugaaugaaaagaucaaccagucccuggcuuuuauucgcaaaucugacgaacugcuccacaaugucaacgugggaaagagcaccacaaauaucaugaucaccacgauuaucauugugaucauuguuauccugcuucugcucaucgccgucggccuguuccuguauugcaaggccagaugaggacuaguaauaaggaaacuguaugaaugucugugggcaggaagugaagagauccuucuguaaagguuuuuggaauuaugucugcugaauaauaaacuuuuuugaaauaauaaaucugguagaaaaaugagaucuaaaaaaaaaaaaaaaaaaaaaaaaaaaaaaaaaaaaaaaaaaaaaaaaaaaaaaaaaaaaaaaaugcaucccccccccccccccccccccccccccccccaaaggcucuuuucagagccaccagaauu

SEQ ID NO: 16072 - RNA, 1931 nt, Artificial Sequence
  mRNA product Design g-4 comprising derived and/or modified sequence from HRSV(Memphis-37)__AIY60640.1__F-del_DSCav1_mut3 (opt6)
gggagacuccugucgggcggaaguaggaggaguagaguuuaaaaacaguacucuuuuuccgguucgggacguaguugaagcaacgacaagccggauaaccgcucuugagacaggaagcuuaccauggaacuacccauccuaaaaacaaaugccauaaccacaauacucgccgcuguaacacuauguuucgcuaguucacaaaacauuacagaagaauuuuaccaauccacaugcucagcaguaucaaaaggauaccuaggugcacuaagaacaggaugguacacaagcguaauuacaauagaauuauccaauauuaaagaaauaaaauguaacggcacugacgcuaaaguaaaauuaaucaaacaagaacuagacaaauacaaaaacgcaguaacagaccuacaauuacucaugcaauccacacccgcagcaggaucaggcucagccauaugcucagguauagcaguaugcaaaguacuccaccuugaaggagaaguaaacaaaauaaaaaacgcauuacuaucaacaaacaaagcaguaguaucacuaucaaacggagucucugucuuaaccuuuaaaguauuagauuuaaaaaacuacauagacaaacaacuauuaccaauucuaaauaaacaaucauguucuauaccaaauauagaaacaguaauagaauuucaacaaaaaaacaaccgauuacuagaaaucacaagagaauuuucugucaacgccggcguaaccaccccagucucaacauauaugcuaacaaauagugaacucuuauccuuaauaaacgacaugccaauaacaaaugaccaaaaaaaauuaauguccaauaacguacaaauagucagacaacagucauacucaauaauguguaucaucaaagaagaaguauuagcauacguaguucaacuaccccuauacggcguaauagacacaccauguuggaaacuacacacaucacccuuaugcacaaccaauaccaaagaaggaucuaacauaugccuaaccagaacagacagaggcugguacugcgacaacgcagguucagucucauucuucccacaagccgaaacaugcaaaguccaauccaacagaguauuuugcgacacuaugaacucacuaacucuaccuucagaagucaaccuuuguaacauagacauauuuaacccaaaauacgauuguaaaauaaugaccagcaaaacagacgucucaucaagcguaauaacaucacuuggcgcaauagucuccugcuacggaaaaacaaaaugcacagcauccaacaaaaacagaggcaucauaaaaaccuucuccaacggcugcgacuauguaagcaacaaaggugucgauacaguaucaguaggaaacacacuauacugcguaaacaaacaagaaggacaaucacucuacguaaaaggugaaccaaucauaaacuucuacgacccauuaguuuucccaucagacgaauuugaugccuccauaucacaaguaaaugaaaaaauaaaucaaucccuagcauucauacgaaaaucugaugaauuacuucacaaugucaacgucggaaaaucaaccacuaacauaaugauaacaacaauuauaauaguaauaauaguaauacuccuacuauuaauagccgucggucuuuuccuauacugcaaagcacgauaaggacuaguaauaaggaaacuguaugaaugucugugggcaggaagugaagagauccuucuguaaagguuuuuggaauuaugucugcugaauaauaaacuuuuuugaaauaauaaaucugguagaaaaaugagaucuaaaaaaaaaaaaaaaaaaaaaaaaaaaaaaaaaaaaaaaaaaaaaaaaaaaaaaaaaaaaaaaaugcaucccccccccccccccccccccccccccccccaaaggcucuuuucagagccaccagaauu

SEQ ID NO: 16073 - RNA, 1931 nt, Artificial Sequence
  mRNA product Design g-4 comprising derived and/or modified sequence from HRSV(Memphis-37)__AIY60640.1__F-del_DSCav1_mut3 (opt11)
gggagacuccugucgggcggaaguaggaggaguagaguuuaaaaacaguacucuuuuuccgguucgggacguaguugaagcaacgacaagccggauaaccgcucuugagacaggaagcuuaccauggaacuacccauccucaaaaccaacgccaucaccacaauccuagcugccgucacccuaugcuucgcaagcagccaaaacaucacagaagaauuuuaccaaucaaccugcuccgccgucuccaaaggguaccuaggugcccuccgcaccggcugguacacgucugucauaaccaucgaacucuccaacaucaaagaaaucaaauguaacggaacagacgcaaaagucaaacuaaucaaacaagaacuagacaaauacaaaaacgccguaaccgaccuccaacugcucaugcaauccacccccgcugccggcuccgggagcgcaaucugcucuggaaucgccguaugcaaaguccuccaccucgaaggagaaguaaacaaaaucaaaaacgcgcuccucaguaccaacaaagccgucgucucucuaucaaacggcguaucgguccucaccuucaaaguccucgaccuaaagaacuacauagacaaacaacuccuccccauccuaaacaaacaauccugcucaaucccaaacaucgaaaccgugaucgaguuccaacagaaaaacaaccgccuacucgaaaucacccgagaguucucagucaacgcaggagucaccacccccgucucaacauacaugcuuaccaacagcgaacuccuaucccucaucaacgacaugccaaucacaaacgaccaaaagaaacucaugagcaacaacguccagaucguaagacaacaaagcuacagcaucaugugcaucaucaaagaagaaguacuagcauacgucguccaacucccccucuacggcgucaucgacacccccugcuggaaacuccacaccucaccccucugcacaaccaacaccaaagaaggcuccaauaucugccucacacgcaccgaccgcggcugguacugcgacaacgccggcuccgucuccuucuucccucaagccgaaaccugcaaaguccaguccaacagagucuucugcgacaccaugaacucccuaacacuuccaucagaagucaaccuuuguaacaucgacaucuucaaucccaaauacgacuguaaaauaaugaccucaaaaacugacgugucaagcucaguuaucaccucccuaggggccaucgucuccugcuacggcaaaacaaaaugcaccgcauccaacaaaaaucgcggaaucaucaaaacauucuccaacggaugcgacuacgucucaaacaagggaguagauaccguaagcguuggcaacacccucuacugcguaaacaaacaagaaggccaaucacucuacgucaaaggcgaacccauaaucaacuucuacgacccccucgucuucccuuccgaugaguucgacgccagcaucucccaagucaacgagaaaauaaaccagucacucgcauucauccgcaaaagcgacgaacuccuccacaacguaaacguaggcaaauccacaaccaauaucaugauaaccacaaucaucaucgugaucaucgucauccuccuccuccucauagcugucggacucuuccucuacuguaaagcacgcugaggacuaguaauaaggaaacuguaugaaugucugugggcaggaagugaagagauccuucuguaaagguuuuuggaauuaugucugcugaauaauaaacuuuuuugaaauaauaaaucugguagaaaaaugagaucuaaaaaaaaaaaaaaaaaaaaaaaaaaaaaaaaaaaaaaaaaaaaaaaaaaaaaaaaaaaaaaaaugcaucccccccccccccccccccccccccccccccaaaggcucuuuucagagccaccagaauu

SEQ ID NO: 16074 - RNA, 1907 nt, Artificial Sequence
  mRNA product Design g-5 comprising derived and/or modified sequence from HRSV(Memphis-37)__AIY60640.1__F-del_DSCav1_mut3 (opt1)
gggagacccgugacccggaaguuguacggcuacgcgacuuucccucccacaaacccucgcgcccuuccuuuccuacuugggcccggcagaaagcuuaccauggagcugcccauccucaagaccaacgccaucaccacgauccuggccgcggugacccugugcuucgccagcucccagaacaucaccgaggaguucuaccagagcacgugcuccgccgucagcaagggcuaccucggcgcccugcgcaccgggugguacaccagcgugaucaccaucgagcuguccaacaucaaggagaucaagugcaacggcaccgacgccaaggugaagcucaucaagcaggagcuggacaaguacaagaacgcggucacggaccugcagcuccugaugcagagcaccccggccgccggcuccgggagcgcgaucugcuccggcaucgccgucugcaaggugcugcaccucgagggcgaggugaacaagaucaagaacgcccugcuguccaccaacaaggccgucgugagccucuccaacggggugagcguccugaccuucaaggugcuggaccucaagaacuacaucgacaagcagcugcugcccauccugaacaagcagagcugcuccauccccaacaucgagaccgucaucgaguuccagcagaagaacaaccgccuccuggagaucacgcgggaguucagcgugaacgcgggcgugaccacccccgucuccaccuacaugcugacgaacagcgagcuccugucccugaucaacgacaugccgaucaccaacgaccagaagaagcucaugagcaacaacgugcagaucgugcgccagcaguccuacagcaucaugugcaucaucaaggaggagguccuggccuacguggugcagcugccccucuacggggucaucgacacccccugcuggaagcugcacaccagcccccugugcacgaccaacaccaaggagggcuccaacaucugccucacccggacggaccgcgggugguacugcgacaacgccggcagcguguccuucuucccgcaggccgagaccugcaagguccagagcaaccggguguucugcgacaccaugaacucccugacccugcccagcgaggugaaccucugcaacaucgacaucuucaaccccaaguacgacugcaagaucaugacguccaagaccgacgucagcuccagcgugaucaccucccugggcgccaucgugagcugcuacgggaagaccaagugcacggcgagcaacaagaaccgcggcaucaucaagaccuucuccaacgggugcgacuacgucagcaacaagggcguggacaccguguccgucggcaacacccuguacugcgugaacaagcaggagggccagagccucuacgugaagggggagcccaucaucaacuucuacgacccgcuggucuuccccuccgacgaguucgacgccagcaucucccaggugaacgagaagaucaaccagagccuggccuucauccggaaguccgacgagcuccugcacaacgugaacgucggcaagagcaccacgaacaucaugaucaccaccaucaucaucgugaucaucgugauccugcugcuccugaucgccgucgggcuguuccucuacugcaaggcccgcugaggacuaguaauaaggaaacuguaugaaugucugugggcaggaagugaagagauccuucuguaaagguuuuuggaauuaugucugcugaauaauaaacuuuuuugaaauaauaaaucugguagaaaaaugagaucuaaaaaaaaaaaaaaaaaaaaaaaaaaaaaaaaaaaaaaaaaaaaaaaaaaaaaaaaaaaaaaaaugcaucccccccccccccccccccccccccccccccaaaggcucuuuucagagccaccagaauu

SEQ ID NO: 16075 - RNA, 1907 nt, Artificial Sequence
  mRNA product Design g-5 comprising derived and/or modified sequence from HRSV(Memphis-37)__AIY60640.1__F-del_DSCav1_mut3 (opt1)
gggagacccgugacccggaaguuguacggcuacgcgacuuucccucccacaaacccucgcgcccuuccuuuccuacuugggcccggcagaaagcuuaccauggagcugcccauccucaagaccaacgccaucaccacgauccuggccgcggugacccugugcuucgccagcucccagaacaucaccgaggaguucuaccagagcacgugcuccgccgucagcaagggcuaccucggggcccugcgcaccggcugguacaccuccgugaucaccaucgagcugagcaacaucaaggagaucaagugcaacgggaccgacgccaaggugaagcucaucaagcaggagcuggacaaguacaagaacgcggucacggaccugcagcuccugaugcaguccaccccggccgccggcagcggguccgccaucugcagcggcaucgcggugugcaaggugcugcaccucgagggcgaggucaacaagaucaagaacgcccugcuguccaccaacaaggccguggugagccucuccaacggggucagcgugcugaccuucaaggugcuggaccucaagaacuacaucgacaagcagcugcugcccauccucaacaagcaguccugcagcauccccaacaucgagacggucaucgaguuccagcagaagaacaaccggcugcuggagaucacccgcgaguucuccgugaacgccggcgugaccacccccgucagcacguacaugcucaccaacuccgagcugcugagccucaucaacgacaugccgaucaccaacgaccagaagaagcugaugagcaacaacgugcagaucgugcggcagcaguccuacagcaucaugugcaucaucaaggaggagguccuggccuacguggugcagcucccccuguacggggucaucgacacccccugcuggaagcugcacacgagcccccucugcaccaccaacaccaaggagggcuccaacaucugccugacgcgcaccgaccgggggugguacugcgacaacgcgggcuccgugagcuucuucccgcaggccgagaccugcaaggugcaguccaaccgcgucuucugcgacaccaugaacagccugacgcuccccuccgaggugaaccugugcaacaucgacaucuucaaccccaaguacgacugcaagaucaugaccagcaagaccgacgucuccagcuccgugaucaccagccugggcgccaucguguccugcuacgggaagacgaagugcaccgccagcaacaagaaccggggcaucaucaagaccuucuccaacgggugcgacuacgucagcaacaagggcguggacaccguguccgucggcaacacgcucuacugcgugaacaagcaggaggggcagagccuguacgugaagggcgagcccaucaucaacuucuacgacccgcuggucuuccccagcgacgaguucgacgccuccaucagccaggugaacgagaagaucaaccagucccucgcguucauccgcaagagcgacgagcugcugcacaacgugaacgucgggaaguccaccaccaacaucaugaucaccaccaucaucaucgugaucaucgugauccuccugcugcucaucgccgucggccuguuccuguacugcaaggcccggugaggacuaguaauaaggaaacuguaugaaugucugugggcaggaagugaagagauccuucuguaaagguuuuuggaauuaugucugcugaauaauaaacuuuuuugaaauaauaaaucugguagaaaaaugagaucuaaaaaaaaaaaaaaaaaaaaaaaaaaaaaaaaaaaaaaaaaaaaaaaaaaaaaaaaaaaaaaaaugcaucccccccccccccccccccccccccccccccaaaggcucuuuucagagccaccagaauu

SEQ ID NO: 16076 - RNA, 1907 nt, Artificial Sequence
  mRNA product Design g-5 comprising derived and/or modified sequence from HRSV(Memphis-37)__AIY60640.1__F-del_DSCav1_mut3 (opt2)
gggagacccgugacccggaaguuguacggcuacgcgacuuucccucccacaaacccucgcgcccuuccuuuccuacuugggcccggcagaaagcuuaccauggagcuccccauccucaagaccaacgccaucaccaccauccucgccgccgucacccucugcuucgccuccucccagaacaucaccgaggaguucuaccaguccaccugcuccgccgucuccaagggcuaccucggcgcccuccgcaccggcugguacaccuccgucaucaccaucgagcucuccaacaucaaggagaucaagugcaacggcaccgacgccaaggucaagcucaucaagcaggagcucgacaaguacaagaacgccgucaccgaccuccagcuccucaugcaguccacccccgccgccggcuccggcuccgccaucugcuccggcaucgccgucugcaagguccuccaccucgagggcgaggucaacaagaucaagaacgcccuccucuccaccaacaaggccgucgucucccucuccaacggcgucuccguccucaccuucaagguccucgaccucaagaacuacaucgacaagcagcuccuccccauccucaacaagcaguccugcuccauccccaacaucgagaccgucaucgaguuccagcagaagaacaaccgccuccucgagaucacccgcgaguucuccgucaacgccggcgucaccacccccgucuccaccuacaugcucaccaacuccgagcuccucucccucaucaacgacaugcccaucaccaacgaccagaagaagcucauguccaacaacguccagaucguccgccagcaguccuacuccaucaugugcaucaucaaggaggagguccucgccuacgucguccagcucccccucuacggcgucaucgacacccccugcuggaagcuccacaccuccccccucugcaccaccaacaccaaggagggcuccaacaucugccucacccgcaccgaccgcggcugguacugcgacaacgccggcuccgucuccuucuucccccaggccgagaccugcaagguccaguccaaccgcgucuucugcgacaccaugaacucccucacccuccccuccgaggucaaccucugcaacaucgacaucuucaaccccaaguacgacugcaagaucaugaccuccaagaccgacgucuccuccuccgucaucaccucccucggcgccaucgucuccugcuacggcaagaccaagugcaccgccuccaacaagaaccgcggcaucaucaagaccuucuccaacggcugcgacuacgucuccaacaagggcgucgacaccgucuccgucggcaacacccucuacugcgucaacaagcaggagggccagucccucuacgucaagggcgagcccaucaucaacuucuacgacccccucgucuuccccuccgacgaguucgacgccuccaucucccaggucaacgagaagaucaaccagucccucgccuucauccgcaaguccgacgagcuccuccacaacgucaacgucggcaaguccaccaccaacaucaugaucaccaccaucaucaucgucaucaucgucauccuccuccuccucaucgccgucggccucuuccucuacugcaaggcccgcugaggacuaguaauaaggaaacuguaugaaugucugugggcaggaagugaagagauccuucuguaaagguuuuuggaauuaugucugcugaauaauaaacuuuuuugaaauaauaaaucugguagaaaaaugagaucuaaaaaaaaaaaaaaaaaaaaaaaaaaaaaaaaaaaaaaaaaaaaaaaaaaaaaaaaaaaaaaaaugcaucccccccccccccccccccccccccccccccaaaggcucuuuucagagccaccagaauu

SEQ ID NO: 16077 - RNA, 1907 nt, Artificial Sequence
  mRNA product Design g-5 comprising derived and/or modified sequence from HRSV(Memphis-37)__AIY60640.1__F-del_DSCav1_mut3 (opt3)
gggagacccgugacccggaaguuguacggcuacgcgacuuucccucccacaaacccucgcgcccuuccuuuccuacuugggcccggcagaaagcuuaccauggagcugcccauccucaagaccaacgccauuacaacuauacuugcugcagugacgcugugcuucgccagcucccagaauaucaccgaagaguuuuaccaaucuacauguucagcggucaguaaaggcuauuugggggcuuuaagaacuggaugguacaccagcguuauuacaaucgaacuguccaacauuaaggagaucaaaugcaaugguaccgacgccaaggugaaacuaauaaagcaggaacucgauaaguauaaaaacgcaguaacugaccugcagcuucugaugcagucuacuccugccgcuggcucggggucagcaaucuguagcggaauugccgugugcaaggucuugcaccucgagggcgaggugaauaaaaucaagaacgcucugcugaguaccaauaaagccguugugucccucucuaacggugucagcguguuaacguucaagguacuggaucuuaagaauuacauugacaaacaauugcugccaauccuaaacaagcaguccuguucaauaccgaauauugaaacuguuaucgaguuucagcagaaaaacaauaggcuccuggaaauuacccgggaguucagugugaacgcgggggucacaacucccgugagcaccuauaugcuuacaaauucugagcuguugucccucaucaacgauaugccuaucaccaacgaccaaaagaaacugaugucaaauaacgugcagauuguccgccagcagagcuacaguauaaugugcaucauuaaggaagagguuuuagcauaugugguacaacugccacucuacggagugaucgauacgcccuguuggaaacuucauacuucuccucugugcacaaccaauacuaaggaaggcuccaacauauguuugacacgaaccgaccguggcugguacugcgauaaugccgggagcgucucguuuuucccacaggcugagacguguaaggugcagucuaacagaguuuucugcgacaccaugaacucccuaacacugcccucagaagugaaucucugcaauauugauaucuucaacccuaaauaugacuguaagaucaugacaaguaaaaccgaugucagcuccucugugauuacaagccugggagccaucguaucaugcuacgguaagacuaaauguaccgcaaguaauaagaacaggggcauuauaaagacauuuuccaaugggugcgacuauguuagcaacaaaggaguggacaccgucucugugggcaauacucuuuacugugucaacaagcaagagggucagucacuguaugugaaaggggagccaaucauuaacuucuacgauccguugguuuuucccagugacgaauuugaugcuagcaucucccaggugaaugagaagaucaaccagucucucgccuuuauucggaaaucggacgaacuguuacacaauguaaacgucggaaagagcacgacaaauauaaugaucaccacuauuaucauugugaucauaguuauccugcuacuccugauugcggugggccuuuucuuguauugcaaggcccgcugaggacuaguaauaaggaaacuguaugaaugucugugggcaggaagugaagagauccuucuguaaagguuuuuggaauuaugucugcugaauaauaaacuuuuuugaaauaauaaaucugguagaaaaaugagaucuaaaaaaaaaaaaaaaaaaaaaaaaaaaaaaaaaaaaaaaaaaaaaaaaaaaaaaaaaaaaaaaaugcaucccccccccccccccccccccccccccccccaaaggcucuuuucagagccaccagaauu

SEQ ID NO: 16078 - RNA, 1907 nt, Artificial Sequence
  mRNA product Design g-5 comprising derived and/or modified sequence from HRSV(Memphis-37)__AIY60640.1__F-del_DSCav1_mut3 (opt4)
gggagacccgugacccggaaguuguacggcuacgcgacuuucccucccacaaacccucgcgcccuuccuuuccuacuugggcccggcagaaagcuuaccauggagcugcccauccugaagaccaacgccaucaccaccauccuggccgccgugacccugugcuucgccagcagccagaacaucaccgaggaguucuaccagagcaccugcagcgccgugagcaagggcuaccugggcgcccugagaaccggcugguacaccagcgugaucaccaucgagcugagcaacaucaaggagaucaagugcaacggcaccgacgccaaggugaagcugaucaagcaggagcuggacaaguacaagaacgccgugaccgaccugcagcugcugaugcagagcacccccgccgccggcagcggcagcgccaucugcagcggcaucgccgugugcaaggugcugcaccuggagggcgaggugaacaagaucaagaacgcccugcugagcaccaacaaggccguggugagccugagcaacggcgugagcgugcugaccuucaaggugcuggaccugaagaacuacaucgacaagcagcugcugcccauccugaacaagcagagcugcagcauccccaacaucgagaccgugaucgaguuccagcagaagaacaacagacugcuggagaucaccagagaguucagcgugaacgccggcgugaccacccccgugagcaccuacaugcugaccaacagcgagcugcugagccugaucaacgacaugcccaucaccaacgaccagaagaagcugaugagcaacaacgugcagaucgugagacagcagagcuacagcaucaugugcaucaucaaggaggaggugcuggccuacguggugcagcugccccuguacggcgugaucgacacccccugcuggaagcugcacaccagcccccugugcaccaccaacaccaaggagggcagcaacaucugccugaccagaaccgacagaggcugguacugcgacaacgccggcagcgugagcuucuucccccaggccgagaccugcaaggugcagagcaacagaguguucugcgacaccaugaacagccugacccugcccagcgaggugaaccugugcaacaucgacaucuucaaccccaaguacgacugcaagaucaugaccagcaagaccgacgugagcagcagcgugaucaccagccugggcgccaucgugagcugcuacggcaagaccaagugcaccgccagcaacaagaacagaggcaucaucaagaccuucagcaacggcugcgacuacgugagcaacaagggcguggacaccgugagcgugggcaacacccuguacugcgugaacaagcaggagggccagagccuguacgugaagggcgagcccaucaucaacuucuacgacccccugguguuccccagcgacgaguucgacgccagcaucagccaggugaacgagaagaucaaccagagccuggccuucaucagaaagagcgacgagcugcugcacaacgugaacgugggcaagagcaccaccaacaucaugaucaccaccaucaucaucgugaucaucgugauccugcugcugcugaucgccgugggccuguuccuguacugcaaggccagaugaggacuaguaauaaggaaacuguaugaaugucugugggcaggaagugaagagauccuucuguaaagguuuuuggaauuaugucugcugaauaauaaacuuuuuugaaauaauaaaucugguagaaaaaugagaucuaaaaaaaaaaaaaaaaaaaaaaaaaaaaaaaaaaaaaaaaaaaaaaaaaaaaaaaaaaaaaaaaugcaucccccccccccccccccccccccccccccccaaaggcucuuuucagagccaccagaauu

SEQ ID NO: 16079 - RNA, 1907 nt, Artificial Sequence
  mRNA product Design g-5 comprising derived and/or modified sequence from HRSV(Memphis-37)__AIY60640.1__F-del_DSCav1_mut3 (opt5)
gggagacccgugacccggaaguuguacggcuacgcgacuuucccucccacaaacccucgcgcccuuccuuuccuacuugggcccggcagaaagcuuaccauggagcugcccauccucaagaccaacgccauuacaacgauccuggcugccgugacccuuugcuucgcgagcucccagaauauuacagaagaguuuuaccaaucuaccuguagcgcugucuccaaaggcuaucugggggcccucagaacaggaugguacaccucuguuaucacaauugaacugagcaacaucaaggagaucaaaugcaauggcaccgacgccaaggugaaacuuauuaagcaggaacuggauaaguauaaaaacgcugugacggaccuccagcugcugaugcaguccaccccugccgcugggucuggaagcgccaucuguuccggcauugcggucugcaaggugcuccaccuggagggggagguuaauaaaaucaagaacgcccuucugagcacaaauaaagcuguggucucucucuccaacggagugagcguucugaccuucaaggugcuugaucugaagaauuacauugacaaacaacuccugccgauccugaacaagcagucuuguuccauucccaauaucgaaacagucaucgaguuucagcagaaaaacaaucggcuccuggaaauuacccgcgaguucagcgugaacgccggcgugacgacaccugucucuaccuauaugcuuacaaauuccgagcugcucagccugaucaacgauaugcccauuaccaacgaccaaaagaaacuuauguccaauaacguucagaucgugagacagcagucuuacagcauuaugugcaucaucaaggaagaggugcuggcuuaugucgugcaacucccucuguacggcguuauugauacccccuguuggaaacugcauacauccccucucugcacgaccaauacaaaggaagggagcaacaucugucugacccggacagaccgcggaugguacugcgauaaugccggcucuguguccuuuuucccgcaggcggagaccuguaagguccagagcaacagaguguuuugcgacacgaugaacucucuuacacugcccagcgaaguuaaucucugcaauauugauaucuucaacccuaaauaugacuguaagauuaugaccuccaaaaccgaugugucuagcuccgucaucacaagccugggggccaucgugucuugcuacggaaagaccaaauguacagcuuccaauaagaaccggggcauuaucaagacguuuagcaaugggugcgacuaugucucuaacaaaggaguggacaccguuuccgugggcaauacacuuuacugugucaacaagcaagagggccagagccuguaugugaaaggggagcccauuaucaacuucuacgauccucucguuuuucccuccgacgaguucgaugccucuauuagccaggugaaugaaaagaucaaccagucccuggcuuuuauucgcaaaucugacgaacugcuccacaaugucaacgugggaaagagcaccacaaauaucaugaucaccacgauuaucauugugaucauuguuauccugcuucugcucaucgccgucggccuguuccuguauugcaaggccagaugaggacuaguaauaaggaaacuguaugaaugucugugggcaggaagugaagagauccuucuguaaagguuuuuggaauuaugucugcugaauaauaaacuuuuuugaaauaauaaaucugguagaaaaaugagaucuaaaaaaaaaaaaaaaaaaaaaaaaaaaaaaaaaaaaaaaaaaaaaaaaaaaaaaaaaaaaaaaaugcaucccccccccccccccccccccccccccccccaaaggcucuuuucagagccaccagaauu

SEQ ID NO: 16080 - RNA, 1907 nt, Artificial Sequence
  mRNA product Design g-5 comprising derived and/or modified sequence from HRSV(Memphis-37)__AIY60640.1__F-del_DSCav1_mut3 (opt6)
gggagacccgugacccggaaguuguacggcuacgcgacuuucccucccacaaacccucgcgcccuuccuuuccuacuugggcccggcagaaagcuuaccauggaacuacccauccuaaaaacaaaugccauaaccacaauacucgccgcuguaacacuauguuucgcuaguucacaaaacauuacagaagaauuuuaccaauccacaugcucagcaguaucaaaaggauaccuaggugcacuaagaacaggaugguacacaagcguaauuacaauagaauuauccaauauuaaagaaauaaaauguaacggcacugacgcuaaaguaaaauuaaucaaacaagaacuagacaaauacaaaaacgcaguaacagaccuacaauuacucaugcaauccacacccgcagcaggaucaggcucagccauaugcucagguauagcaguaugcaaaguacuccaccuugaaggagaaguaaacaaaauaaaaaacgcauuacuaucaacaaacaaagcaguaguaucacuaucaaacggagucucugucuuaaccuuuaaaguauuagauuuaaaaaacuacauagacaaacaacuauuaccaauucuaaauaaacaaucauguucuauaccaaauauagaaacaguaauagaauuucaacaaaaaaacaaccgauuacuagaaaucacaagagaauuuucugucaacgccggcguaaccaccccagucucaacauauaugcuaacaaauagugaacucuuauccuuaauaaacgacaugccaauaacaaaugaccaaaaaaaauuaauguccaauaacguacaaauagucagacaacagucauacucaauaauguguaucaucaaagaagaaguauuagcauacguaguucaacuaccccuauacggcguaauagacacaccauguuggaaacuacacacaucacccuuaugcacaaccaauaccaaagaaggaucuaacauaugccuaaccagaacagacagaggcugguacugcgacaacgcagguucagucucauucuucccacaagccgaaacaugcaaaguccaauccaacagaguauuuugcgacacuaugaacucacuaacucuaccuucagaagucaaccuuuguaacauagacauauuuaacccaaaauacgauuguaaaauaaugaccagcaaaacagacgucucaucaagcguaauaacaucacuuggcgcaauagucuccugcuacggaaaaacaaaaugcacagcauccaacaaaaacagaggcaucauaaaaaccuucuccaacggcugcgacuauguaagcaacaaaggugucgauacaguaucaguaggaaacacacuauacugcguaaacaaacaagaaggacaaucacucuacguaaaaggugaaccaaucauaaacuucuacgacccauuaguuuucccaucagacgaauuugaugccuccauaucacaaguaaaugaaaaaauaaaucaaucccuagcauucauacgaaaaucugaugaauuacuucacaaugucaacgucggaaaaucaaccacuaacauaaugauaacaacaauuauaauaguaauaauaguaauacuccuacuauuaauagccgucggucuuuuccuauacugcaaagcacgauaaggacuaguaauaaggaaacuguaugaaugucugugggcaggaagugaagagauccuucuguaaagguuuuuggaauuaugucugcugaauaauaaacuuuuuugaaauaauaaaucugguagaaaaaugagaucuaaaaaaaaaaaaaaaaaaaaaaaaaaaaaaaaaaaaaaaaaaaaaaaaaaaaaaaaaaaaaaaaugcaucccccccccccccccccccccccccccccccaaaggcucuuuucagagccaccagaauu

SEQ ID NO: 16081 - RNA, 1907 nt, Artificial Sequence
  mRNA product Design g-5 comprising derived and/or modified sequence from HRSV(Memphis-37)__AIY60640.1__F-del_DSCav1_mut3 (opt11)
gggagacccgugacccggaaguuguacggcuacgcgacuuucccucccacaaacccucgcgcccuuccuuuccuacuugggcccggcagaaagcuuaccauggaacuacccauccucaaaaccaacgccaucaccacaauccuagcugccgucacccuaugcuucgcaagcagccaaaacaucacagaagaauuuuaccaaucaaccugcuccgccgucuccaaaggguaccuaggugcccuccgcaccggcugguacacgucugucauaaccaucgaacucuccaacaucaaagaaaucaaauguaacggaacagacgcaaaagucaaacuaaucaaacaagaacuagacaaauacaaaaacgccguaaccgaccuccaacugcucaugcaauccacccccgcugccggcuccgggagcgcaaucugcucuggaaucgccguaugcaaaguccuccaccucgaaggagaaguaaacaaaaucaaaaacgcgcuccucaguaccaacaaagccgucgucucucuaucaaacggcguaucgguccucaccuucaaaguccucgaccuaaagaacuacauagacaaacaacuccuccccauccuaaacaaacaauccugcucaaucccaaacaucgaaaccgugaucgaguuccaacagaaaaacaaccgccuacucgaaaucacccgagaguucucagucaacgcaggagucaccacccccgucucaacauacaugcuuaccaacagcgaacuccuaucccucaucaacgacaugccaaucacaaacgaccaaaagaaacucaugagcaacaacguccagaucguaagacaacaaagcuacagcaucaugugcaucaucaaagaagaaguacuagcauacgucguccaacucccccucuacggcgucaucgacacccccugcuggaaacuccacaccucaccccucugcacaaccaacaccaaagaaggcuccaauaucugccucacacgcaccgaccgcggcugguacugcgacaacgccggcuccgucuccuucuucccucaagccgaaaccugcaaaguccaguccaacagagucuucugcgacaccaugaacucccuaacacuuccaucagaagucaaccuuuguaacaucgacaucuucaaucccaaauacgacuguaaaauaaugaccucaaaaacugacgugucaagcucaguuaucaccucccuaggggccaucgucuccugcuacggcaaaacaaaaugcaccgcauccaacaaaaaucgcggaaucaucaaaacauucuccaacggaugcgacuacgucucaaacaagggaguagauaccguaagcguuggcaacacccucuacugcguaaacaaacaagaaggccaaucacucuacgucaaaggcgaacccauaaucaacuucuacgacccccucgucuucccuuccgaugaguucgacgccagcaucucccaagucaacgagaaaauaaaccagucacucgcauucauccgcaaaagcgacgaacuccuccacaacguaaacguaggcaaauccacaaccaauaucaugauaaccacaaucaucaucgugaucaucgucauccuccuccuccucauagcugucggacucuuccucuacuguaaagcacgcugaggacuaguaauaaggaaacuguaugaaugucugugggcaggaagugaagagauccuucuguaaagguuuuuggaauuaugucugcugaauaauaaacuuuuuugaaauaauaaaucugguagaaaaaugagaucuaaaaaaaaaaaaaaaaaaaaaaaaaaaaaaaaaaaaaaaaaaaaaaaaaaaaaaaaaaaaaaaaugcaucccccccccccccccccccccccccccccccaaaggcucuuuucagagccaccagaauu

SEQ ID NO: 16082 - RNA, 1923 nt, Artificial Sequence
  mRNA product Design h-1 comprising derived and/or modified sequence from HRSV(Memphis-37)__AIY60640.1__F-del_DSCav1_mut3 (opt1)
gggagacccgugacccggaaguuguacggcuacgcgacuuucccucccacaaacccucgcgcccuuccuuuccuacuugggcccggcagaaagcuuaccauggagcugcccauccucaagaccaacgccaucaccacgauccuggccgcggugacccugugcuucgccagcucccagaacaucaccgaggaguucuaccagagcacgugcuccgccgucagcaagggcuaccucggcgcccugcgcaccgggugguacaccagcgugaucaccaucgagcuguccaacaucaaggagaucaagugcaacggcaccgacgccaaggugaagcucaucaagcaggagcuggacaaguacaagaacgcggucacggaccugcagcuccugaugcagagcaccccggccgccggcuccgggagcgcgaucugcuccggcaucgccgucugcaaggugcugcaccucgagggcgaggugaacaagaucaagaacgcccugcuguccaccaacaaggccgucgugagccucuccaacggggugagcguccugaccuucaaggugcuggaccucaagaacuacaucgacaagcagcugcugcccauccugaacaagcagagcugcuccauccccaacaucgagaccgucaucgaguuccagcagaagaacaaccgccuccuggagaucacgcgggaguucagcgugaacgcgggcgugaccacccccgucuccaccuacaugcugacgaacagcgagcuccugucccugaucaacgacaugccgaucaccaacgaccagaagaagcucaugagcaacaacgugcagaucgugcgccagcaguccuacagcaucaugugcaucaucaaggaggagguccuggccuacguggugcagcugccccucuacggggucaucgacacccccugcuggaagcugcacaccagcccccugugcacgaccaacaccaaggagggcuccaacaucugccucacccggacggaccgcgggugguacugcgacaacgccggcagcguguccuucuucccgcaggccgagaccugcaagguccagagcaaccggguguucugcgacaccaugaacucccugacccugcccagcgaggugaaccucugcaacaucgacaucuucaaccccaaguacgacugcaagaucaugacguccaagaccgacgucagcuccagcgugaucaccucccugggcgccaucgugagcugcuacgggaagaccaagugcacggcgagcaacaagaaccgcggcaucaucaagaccuucuccaacgggugcgacuacgucagcaacaagggcguggacaccguguccgucggcaacacccuguacugcgugaacaagcaggagggccagagccucuacgugaagggggagcccaucaucaacuucuacgacccgcuggucuuccccuccgacgaguucgacgccagcaucucccaggugaacgagaagaucaaccagagccuggccuucauccggaaguccgacgagcuccugcacaacgugaacgucggcaagagcaccacgaacaucaugaucaccaccaucaucaucgugaucaucgugauccugcugcuccugaucgccgucgggcuguuccucuacugcaaggcccgcugaggacuaguacuggcugcaucucccuuuccucuguccuccauccuucucccaggauggugaagggggaccugguacccagugauccccaccccaggauccuaaaucaugacuuaccugcuaauaaaaacucauuggaaaagugagaagaucuaaaaaaaaaaaaaaaaaaaaaaaaaaaaaaaaaaaaaaaaaaaaaaaaaaaaaaaaaaaaaaaaugcaucccccccccccccccccccccccccccccccaaaggcucuuuucagagccaccagaauu

SEQ ID NO: 16083 - RNA, 1923 nt, Artificial Sequence
  mRNA product Design h-1 comprising derived and/or modified sequence from HRSV(Memphis-37)__AIY60640.1__F-del_DSCav1_mut3 (opt1)
gggagacccgugacccggaaguuguacggcuacgcgacuuucccucccacaaacccucgcgcccuuccuuuccuacuugggcccggcagaaagcuuaccauggagcugcccauccucaagaccaacgccaucaccacgauccuggccgcggugacccugugcuucgccagcucccagaacaucaccgaggaguucuaccagagcacgugcuccgccgucagcaagggcuaccucggggcccugcgcaccggcugguacaccuccgugaucaccaucgagcugagcaacaucaaggagaucaagugcaacgggaccgacgccaaggugaagcucaucaagcaggagcuggacaaguacaagaacgcggucacggaccugcagcuccugaugcaguccaccccggccgccggcagcggguccgccaucugcagcggcaucgcggugugcaaggugcugcaccucgagggcgaggucaacaagaucaagaacgcccugcuguccaccaacaaggccguggugagccucuccaacggggucagcgugcugaccuucaaggugcuggaccucaagaacuacaucgacaagcagcugcugcccauccucaacaagcaguccugcagcauccccaacaucgagacggucaucgaguuccagcagaagaacaaccggcugcuggagaucacccgcgaguucuccgugaacgccggcgugaccacccccgucagcacguacaugcucaccaacuccgagcugcugagccucaucaacgacaugccgaucaccaacgaccagaagaagcugaugagcaacaacgugcagaucgugcggcagcaguccuacagcaucaugugcaucaucaaggaggagguccuggccuacguggugcagcucccccuguacggggucaucgacacccccugcuggaagcugcacacgagcccccucugcaccaccaacaccaaggagggcuccaacaucugccugacgcgcaccgaccgggggugguacugcgacaacgcgggcuccgugagcuucuucccgcaggccgagaccugcaaggugcaguccaaccgcgucuucugcgacaccaugaacagccugacgcuccccuccgaggugaaccugugcaacaucgacaucuucaaccccaaguacgacugcaagaucaugaccagcaagaccgacgucuccagcuccgugaucaccagccugggcgccaucguguccugcuacgggaagacgaagugcaccgccagcaacaagaaccggggcaucaucaagaccuucuccaacgggugcgacuacgucagcaacaagggcguggacaccguguccgucggcaacacgcucuacugcgugaacaagcaggaggggcagagccuguacgugaagggcgagcccaucaucaacuucuacgacccgcuggucuuccccagcgacgaguucgacgccuccaucagccaggugaacgagaagaucaaccagucccucgcguucauccgcaagagcgacgagcugcugcacaacgugaacgucgggaaguccaccaccaacaucaugaucaccaccaucaucaucgugaucaucgugauccuccugcugcucaucgccgucggccuguuccuguacugcaaggcccggugaggacuaguacuggcugcaucucccuuuccucuguccuccauccuucucccaggauggugaagggggaccugguacccagugauccccaccccaggauccuaaaucaugacuuaccugcuaauaaaaacucauuggaaaagugagaagaucuaaaaaaaaaaaaaaaaaaaaaaaaaaaaaaaaaaaaaaaaaaaaaaaaaaaaaaaaaaaaaaaaugcaucccccccccccccccccccccccccccccccaaaggcucuuuucagagccaccagaauu

SEQ ID NO: 16084 - RNA, 1923 nt, Artificial Sequence
  mRNA product Design h-1 comprising derived and/or modified sequence from HRSV(Memphis-37)__AIY60640.1__F-del_DSCav1_mut3 (opt2)
gggagacccgugacccggaaguuguacggcuacgcgacuuucccucccacaaacccucgcgcccuuccuuuccuacuugggcccggcagaaagcuuaccauggagcuccccauccucaagaccaacgccaucaccaccauccucgccgccgucacccucugcuucgccuccucccagaacaucaccgaggaguucuaccaguccaccugcuccgccgucuccaagggcuaccucggcgcccuccgcaccggcugguacaccuccgucaucaccaucgagcucuccaacaucaaggagaucaagugcaacggcaccgacgccaaggucaagcucaucaagcaggagcucgacaaguacaagaacgccgucaccgaccuccagcuccucaugcaguccacccccgccgccggcuccggcuccgccaucugcuccggcaucgccgucugcaagguccuccaccucgagggcgaggucaacaagaucaagaacgcccuccucuccaccaacaaggccgucgucucccucuccaacggcgucuccguccucaccuucaagguccucgaccucaagaacuacaucgacaagcagcuccuccccauccucaacaagcaguccugcuccauccccaacaucgagaccgucaucgaguuccagcagaagaacaaccgccuccucgagaucacccgcgaguucuccgucaacgccggcgucaccacccccgucuccaccuacaugcucaccaacuccgagcuccucucccucaucaacgacaugcccaucaccaacgaccagaagaagcucauguccaacaacguccagaucguccgccagcaguccuacuccaucaugugcaucaucaaggaggagguccucgccuacgucguccagcucccccucuacggcgucaucgacacccccugcuggaagcuccacaccuccccccucugcaccaccaacaccaaggagggcuccaacaucugccucacccgcaccgaccgcggcugguacugcgacaacgccggcuccgucuccuucuucccccaggccgagaccugcaagguccaguccaaccgcgucuucugcgacaccaugaacucccucacccuccccuccgaggucaaccucugcaacaucgacaucuucaaccccaaguacgacugcaagaucaugaccuccaagaccgacgucuccuccuccgucaucaccucccucggcgccaucgucuccugcuacggcaagaccaagugcaccgccuccaacaagaaccgcggcaucaucaagaccuucuccaacggcugcgacuacgucuccaacaagggcgucgacaccgucuccgucggcaacacccucuacugcgucaacaagcaggagggccagucccucuacgucaagggcgagcccaucaucaacuucuacgacccccucgucuuccccuccgacgaguucgacgccuccaucucccaggucaacgagaagaucaaccagucccucgccuucauccgcaaguccgacgagcuccuccacaacgucaacgucggcaaguccaccaccaacaucaugaucaccaccaucaucaucgucaucaucgucauccuccuccuccucaucgccgucggccucuuccucuacugcaaggcccgcugaggacuaguacuggcugcaucucccuuuccucuguccuccauccuucucccaggauggugaagggggaccugguacccagugauccccaccccaggauccuaaaucaugacuuaccugcuaauaaaaacucauuggaaaagugagaagaucuaaaaaaaaaaaaaaaaaaaaaaaaaaaaaaaaaaaaaaaaaaaaaaaaaaaaaaaaaaaaaaaaugcaucccccccccccccccccccccccccccccccaaaggcucuuuucagagccaccagaauu

SEQ ID NO: 16085 - RNA, 1923 nt, Artificial Sequence
  mRNA product Design h-1 comprising derived and/or modified sequence from HRSV(Memphis-37)__AIY60640.1__F-del_DSCav1_mut3 (opt3)
gggagacccgugacccggaaguuguacggcuacgcgacuuucccucccacaaacccucgcgcccuuccuuuccuacuugggcccggcagaaagcuuaccauggagcugcccauccucaagaccaacgccauuacaacuauacuugcugcagugacgcugugcuucgccagcucccagaauaucaccgaagaguuuuaccaaucuacauguucagcggucaguaaaggcuauuugggggcuuuaagaacuggaugguacaccagcguuauuacaaucgaacuguccaacauuaaggagaucaaaugcaaugguaccgacgccaaggugaaacuaauaaagcaggaacucgauaaguauaaaaacgcaguaacugaccugcagcuucugaugcagucuacuccugccgcuggcucggggucagcaaucuguagcggaauugccgugugcaaggucuugcaccucgagggcgaggugaauaaaaucaagaacgcucugcugaguaccaauaaagccguugugucccucucuaacggugucagcguguuaacguucaagguacuggaucuuaagaauuacauugacaaacaauugcugccaauccuaaacaagcaguccuguucaauaccgaauauugaaacuguuaucgaguuucagcagaaaaacaauaggcuccuggaaauuacccgggaguucagugugaacgcgggggucacaacucccgugagcaccuauaugcuuacaaauucugagcuguugucccucaucaacgauaugccuaucaccaacgaccaaaagaaacugaugucaaauaacgugcagauuguccgccagcagagcuacaguauaaugugcaucauuaaggaagagguuuuagcauaugugguacaacugccacucuacggagugaucgauacgcccuguuggaaacuucauacuucuccucugugcacaaccaauacuaaggaaggcuccaacauauguuugacacgaaccgaccguggcugguacugcgauaaugccgggagcgucucguuuuucccacaggcugagacguguaaggugcagucuaacagaguuuucugcgacaccaugaacucccuaacacugcccucagaagugaaucucugcaauauugauaucuucaacccuaaauaugacuguaagaucaugacaaguaaaaccgaugucagcuccucugugauuacaagccugggagccaucguaucaugcuacgguaagacuaaauguaccgcaaguaauaagaacaggggcauuauaaagacauuuuccaaugggugcgacuauguuagcaacaaaggaguggacaccgucucugugggcaauacucuuuacugugucaacaagcaagagggucagucacuguaugugaaaggggagccaaucauuaacuucuacgauccguugguuuuucccagugacgaauuugaugcuagcaucucccaggugaaugagaagaucaaccagucucucgccuuuauucggaaaucggacgaacuguuacacaauguaaacgucggaaagagcacgacaaauauaaugaucaccacuauuaucauugugaucauaguuauccugcuacuccugauugcggugggccuuuucuuguauugcaaggcccgcugaggacuaguacuggcugcaucucccuuuccucuguccuccauccuucucccaggauggugaagggggaccugguacccagugauccccaccccaggauccuaaaucaugacuuaccugcuaauaaaaacucauuggaaaagugagaagaucuaaaaaaaaaaaaaaaaaaaaaaaaaaaaaaaaaaaaaaaaaaaaaaaaaaaaaaaaaaaaaaaaugcaucccccccccccccccccccccccccccccccaaaggcucuuuucagagccaccagaauu

SEQ ID NO: 16086 - RNA, 1923 nt, Artificial Sequence
  mRNA product Design h-1 comprising derived and/or modified sequence from HRSV(Memphis-37)__AIY60640.1__F-del_DSCav1_mut3 (opt4)
gggagacccgugacccggaaguuguacggcuacgcgacuuucccucccacaaacccucgcgcccuuccuuuccuacuugggcccggcagaaagcuuaccauggagcugcccauccugaagaccaacgccaucaccaccauccuggccgccgugacccugugcuucgccagcagccagaacaucaccgaggaguucuaccagagcaccugcagcgccgugagcaagggcuaccugggcgcccugagaaccggcugguacaccagcgugaucaccaucgagcugagcaacaucaaggagaucaagugcaacggcaccgacgccaaggugaagcugaucaagcaggagcuggacaaguacaagaacgccgugaccgaccugcagcugcugaugcagagcacccccgccgccggcagcggcagcgccaucugcagcggcaucgccgugugcaaggugcugcaccuggagggcgaggugaacaagaucaagaacgcccugcugagcaccaacaaggccguggugagccugagcaacggcgugagcgugcugaccuucaaggugcuggaccugaagaacuacaucgacaagcagcugcugcccauccugaacaagcagagcugcagcauccccaacaucgagaccgugaucgaguuccagcagaagaacaacagacugcuggagaucaccagagaguucagcgugaacgccggcgugaccacccccgugagcaccuacaugcugaccaacagcgagcugcugagccugaucaacgacaugcccaucaccaacgaccagaagaagcugaugagcaacaacgugcagaucgugagacagcagagcuacagcaucaugugcaucaucaaggaggaggugcuggccuacguggugcagcugccccuguacggcgugaucgacacccccugcuggaagcugcacaccagcccccugugcaccaccaacaccaaggagggcagcaacaucugccugaccagaaccgacagaggcugguacugcgacaacgccggcagcgugagcuucuucccccaggccgagaccugcaaggugcagagcaacagaguguucugcgacaccaugaacagccugacccugcccagcgaggugaaccugugcaacaucgacaucuucaaccccaaguacgacugcaagaucaugaccagcaagaccgacgugagcagcagcgugaucaccagccugggcgccaucgugagcugcuacggcaagaccaagugcaccgccagcaacaagaacagaggcaucaucaagaccuucagcaacggcugcgacuacgugagcaacaagggcguggacaccgugagcgugggcaacacccuguacugcgugaacaagcaggagggccagagccuguacgugaagggcgagcccaucaucaacuucuacgacccccugguguuccccagcgacgaguucgacgccagcaucagccaggugaacgagaagaucaaccagagccuggccuucaucagaaagagcgacgagcugcugcacaacgugaacgugggcaagagcaccaccaacaucaugaucaccaccaucaucaucgugaucaucgugauccugcugcugcugaucgccgugggccuguuccuguacugcaaggccagaugaggacuaguacuggcugcaucucccuuuccucuguccuccauccuucucccaggauggugaagggggaccugguacccagugauccccaccccaggauccuaaaucaugacuuaccugcuaauaaaaacucauuggaaaagugagaagaucuaaaaaaaaaaaaaaaaaaaaaaaaaaaaaaaaaaaaaaaaaaaaaaaaaaaaaaaaaaaaaaaaugcaucccccccccccccccccccccccccccccccaaaggcucuuuucagagccaccagaauu

SEQ ID NO: 16087 - RNA, 1923 nt, Artificial Sequence
  mRNA product Design h-1 comprising derived and/or modified sequence from HRSV(Memphis-37)__AIY60640.1__F-del_DSCav1_mut3 (opt5)
gggagacccgugacccggaaguuguacggcuacgcgacuuucccucccacaaacccucgcgcccuuccuuuccuacuugggcccggcagaaagcuuaccauggagcugcccauccucaagaccaacgccauuacaacgauccuggcugccgugacccuuugcuucgcgagcucccagaauauuacagaagaguuuuaccaaucuaccuguagcgcugucuccaaaggcuaucugggggcccucagaacaggaugguacaccucuguuaucacaauugaacugagcaacaucaaggagaucaaaugcaauggcaccgacgccaaggugaaacuuauuaagcaggaacuggauaaguauaaaaacgcugugacggaccuccagcugcugaugcaguccaccccugccgcugggucuggaagcgccaucuguuccggcauugcggucugcaaggugcuccaccuggagggggagguuaauaaaaucaagaacgcccuucugagcacaaauaaagcuguggucucucucuccaacggagugagcguucugaccuucaaggugcuugaucugaagaauuacauugacaaacaacuccugccgauccugaacaagcagucuuguuccauucccaauaucgaaacagucaucgaguuucagcagaaaaacaaucggcuccuggaaauuacccgcgaguucagcgugaacgccggcgugacgacaccugucucuaccuauaugcuuacaaauuccgagcugcucagccugaucaacgauaugcccauuaccaacgaccaaaagaaacuuauguccaauaacguucagaucgugagacagcagucuuacagcauuaugugcaucaucaaggaagaggugcuggcuuaugucgugcaacucccucuguacggcguuauugauacccccuguuggaaacugcauacauccccucucugcacgaccaauacaaaggaagggagcaacaucugucugacccggacagaccgcggaugguacugcgauaaugccggcucuguguccuuuuucccgcaggcggagaccuguaagguccagagcaacagaguguuuugcgacacgaugaacucucuuacacugcccagcgaaguuaaucucugcaauauugauaucuucaacccuaaauaugacuguaagauuaugaccuccaaaaccgaugugucuagcuccgucaucacaagccugggggccaucgugucuugcuacggaaagaccaaauguacagcuuccaauaagaaccggggcauuaucaagacguuuagcaaugggugcgacuaugucucuaacaaaggaguggacaccguuuccgugggcaauacacuuuacugugucaacaagcaagagggccagagccuguaugugaaaggggagcccauuaucaacuucuacgauccucucguuuuucccuccgacgaguucgaugccucuauuagccaggugaaugaaaagaucaaccagucccuggcuuuuauucgcaaaucugacgaacugcuccacaaugucaacgugggaaagagcaccacaaauaucaugaucaccacgauuaucauugugaucauuguuauccugcuucugcucaucgccgucggccuguuccuguauugcaaggccagaugaggacuaguacuggcugcaucucccuuuccucuguccuccauccuucucccaggauggugaagggggaccugguacccagugauccccaccccaggauccuaaaucaugacuuaccugcuaauaaaaacucauuggaaaagugagaagaucuaaaaaaaaaaaaaaaaaaaaaaaaaaaaaaaaaaaaaaaaaaaaaaaaaaaaaaaaaaaaaaaaugcaucccccccccccccccccccccccccccccccaaaggcucuuuucagagccaccagaauu

SEQ ID NO: 16088 - RNA, 1923 nt, Artificial Sequence
  mRNA product Design h-1 comprising derived and/or modified sequence from HRSV(Memphis-37)__AIY60640.1__F-del_DSCav1_mut3 (opt6)
gggagacccgugacccggaaguuguacggcuacgcgacuuucccucccacaaacccucgcgcccuuccuuuccuacuugggcccggcagaaagcuuaccauggaacuacccauccuaaaaacaaaugccauaaccacaauacucgccgcuguaacacuauguuucgcuaguucacaaaacauuacagaagaauuuuaccaauccacaugcucagcaguaucaaaaggauaccuaggugcacuaagaacaggaugguacacaagcguaauuacaauagaauuauccaauauuaaagaaauaaaauguaacggcacugacgcuaaaguaaaauuaaucaaacaagaacuagacaaauacaaaaacgcaguaacagaccuacaauuacucaugcaauccacacccgcagcaggaucaggcucagccauaugcucagguauagcaguaugcaaaguacuccaccuugaaggagaaguaaacaaaauaaaaaacgcauuacuaucaacaaacaaagcaguaguaucacuaucaaacggagucucugucuuaaccuuuaaaguauuagauuuaaaaaacuacauagacaaacaacuauuaccaauucuaaauaaacaaucauguucuauaccaaauauagaaacaguaauagaauuucaacaaaaaaacaaccgauuacuagaaaucacaagagaauuuucugucaacgccggcguaaccaccccagucucaacauauaugcuaacaaauagugaacucuuauccuuaauaaacgacaugccaauaacaaaugaccaaaaaaaauuaauguccaauaacguacaaauagucagacaacagucauacucaauaauguguaucaucaaagaagaaguauuagcauacguaguucaacuaccccuauacggcguaauagacacaccauguuggaaacuacacacaucacccuuaugcacaaccaauaccaaagaaggaucuaacauaugccuaaccagaacagacagaggcugguacugcgacaacgcagguucagucucauucuucccacaagccgaaacaugcaaaguccaauccaacagaguauuuugcgacacuaugaacucacuaacucuaccuucagaagucaaccuuuguaacauagacauauuuaacccaaaauacgauuguaaaauaaugaccagcaaaacagacgucucaucaagcguaauaacaucacuuggcgcaauagucuccugcuacggaaaaacaaaaugcacagcauccaacaaaaacagaggcaucauaaaaaccuucuccaacggcugcgacuauguaagcaacaaaggugucgauacaguaucaguaggaaacacacuauacugcguaaacaaacaagaaggacaaucacucuacguaaaaggugaaccaaucauaaacuucuacgacccauuaguuuucccaucagacgaauuugaugccuccauaucacaaguaaaugaaaaaauaaaucaaucccuagcauucauacgaaaaucugaugaauuacuucacaaugucaacgucggaaaaucaaccacuaacauaaugauaacaacaauuauaauaguaauaauaguaauacuccuacuauuaauagccgucggucuuuuccuauacugcaaagcacgauaaggacuaguacuggcugcaucucccuuuccucuguccuccauccuucucccaggauggugaagggggaccugguacccagugauccccaccccaggauccuaaaucaugacuuaccugcuaauaaaaacucauuggaaaagugagaagaucuaaaaaaaaaaaaaaaaaaaaaaaaaaaaaaaaaaaaaaaaaaaaaaaaaaaaaaaaaaaaaaaaugcaucccccccccccccccccccccccccccccccaaaggcucuuuucagagccaccagaauu

SEQ ID NO: 16089 - RNA, 1923 nt, Artificial Sequence
  mRNA product Design h-1 comprising derived and/or modified sequence from HRSV(Memphis-37)__AIY60640.1__F-del_DSCav1_mut3 (opt11)
gggagacccgugacccggaaguuguacggcuacgcgacuuucccucccacaaacccucgcgcccuuccuuuccuacuugggcccggcagaaagcuuaccauggaacuacccauccucaaaaccaacgccaucaccacaauccuagcugccgucacccuaugcuucgcaagcagccaaaacaucacagaagaauuuuaccaaucaaccugcuccgccgucuccaaaggguaccuaggugcccuccgcaccggcugguacacgucugucauaaccaucgaacucuccaacaucaaagaaaucaaauguaacggaacagacgcaaaagucaaacuaaucaaacaagaacuagacaaauacaaaaacgccguaaccgaccuccaacugcucaugcaauccacccccgcugccggcuccgggagcgcaaucugcucuggaaucgccguaugcaaaguccuccaccucgaaggagaaguaaacaaaaucaaaaacgcgcuccucaguaccaacaaagccgucgucucucuaucaaacggcguaucgguccucaccuucaaaguccucgaccuaaagaacuacauagacaaacaacuccuccccauccuaaacaaacaauccugcucaaucccaaacaucgaaaccgugaucgaguuccaacagaaaaacaaccgccuacucgaaaucacccgagaguucucagucaacgcaggagucaccacccccgucucaacauacaugcuuaccaacagcgaacuccuaucccucaucaacgacaugccaaucacaaacgaccaaaagaaacucaugagcaacaacguccagaucguaagacaacaaagcuacagcaucaugugcaucaucaaagaagaaguacuagcauacgucguccaacucccccucuacggcgucaucgacacccccugcuggaaacuccacaccucaccccucugcacaaccaacaccaaagaaggcuccaauaucugccucacacgcaccgaccgcggcugguacugcgacaacgccggcuccgucuccuucuucccucaagccgaaaccugcaaaguccaguccaacagagucuucugcgacaccaugaacucccuaacacuuccaucagaagucaaccuuuguaacaucgacaucuucaaucccaaauacgacuguaaaauaaugaccucaaaaacugacgugucaagcucaguuaucaccucccuaggggccaucgucuccugcuacggcaaaacaaaaugcaccgcauccaacaaaaaucgcggaaucaucaaaacauucuccaacggaugcgacuacgucucaaacaagggaguagauaccguaagcguuggcaacacccucuacugcguaaacaaacaagaaggccaaucacucuacgucaaaggcgaacccauaaucaacuucuacgacccccucgucuucccuuccgaugaguucgacgccagcaucucccaagucaacgagaaaauaaaccagucacucgcauucauccgcaaaagcgacgaacuccuccacaacguaaacguaggcaaauccacaaccaauaucaugauaaccacaaucaucaucgugaucaucgucauccuccuccuccucauagcugucggacucuuccucuacuguaaagcacgcugaggacuaguacuggcugcaucucccuuuccucuguccuccauccuucucccaggauggugaagggggaccugguacccagugauccccaccccaggauccuaaaucaugacuuaccugcuaauaaaaacucauuggaaaagugagaagaucuaaaaaaaaaaaaaaaaaaaaaaaaaaaaaaaaaaaaaaaaaaaaaaaaaaaaaaaaaaaaaaaaugcaucccccccccccccccccccccccccccccccaaaggcucuuuucagagccaccagaauu

SEQ ID NO: 16090 - RNA, 2139 nt, Artificial Sequence
  mRNA product Design h-2 comprising derived and/or modified sequence from HRSV(Memphis-37)__AIY60640.1__F-del_DSCav1_mut3 (opt1)
gggagacccgugacccggaaguuguacggcuacgcgacuuucccucccacaaacccucgcgcccuuccuuuccuacuugggcccggcagaaagcuuaccauggagcugcccauccucaagaccaacgccaucaccacgauccuggccgcggugacccugugcuucgccagcucccagaacaucaccgaggaguucuaccagagcacgugcuccgccgucagcaagggcuaccucggcgcccugcgcaccgggugguacaccagcgugaucaccaucgagcuguccaacaucaaggagaucaagugcaacggcaccgacgccaaggugaagcucaucaagcaggagcuggacaaguacaagaacgcggucacggaccugcagcuccugaugcagagcaccccggccgccggcuccgggagcgcgaucugcuccggcaucgccgucugcaaggugcugcaccucgagggcgaggugaacaagaucaagaacgcccugcuguccaccaacaaggccgucgugagccucuccaacggggugagcguccugaccuucaaggugcuggaccucaagaacuacaucgacaagcagcugcugcccauccugaacaagcagagcugcuccauccccaacaucgagaccgucaucgaguuccagcagaagaacaaccgccuccuggagaucacgcgggaguucagcgugaacgcgggcgugaccacccccgucuccaccuacaugcugacgaacagcgagcuccugucccugaucaacgacaugccgaucaccaacgaccagaagaagcucaugagcaacaacgugcagaucgugcgccagcaguccuacagcaucaugugcaucaucaaggaggagguccuggccuacguggugcagcugccccucuacggggucaucgacacccccugcuggaagcugcacaccagcccccugugcacgaccaacaccaaggagggcuccaacaucugccucacccggacggaccgcgggugguacugcgacaacgccggcagcguguccuucuucccgcaggccgagaccugcaagguccagagcaaccggguguucugcgacaccaugaacucccugacccugcccagcgaggugaaccucugcaacaucgacaucuucaaccccaaguacgacugcaagaucaugacguccaagaccgacgucagcuccagcgugaucaccucccugggcgccaucgugagcugcuacgggaagaccaagugcacggcgagcaacaagaaccgcggcaucaucaagaccuucuccaacgggugcgacuacgucagcaacaagggcguggacaccguguccgucggcaacacccuguacugcgugaacaagcaggagggccagagccucuacgugaagggggagcccaucaucaacuucuacgacccgcuggucuuccccuccgacgaguucgacgccagcaucucccaggugaacgagaagaucaaccagagccuggccuucauccggaaguccgacgagcuccugcacaacgugaacgucggcaagagcaccacgaacaucaugaucaccaccaucaucaucgugaucaucgugauccugcugcuccugaucgccgucgggcuguuccucuacugcaaggcccgcugaggacuagugaagggaacacccaaauuuaauucagccuuaagcacaauuaauuaagagugaaacguaauuguacaagcaguuggucacccaccauagggcaugaucaacaccgcaaccuuuccuuuuucccccagugauucugaaaaaccccucuucccuucagcuugcuuagauguuccaaauuuaguaagcuuaaggcggccuacagaagaaaaagaaaaaaaaggccacaaaaguucccucucacuuucaguaaauaaaauaaaagcagcaacagaaauaaagaaauaaaugaaauucaaaaugaaauaaauauuguguugugcagcauuaaaaaaucaauaaaaauuaaaaaugagcaagaucuaaaaaaaaaaaaaaaaaaaaaaaaaaaaaaaaaaaaaaaaaaaaaaaaaaaaaaaaaaaaaaaaugcaucccccccccccccccccccccccccccccccaaaggcucuuuucagagccaccagaauu

SEQ ID NO: 16091 - RNA, 2139 nt, Artificial Sequence
  mRNA product Design h-2 comprising derived and/or modified sequence from HRSV(Memphis-37)__AIY60640.1__F-del_DSCav1_mut3 (opt1)
gggagacccgugacccggaaguuguacggcuacgcgacuuucccucccacaaacccucgcgcccuuccuuuccuacuugggcccggcagaaagcuuaccauggagcugcccauccucaagaccaacgccaucaccacgauccuggccgcggugacccugugcuucgccagcucccagaacaucaccgaggaguucuaccagagcacgugcuccgccgucagcaagggcuaccucggggcccugcgcaccggcugguacaccuccgugaucaccaucgagcugagcaacaucaaggagaucaagugcaacgggaccgacgccaaggugaagcucaucaagcaggagcuggacaaguacaagaacgcggucacggaccugcagcuccugaugcaguccaccccggccgccggcagcggguccgccaucugcagcggcaucgcggugugcaaggugcugcaccucgagggcgaggucaacaagaucaagaacgcccugcuguccaccaacaaggccguggugagccucuccaacggggucagcgugcugaccuucaaggugcuggaccucaagaacuacaucgacaagcagcugcugcccauccucaacaagcaguccugcagcauccccaacaucgagacggucaucgaguuccagcagaagaacaaccggcugcuggagaucacccgcgaguucuccgugaacgccggcgugaccacccccgucagcacguacaugcucaccaacuccgagcugcugagccucaucaacgacaugccgaucaccaacgaccagaagaagcugaugagcaacaacgugcagaucgugcggcagcaguccuacagcaucaugugcaucaucaaggaggagguccuggccuacguggugcagcucccccuguacggggucaucgacacccccugcuggaagcugcacacgagcccccucugcaccaccaacaccaaggagggcuccaacaucugccugacgcgcaccgaccgggggugguacugcgacaacgcgggcuccgugagcuucuucccgcaggccgagaccugcaaggugcaguccaaccgcgucuucugcgacaccaugaacagccugacgcuccccuccgaggugaaccugugcaacaucgacaucuucaaccccaaguacgacugcaagaucaugaccagcaagaccgacgucuccagcuccgugaucaccagccugggcgccaucguguccugcuacgggaagacgaagugcaccgccagcaacaagaaccggggcaucaucaagaccuucuccaacgggugcgacuacgucagcaacaagggcguggacaccguguccgucggcaacacgcucuacugcgugaacaagcaggaggggcagagccuguacgugaagggcgagcccaucaucaacuucuacgacccgcuggucuuccccagcgacgaguucgacgccuccaucagccaggugaacgagaagaucaaccagucccucgcguucauccgcaagagcgacgagcugcugcacaacgugaacgucgggaaguccaccaccaacaucaugaucaccaccaucaucaucgugaucaucgugauccuccugcugcucaucgccgucggccuguuccuguacugcaaggcccggugaggacuagugaagggaacacccaaauuuaauucagccuuaagcacaauuaauuaagagugaaacguaauuguacaagcaguuggucacccaccauagggcaugaucaacaccgcaaccuuuccuuuuucccccagugauucugaaaaaccccucuucccuucagcuugcuuagauguuccaaauuuaguaagcuuaaggcggccuacagaagaaaaagaaaaaaaaggccacaaaaguucccucucacuuucaguaaauaaaauaaaagcagcaacagaaauaaagaaauaaaugaaauucaaaaugaaauaaauauuguguugugcagcauuaaaaaaucaauaaaaauuaaaaaugagcaagaucuaaaaaaaaaaaaaaaaaaaaaaaaaaaaaaaaaaaaaaaaaaaaaaaaaaaaaaaaaaaaaaaaugcaucccccccccccccccccccccccccccccccaaaggcucuuuucagagccaccagaauu

SEQ ID NO: 16092 - RNA, 2139 nt, Artificial Sequence
  mRNA product Design h-2 comprising derived and/or modified sequence from HRSV(Memphis-37)__AIY60640.1__F-del_DSCav1_mut3 (opt2)
gggagacccgugacccggaaguuguacggcuacgcgacuuucccucccacaaacccucgcgcccuuccuuuccuacuugggcccggcagaaagcuuaccauggagcuccccauccucaagaccaacgccaucaccaccauccucgccgccgucacccucugcuucgccuccucccagaacaucaccgaggaguucuaccaguccaccugcuccgccgucuccaagggcuaccucggcgcccuccgcaccggcugguacaccuccgucaucaccaucgagcucuccaacaucaaggagaucaagugcaacggcaccgacgccaaggucaagcucaucaagcaggagcucgacaaguacaagaacgccgucaccgaccuccagcuccucaugcaguccacccccgccgccggcuccggcuccgccaucugcuccggcaucgccgucugcaagguccuccaccucgagggcgaggucaacaagaucaagaacgcccuccucuccaccaacaaggccgucgucucccucuccaacggcgucuccguccucaccuucaagguccucgaccucaagaacuacaucgacaagcagcuccuccccauccucaacaagcaguccugcuccauccccaacaucgagaccgucaucgaguuccagcagaagaacaaccgccuccucgagaucacccgcgaguucuccgucaacgccggcgucaccacccccgucuccaccuacaugcucaccaacuccgagcuccucucccucaucaacgacaugcccaucaccaacgaccagaagaagcucauguccaacaacguccagaucguccgccagcaguccuacuccaucaugugcaucaucaaggaggagguccucgccuacgucguccagcucccccucuacggcgucaucgacacccccugcuggaagcuccacaccuccccccucugcaccaccaacaccaaggagggcuccaacaucugccucacccgcaccgaccgcggcugguacugcgacaacgccggcuccgucuccuucuucccccaggccgagaccugcaagguccaguccaaccgcgucuucugcgacaccaugaacucccucacccuccccuccgaggucaaccucugcaacaucgacaucuucaaccccaaguacgacugcaagaucaugaccuccaagaccgacgucuccuccuccgucaucaccucccucggcgccaucgucuccugcuacggcaagaccaagugcaccgccuccaacaagaaccgcggcaucaucaagaccuucuccaacggcugcgacuacgucuccaacaagggcgucgacaccgucuccgucggcaacacccucuacugcgucaacaagcaggagggccagucccucuacgucaagggcgagcccaucaucaacuucuacgacccccucgucuuccccuccgacgaguucgacgccuccaucucccaggucaacgagaagaucaaccagucccucgccuucauccgcaaguccgacgagcuccuccacaacgucaacgucggcaaguccaccaccaacaucaugaucaccaccaucaucaucgucaucaucgucauccuccuccuccucaucgccgucggccucuuccucuacugcaaggcccgcugaggacuagugaagggaacacccaaauuuaauucagccuuaagcacaauuaauuaagagugaaacguaauuguacaagcaguuggucacccaccauagggcaugaucaacaccgcaaccuuuccuuuuucccccagugauucugaaaaaccccucuucccuucagcuugcuuagauguuccaaauuuaguaagcuuaaggcggccuacagaagaaaaagaaaaaaaaggccacaaaaguucccucucacuuucaguaaauaaaauaaaagcagcaacagaaauaaagaaauaaaugaaauucaaaaugaaauaaauauuguguugugcagcauuaaaaaaucaauaaaaauuaaaaaugagcaagaucuaaaaaaaaaaaaaaaaaaaaaaaaaaaaaaaaaaaaaaaaaaaaaaaaaaaaaaaaaaaaaaaaugcaucccccccccccccccccccccccccccccccaaaggcucuuuucagagccaccagaauu

SEQ ID NO: 16093 - RNA, 2139 nt, Artificial Sequence
  mRNA product Design h-2 comprising derived and/or modified sequence from HRSV(Memphis-37)__AIY60640.1__F-del_DSCav1_mut3 (opt3)
gggagacccgugacccggaaguuguacggcuacgcgacuuucccucccacaaacccucgcgcccuuccuuuccuacuugggcccggcagaaagcuuaccauggagcugcccauccucaagaccaacgccauuacaacuauacuugcugcagugacgcugugcuucgccagcucccagaauaucaccgaagaguuuuaccaaucuacauguucagcggucaguaaaggcuauuugggggcuuuaagaacuggaugguacaccagcguuauuacaaucgaacuguccaacauuaaggagaucaaaugcaaugguaccgacgccaaggugaaacuaauaaagcaggaacucgauaaguauaaaaacgcaguaacugaccugcagcuucugaugcagucuacuccugccgcuggcucggggucagcaaucuguagcggaauugccgugugcaaggucuugcaccucgagggcgaggugaauaaaaucaagaacgcucugcugaguaccaauaaagccguugugucccucucuaacggugucagcguguuaacguucaagguacuggaucuuaagaauuacauugacaaacaauugcugccaauccuaaacaagcaguccuguucaauaccgaauauugaaacuguuaucgaguuucagcagaaaaacaauaggcuccuggaaauuacccgggaguucagugugaacgcgggggucacaacucccgugagcaccuauaugcuuacaaauucugagcuguugucccucaucaacgauaugccuaucaccaacgaccaaaagaaacugaugucaaauaacgugcagauuguccgccagcagagcuacaguauaaugugcaucauuaaggaagagguuuuagcauaugugguacaacugccacucuacggagugaucgauacgcccuguuggaaacuucauacuucuccucugugcacaaccaauacuaaggaaggcuccaacauauguuugacacgaaccgaccguggcugguacugcgauaaugccgggagcgucucguuuuucccacaggcugagacguguaaggugcagucuaacagaguuuucugcgacaccaugaacucccuaacacugcccucagaagugaaucucugcaauauugauaucuucaacccuaaauaugacuguaagaucaugacaaguaaaaccgaugucagcuccucugugauuacaagccugggagccaucguaucaugcuacgguaagacuaaauguaccgcaaguaauaagaacaggggcauuauaaagacauuuuccaaugggugcgacuauguuagcaacaaaggaguggacaccgucucugugggcaauacucuuuacugugucaacaagcaagagggucagucacuguaugugaaaggggagccaaucauuaacuucuacgauccguugguuuuucccagugacgaauuugaugcuagcaucucccaggugaaugagaagaucaaccagucucucgccuuuauucggaaaucggacgaacuguuacacaauguaaacgucggaaagagcacgacaaauauaaugaucaccacuauuaucauugugaucauaguuauccugcuacuccugauugcggugggccuuuucuuguauugcaaggcccgcugaggacuagugaagggaacacccaaauuuaauucagccuuaagcacaauuaauuaagagugaaacguaauuguacaagcaguuggucacccaccauagggcaugaucaacaccgcaaccuuuccuuuuucccccagugauucugaaaaaccccucuucccuucagcuugcuuagauguuccaaauuuaguaagcuuaaggcggccuacagaagaaaaagaaaaaaaaggccacaaaaguucccucucacuuucaguaaauaaaauaaaagcagcaacagaaauaaagaaauaaaugaaauucaaaaugaaauaaauauuguguugugcagcauuaaaaaaucaauaaaaauuaaaaaugagcaagaucuaaaaaaaaaaaaaaaaaaaaaaaaaaaaaaaaaaaaaaaaaaaaaaaaaaaaaaaaaaaaaaaaugcaucccccccccccccccccccccccccccccccaaaggcucuuuucagagccaccagaauu

SEQ ID NO: 16094 - RNA, 2139 nt, Artificial Sequence
  mRNA product Design h-2 comprising derived and/or modified sequence from HRSV(Memphis-37)__AIY60640.1__F-del_DSCav1_mut3 (opt4)
gggagacccgugacccggaaguuguacggcuacgcgacuuucccucccacaaacccucgcgcccuuccuuuccuacuugggcccggcagaaagcuuaccauggagcugcccauccugaagaccaacgccaucaccaccauccuggccgccgugacccugugcuucgccagcagccagaacaucaccgaggaguucuaccagagcaccugcagcgccgugagcaagggcuaccugggcgcccugagaaccggcugguacaccagcgugaucaccaucgagcugagcaacaucaaggagaucaagugcaacggcaccgacgccaaggugaagcugaucaagcaggagcuggacaaguacaagaacgccgugaccgaccugcagcugcugaugcagagcacccccgccgccggcagcggcagcgccaucugcagcggcaucgccgugugcaaggugcugcaccuggagggcgaggugaacaagaucaagaacgcccugcugagcaccaacaaggccguggugagccugagcaacggcgugagcgugcugaccuucaaggugcuggaccugaagaacuacaucgacaagcagcugcugcccauccugaacaagcagagcugcagcauccccaacaucgagaccgugaucgaguuccagcagaagaacaacagacugcuggagaucaccagagaguucagcgugaacgccggcgugaccacccccgugagcaccuacaugcugaccaacagcgagcugcugagccugaucaacgacaugcccaucaccaacgaccagaagaagcugaugagcaacaacgugcagaucgugagacagcagagcuacagcaucaugugcaucaucaaggaggaggugcuggccuacguggugcagcugccccuguacggcgugaucgacacccccugcuggaagcugcacaccagcccccugugcaccaccaacaccaaggagggcagcaacaucugccugaccagaaccgacagaggcugguacugcgacaacgccggcagcgugagcuucuucccccaggccgagaccugcaaggugcagagcaacagaguguucugcgacaccaugaacagccugacccugcccagcgaggugaaccugugcaacaucgacaucuucaaccccaaguacgacugcaagaucaugaccagcaagaccgacgugagcagcagcgugaucaccagccugggcgccaucgugagcugcuacggcaagaccaagugcaccgccagcaacaagaacagaggcaucaucaagaccuucagcaacggcugcgacuacgugagcaacaagggcguggacaccgugagcgugggcaacacccuguacugcgugaacaagcaggagggccagagccuguacgugaagggcgagcccaucaucaacuucuacgacccccugguguuccccagcgacgaguucgacgccagcaucagccaggugaacgagaagaucaaccagagccuggccuucaucagaaagagcgacgagcugcugcacaacgugaacgugggcaagagcaccaccaacaucaugaucaccaccaucaucaucgugaucaucgugauccugcugcugcugaucgccgugggccuguuccuguacugcaaggccagaugaggacuagugaagggaacacccaaauuuaauucagccuuaagcacaauuaauuaagagugaaacguaauuguacaagcaguuggucacccaccauagggcaugaucaacaccgcaaccuuuccuuuuucccccagugauucugaaaaaccccucuucccuucagcuugcuuagauguuccaaauuuaguaagcuuaaggcggccuacagaagaaaaagaaaaaaaaggccacaaaaguucccucucacuuucaguaaauaaaauaaaagcagcaacagaaauaaagaaauaaaugaaauucaaaaugaaauaaauauuguguugugcagcauuaaaaaaucaauaaaaauuaaaaaugagcaagaucuaaaaaaaaaaaaaaaaaaaaaaaaaaaaaaaaaaaaaaaaaaaaaaaaaaaaaaaaaaaaaaaaugcaucccccccccccccccccccccccccccccccaaaggcucuuuucagagccaccagaauu

SEQ ID NO: 16095 - RNA, 2139 nt, Artificial Sequence
  mRNA product Design h-2 comprising derived and/or modified sequence from HRSV(Memphis-37)__AIY60640.1__F-del_DSCav1_mut3 (opt5)
gggagacccgugacccggaaguuguacggcuacgcgacuuucccucccacaaacccucgcgcccuuccuuuccuacuugggcccggcagaaagcuuaccauggagcugcccauccucaagaccaacgccauuacaacgauccuggcugccgugacccuuugcuucgcgagcucccagaauauuacagaagaguuuuaccaaucuaccuguagcgcugucuccaaaggcuaucugggggcccucagaacaggaugguacaccucuguuaucacaauugaacugagcaacaucaaggagaucaaaugcaauggcaccgacgccaaggugaaacuuauuaagcaggaacuggauaaguauaaaaacgcugugacggaccuccagcugcugaugcaguccaccccugccgcugggucuggaagcgccaucuguuccggcauugcggucugcaaggugcuccaccuggagggggagguuaauaaaaucaagaacgcccuucugagcacaaauaaagcuguggucucucucuccaacggagugagcguucugaccuucaaggugcuugaucugaagaauuacauugacaaacaacuccugccgauccugaacaagcagucuuguuccauucccaauaucgaaacagucaucgaguuucagcagaaaaacaaucggcuccuggaaauuacccgcgaguucagcgugaacgccggcgugacgacaccugucucuaccuauaugcuuacaaauuccgagcugcucagccugaucaacgauaugcccauuaccaacgaccaaaagaaacuuauguccaauaacguucagaucgugagacagcagucuuacagcauuaugugcaucaucaaggaagaggugcuggcuuaugucgugcaacucccucuguacggcguuauugauacccccuguuggaaacugcauacauccccucucugcacgaccaauacaaaggaagggagcaacaucugucugacccggacagaccgcggaugguacugcgauaaugccggcucuguguccuuuuucccgcaggcggagaccuguaagguccagagcaacagaguguuuugcgacacgaugaacucucuuacacugcccagcgaaguuaaucucugcaauauugauaucuucaacccuaaauaugacuguaagauuaugaccuccaaaaccgaugugucuagcuccgucaucacaagccugggggccaucgugucuugcuacggaaagaccaaauguacagcuuccaauaagaaccggggcauuaucaagacguuuagcaaugggugcgacuaugucucuaacaaaggaguggacaccguuuccgugggcaauacacuuuacugugucaacaagcaagagggccagagccuguaugugaaaggggagcccauuaucaacuucuacgauccucucguuuuucccuccgacgaguucgaugccucuauuagccaggugaaugaaaagaucaaccagucccuggcuuuuauucgcaaaucugacgaacugcuccacaaugucaacgugggaaagagcaccacaaauaucaugaucaccacgauuaucauugugaucauuguuauccugcuucugcucaucgccgucggccuguuccuguauugcaaggccagaugaggacuagugaagggaacacccaaauuuaauucagccuuaagcacaauuaauuaagagugaaacguaauuguacaagcaguuggucacccaccauagggcaugaucaacaccgcaaccuuuccuuuuucccccagugauucugaaaaaccccucuucccuucagcuugcuuagauguuccaaauuuaguaagcuuaaggcggccuacagaagaaaaagaaaaaaaaggccacaaaaguucccucucacuuucaguaaauaaaauaaaagcagcaacagaaauaaagaaauaaaugaaauucaaaaugaaauaaauauuguguugugcagcauuaaaaaaucaauaaaaauuaaaaaugagcaagaucuaaaaaaaaaaaaaaaaaaaaaaaaaaaaaaaaaaaaaaaaaaaaaaaaaaaaaaaaaaaaaaaaugcaucccccccccccccccccccccccccccccccaaaggcucuuuucagagccaccagaauu

SEQ ID NO: 16096 - RNA, 2139 nt, Artificial Sequence
  mRNA product Design h-2 comprising derived and/or modified sequence from HRSV(Memphis-37)__AIY60640.1__F-del_DSCav1_mut3 (opt6)
gggagacccgugacccggaaguuguacggcuacgcgacuuucccucccacaaacccucgcgcccuuccuuuccuacuugggcccggcagaaagcuuaccauggaacuacccauccuaaaaacaaaugccauaaccacaauacucgccgcuguaacacuauguuucgcuaguucacaaaacauuacagaagaauuuuaccaauccacaugcucagcaguaucaaaaggauaccuaggugcacuaagaacaggaugguacacaagcguaauuacaauagaauuauccaauauuaaagaaauaaaauguaacggcacugacgcuaaaguaaaauuaaucaaacaagaacuagacaaauacaaaaacgcaguaacagaccuacaauuacucaugcaauccacacccgcagcaggaucaggcucagccauaugcucagguauagcaguaugcaaaguacuccaccuugaaggagaaguaaacaaaauaaaaaacgcauuacuaucaacaaacaaagcaguaguaucacuaucaaacggagucucugucuuaaccuuuaaaguauuagauuuaaaaaacuacauagacaaacaacuauuaccaauucuaaauaaacaaucauguucuauaccaaauauagaaacaguaauagaauuucaacaaaaaaacaaccgauuacuagaaaucacaagagaauuuucugucaacgccggcguaaccaccccagucucaacauauaugcuaacaaauagugaacucuuauccuuaauaaacgacaugccaauaacaaaugaccaaaaaaaauuaauguccaauaacguacaaauagucagacaacagucauacucaauaauguguaucaucaaagaagaaguauuagcauacguaguucaacuaccccuauacggcguaauagacacaccauguuggaaacuacacacaucacccuuaugcacaaccaauaccaaagaaggaucuaacauaugccuaaccagaacagacagaggcugguacugcgacaacgcagguucagucucauucuucccacaagccgaaacaugcaaaguccaauccaacagaguauuuugcgacacuaugaacucacuaacucuaccuucagaagucaaccuuuguaacauagacauauuuaacccaaaauacgauuguaaaauaaugaccagcaaaacagacgucucaucaagcguaauaacaucacuuggcgcaauagucuccugcuacggaaaaacaaaaugcacagcauccaacaaaaacagaggcaucauaaaaaccuucuccaacggcugcgacuauguaagcaacaaaggugucgauacaguaucaguaggaaacacacuauacugcguaaacaaacaagaaggacaaucacucuacguaaaaggugaaccaaucauaaacuucuacgacccauuaguuuucccaucagacgaauuugaugccuccauaucacaaguaaaugaaaaaauaaaucaaucccuagcauucauacgaaaaucugaugaauuacuucacaaugucaacgucggaaaaucaaccacuaacauaaugauaacaacaauuauaauaguaauaauaguaauacuccuacuauuaauagccgucggucuuuuccuauacugcaaagcacgauaaggacuagugaagggaacacccaaauuuaauucagccuuaagcacaauuaauuaagagugaaacguaauuguacaagcaguuggucacccaccauagggcaugaucaacaccgcaaccuuuccuuuuucccccagugauucugaaaaaccccucuucccuucagcuugcuuagauguuccaaauuuaguaagcuuaaggcggccuacagaagaaaaagaaaaaaaaggccacaaaaguucccucucacuuucaguaaauaaaauaaaagcagcaacagaaauaaagaaauaaaugaaauucaaaaugaaauaaauauuguguugugcagcauuaaaaaaucaauaaaaauuaaaaaugagcaagaucuaaaaaaaaaaaaaaaaaaaaaaaaaaaaaaaaaaaaaaaaaaaaaaaaaaaaaaaaaaaaaaaaugcaucccccccccccccccccccccccccccccccaaaggcucuuuucagagccaccagaauu

SEQ ID NO: 16097 - RNA, 2139 nt, Artificial Sequence
  mRNA product Design h-2 comprising derived and/or modified sequence from HRSV(Memphis-37)__AIY60640.1__F-del_DSCav1_mut3 (opt11)
gggagacccgugacccggaaguuguacggcuacgcgacuuucccucccacaaacccucgcgcccuuccuuuccuacuugggcccggcagaaagcuuaccauggaacuacccauccucaaaaccaacgccaucaccacaauccuagcugccgucacccuaugcuucgcaagcagccaaaacaucacagaagaauuuuaccaaucaaccugcuccgccgucuccaaaggguaccuaggugcccuccgcaccggcugguacacgucugucauaaccaucgaacucuccaacaucaaagaaaucaaauguaacggaacagacgcaaaagucaaacuaaucaaacaagaacuagacaaauacaaaaacgccguaaccgaccuccaacugcucaugcaauccacccccgcugccggcuccgggagcgcaaucugcucuggaaucgccguaugcaaaguccuccaccucgaaggagaaguaaacaaaaucaaaaacgcgcuccucaguaccaacaaagccgucgucucucuaucaaacggcguaucgguccucaccuucaaaguccucgaccuaaagaacuacauagacaaacaacuccuccccauccuaaacaaacaauccugcucaaucccaaacaucgaaaccgugaucgaguuccaacagaaaaacaaccgccuacucgaaaucacccgagaguucucagucaacgcaggagucaccacccccgucucaacauacaugcuuaccaacagcgaacuccuaucccucaucaacgacaugccaaucacaaacgaccaaaagaaacucaugagcaacaacguccagaucguaagacaacaaagcuacagcaucaugugcaucaucaaagaagaaguacuagcauacgucguccaacucccccucuacggcgucaucgacacccccugcuggaaacuccacaccucaccccucugcacaaccaacaccaaagaaggcuccaauaucugccucacacgcaccgaccgcggcugguacugcgacaacgccggcuccgucuccuucuucccucaagccgaaaccugcaaaguccaguccaacagagucuucugcgacaccaugaacucccuaacacuuccaucagaagucaaccuuuguaacaucgacaucuucaaucccaaauacgacuguaaaauaaugaccucaaaaacugacgugucaagcucaguuaucaccucccuaggggccaucgucuccugcuacggcaaaacaaaaugcaccgcauccaacaaaaaucgcggaaucaucaaaacauucuccaacggaugcgacuacgucucaaacaagggaguagauaccguaagcguuggcaacacccucuacugcguaaacaaacaagaaggccaaucacucuacgucaaaggcgaacccauaaucaacuucuacgacccccucgucuucccuuccgaugaguucgacgccagcaucucccaagucaacgagaaaauaaaccagucacucgcauucauccgcaaaagcgacgaacuccuccacaacguaaacguaggcaaauccacaaccaauaucaugauaaccacaaucaucaucgugaucaucgucauccuccuccuccucauagcugucggacucuuccucuacuguaaagcacgcugaggacuagugaagggaacacccaaauuuaauucagccuuaagcacaauuaauuaagagugaaacguaauuguacaagcaguuggucacccaccauagggcaugaucaacaccgcaaccuuuccuuuuucccccagugauucugaaaaaccccucuucccuucagcuugcuuagauguuccaaauuuaguaagcuuaaggcggccuacagaagaaaaagaaaaaaaaggccacaaaaguucccucucacuuucaguaaauaaaauaaaagcagcaacagaaauaaagaaauaaaugaaauucaaaaugaaauaaauauuguguugugcagcauuaaaaaaucaauaaaaauuaaaaaugagcaagaucuaaaaaaaaaaaaaaaaaaaaaaaaaaaaaaaaaaaaaaaaaaaaaaaaaaaaaaaaaaaaaaaaugcaucccccccccccccccccccccccccccccccaaaggcucuuuucagagccaccagaauu

SEQ ID NO: 16098 - RNA, 1919 nt, Artificial Sequence
  mRNA product Design h-3 comprising derived and/or modified sequence from HRSV(Memphis-37)__AIY60640.1__F-del_DSCav1_mut3 (opt1)
gggagacccgugacccggaaguuguacggcuacgcgacuuucccucccacaaacccucgcgcccuuccuuuccuacuugggcccggcagaaagcuuaccauggagcugcccauccucaagaccaacgccaucaccacgauccuggccgcggugacccugugcuucgccagcucccagaacaucaccgaggaguucuaccagagcacgugcuccgccgucagcaagggcuaccucggcgcccugcgcaccgggugguacaccagcgugaucaccaucgagcuguccaacaucaaggagaucaagugcaacggcaccgacgccaaggugaagcucaucaagcaggagcuggacaaguacaagaacgcggucacggaccugcagcuccugaugcagagcaccccggccgccggcuccgggagcgcgaucugcuccggcaucgccgucugcaaggugcugcaccucgagggcgaggugaacaagaucaagaacgcccugcuguccaccaacaaggccgucgugagccucuccaacggggugagcguccugaccuucaaggugcuggaccucaagaacuacaucgacaagcagcugcugcccauccugaacaagcagagcugcuccauccccaacaucgagaccgucaucgaguuccagcagaagaacaaccgccuccuggagaucacgcgggaguucagcgugaacgcgggcgugaccacccccgucuccaccuacaugcugacgaacagcgagcuccugucccugaucaacgacaugccgaucaccaacgaccagaagaagcucaugagcaacaacgugcagaucgugcgccagcaguccuacagcaucaugugcaucaucaaggaggagguccuggccuacguggugcagcugccccucuacggggucaucgacacccccugcuggaagcugcacaccagcccccugugcacgaccaacaccaaggagggcuccaacaucugccucacccggacggaccgcgggugguacugcgacaacgccggcagcguguccuucuucccgcaggccgagaccugcaagguccagagcaaccggguguucugcgacaccaugaacucccugacccugcccagcgaggugaaccucugcaacaucgacaucuucaaccccaaguacgacugcaagaucaugacguccaagaccgacgucagcuccagcgugaucaccucccugggcgccaucgugagcugcuacgggaagaccaagugcacggcgagcaacaagaaccgcggcaucaucaagaccuucuccaacgggugcgacuacgucagcaacaagggcguggacaccguguccgucggcaacacccuguacugcgugaacaagcaggagggccagagccucuacgugaagggggagcccaucaucaacuucuacgacccgcuggucuuccccuccgacgaguucgacgccagcaucucccaggugaacgagaagaucaaccagagccuggccuucauccggaaguccgacgagcuccugcacaacgugaacgucggcaagagcaccacgaacaucaugaucaccaccaucaucaucgugaucaucgugauccugcugcuccugaucgccgucgggcuguuccucuacugcaaggcccgcugaggacuaguggaagcauuuuccuggcugauuaaaagaaauuacucagcuauggucaucuguuccuguuagaaggcuaugcagcauauuauauacuaugcgcauguuaugaaaugcauaauaaaaaauuuuaaaaaaucuaaaagaucuaaaaaaaaaaaaaaaaaaaaaaaaaaaaaaaaaaaaaaaaaaaaaaaaaaaaaaaaaaaaaaaaugcaucccccccccccccccccccccccccccccccaaaggcucuuuucagagccaccagaauu

SEQ ID NO: 16099 - RNA, 1919 nt, Artificial Sequence
  mRNA product Design h-3 comprising derived and/or modified sequence from HRSV(Memphis-37)__AIY60640.1__F-del_DSCav1_mut3 (opt1)
gggagacccgugacccggaaguuguacggcuacgcgacuuucccucccacaaacccucgcgcccuuccuuuccuacuugggcccggcagaaagcuuaccauggagcugcccauccucaagaccaacgccaucaccacgauccuggccgcggugacccugugcuucgccagcucccagaacaucaccgaggaguucuaccagagcacgugcuccgccgucagcaagggcuaccucggggcccugcgcaccggcugguacaccuccgugaucaccaucgagcugagcaacaucaaggagaucaagugcaacgggaccgacgccaaggugaagcucaucaagcaggagcuggacaaguacaagaacgcggucacggaccugcagcuccugaugcaguccaccccggccgccggcagcggguccgccaucugcagcggcaucgcggugugcaaggugcugcaccucgagggcgaggucaacaagaucaagaacgcccugcuguccaccaacaaggccguggugagccucuccaacggggucagcgugcugaccuucaaggugcuggaccucaagaacuacaucgacaagcagcugcugcccauccucaacaagcaguccugcagcauccccaacaucgagacggucaucgaguuccagcagaagaacaaccggcugcuggagaucacccgcgaguucuccgugaacgccggcgugaccacccccgucagcacguacaugcucaccaacuccgagcugcugagccucaucaacgacaugccgaucaccaacgaccagaagaagcugaugagcaacaacgugcagaucgugcggcagcaguccuacagcaucaugugcaucaucaaggaggagguccuggccuacguggugcagcucccccuguacggggucaucgacacccccugcuggaagcugcacacgagcccccucugcaccaccaacaccaaggagggcuccaacaucugccugacgcgcaccgaccgggggugguacugcgacaacgcgggcuccgugagcuucuucccgcaggccgagaccugcaaggugcaguccaaccgcgucuucugcgacaccaugaacagccugacgcuccccuccgaggugaaccugugcaacaucgacaucuucaaccccaaguacgacugcaagaucaugaccagcaagaccgacgucuccagcuccgugaucaccagccugggcgccaucguguccugcuacgggaagacgaagugcaccgccagcaacaagaaccggggcaucaucaagaccuucuccaacgggugcgacuacgucagcaacaagggcguggacaccguguccgucggcaacacgcucuacugcgugaacaagcaggaggggcagagccuguacgugaagggcgagcccaucaucaacuucuacgacccgcuggucuuccccagcgacgaguucgacgccuccaucagccaggugaacgagaagaucaaccagucccucgcguucauccgcaagagcgacgagcugcugcacaacgugaacgucgggaaguccaccaccaacaucaugaucaccaccaucaucaucgugaucaucgugauccuccugcugcucaucgccgucggccuguuccuguacugcaaggcccggugaggacuaguggaagcauuuuccuggcugauuaaaagaaauuacucagcuauggucaucuguuccuguuagaaggcuaugcagcauauuauauacuaugcgcauguuaugaaaugcauaauaaaaaauuuuaaaaaaucuaaaagaucuaaaaaaaaaaaaaaaaaaaaaaaaaaaaaaaaaaaaaaaaaaaaaaaaaaaaaaaaaaaaaaaaugcaucccccccccccccccccccccccccccccccaaaggcucuuuucagagccaccagaauu

SEQ ID NO: 16100 - RNA, 1919 nt, Artificial Sequence
  mRNA product Design h-3 comprising derived and/or modified sequence from HRSV(Memphis-37)__AIY60640.1__F-del_DSCav1_mut3 (opt2)
gggagacccgugacccggaaguuguacggcuacgcgacuuucccucccacaaacccucgcgcccuuccuuuccuacuugggcccggcagaaagcuuaccauggagcuccccauccucaagaccaacgccaucaccaccauccucgccgccgucacccucugcuucgccuccucccagaacaucaccgaggaguucuaccaguccaccugcuccgccgucuccaagggcuaccucggcgcccuccgcaccggcugguacaccuccgucaucaccaucgagcucuccaacaucaaggagaucaagugcaacggcaccgacgccaaggucaagcucaucaagcaggagcucgacaaguacaagaacgccgucaccgaccuccagcuccucaugcaguccacccccgccgccggcuccggcuccgccaucugcuccggcaucgccgucugcaagguccuccaccucgagggcgaggucaacaagaucaagaacgcccuccucuccaccaacaaggccgucgucucccucuccaacggcgucuccguccucaccuucaagguccucgaccucaagaacuacaucgacaagcagcuccuccccauccucaacaagcaguccugcuccauccccaacaucgagaccgucaucgaguuccagcagaagaacaaccgccuccucgagaucacccgcgaguucuccgucaacgccggcgucaccacccccgucuccaccuacaugcucaccaacuccgagcuccucucccucaucaacgacaugcccaucaccaacgaccagaagaagcucauguccaacaacguccagaucguccgccagcaguccuacuccaucaugugcaucaucaaggaggagguccucgccuacgucguccagcucccccucuacggcgucaucgacacccccugcuggaagcuccacaccuccccccucugcaccaccaacaccaaggagggcuccaacaucugccucacccgcaccgaccgcggcugguacugcgacaacgccggcuccgucuccuucuucccccaggccgagaccugcaagguccaguccaaccgcgucuucugcgacaccaugaacucccucacccuccccuccgaggucaaccucugcaacaucgacaucuucaaccccaaguacgacugcaagaucaugaccuccaagaccgacgucuccuccuccgucaucaccucccucggcgccaucgucuccugcuacggcaagaccaagugcaccgccuccaacaagaaccgcggcaucaucaagaccuucuccaacggcugcgacuacgucuccaacaagggcgucgacaccgucuccgucggcaacacccucuacugcgucaacaagcaggagggccagucccucuacgucaagggcgagcccaucaucaacuucuacgacccccucgucuuccccuccgacgaguucgacgccuccaucucccaggucaacgagaagaucaaccagucccucgccuucauccgcaaguccgacgagcuccuccacaacgucaacgucggcaaguccaccaccaacaucaugaucaccaccaucaucaucgucaucaucgucauccuccuccuccucaucgccgucggccucuuccucuacugcaaggcccgcugaggacuaguggaagcauuuuccuggcugauuaaaagaaauuacucagcuauggucaucuguuccuguuagaaggcuaugcagcauauuauauacuaugcgcauguuaugaaaugcauaauaaaaaauuuuaaaaaaucuaaaagaucuaaaaaaaaaaaaaaaaaaaaaaaaaaaaaaaaaaaaaaaaaaaaaaaaaaaaaaaaaaaaaaaaugcaucccccccccccccccccccccccccccccccaaaggcucuuuucagagccaccagaauu

SEQ ID NO: 16101 - RNA, 1919 nt, Artificial Sequence
  mRNA product Design h-3 comprising derived and/or modified sequence from HRSV(Memphis-37)__AIY60640.1__F-del_DSCav1_mut3 (opt3)
gggagacccgugacccggaaguuguacggcuacgcgacuuucccucccacaaacccucgcgcccuuccuuuccuacuugggcccggcagaaagcuuaccauggagcugcccauccucaagaccaacgccauuacaacuauacuugcugcagugacgcugugcuucgccagcucccagaauaucaccgaagaguuuuaccaaucuacauguucagcggucaguaaaggcuauuugggggcuuuaagaacuggaugguacaccagcguuauuacaaucgaacuguccaacauuaaggagaucaaaugcaaugguaccgacgccaaggugaaacuaauaaagcaggaacucgauaaguauaaaaacgcaguaacugaccugcagcuucugaugcagucuacuccugccgcuggcucggggucagcaaucuguagcggaauugccgugugcaaggucuugcaccucgagggcgaggugaauaaaaucaagaacgcucugcugaguaccaauaaagccguugugucccucucuaacggugucagcguguuaacguucaagguacuggaucuuaagaauuacauugacaaacaauugcugccaauccuaaacaagcaguccuguucaauaccgaauauugaaacuguuaucgaguuucagcagaaaaacaauaggcuccuggaaauuacccgggaguucagugugaacgcgggggucacaacucccgugagcaccuauaugcuuacaaauucugagcuguugucccucaucaacgauaugccuaucaccaacgaccaaaagaaacugaugucaaauaacgugcagauuguccgccagcagagcuacaguauaaugugcaucauuaaggaagagguuuuagcauaugugguacaacugccacucuacggagugaucgauacgcccuguuggaaacuucauacuucuccucugugcacaaccaauacuaaggaaggcuccaacauauguuugacacgaaccgaccguggcugguacugcgauaaugccgggagcgucucguuuuucccacaggcugagacguguaaggugcagucuaacagaguuuucugcgacaccaugaacucccuaacacugcccucagaagugaaucucugcaauauugauaucuucaacccuaaauaugacuguaagaucaugacaaguaaaaccgaugucagcuccucugugauuacaagccugggagccaucguaucaugcuacgguaagacuaaauguaccgcaaguaauaagaacaggggcauuauaaagacauuuuccaaugggugcgacuauguuagcaacaaaggaguggacaccgucucugugggcaauacucuuuacugugucaacaagcaagagggucagucacuguaugugaaaggggagccaaucauuaacuucuacgauccguugguuuuucccagugacgaauuugaugcuagcaucucccaggugaaugagaagaucaaccagucucucgccuuuauucggaaaucggacgaacuguuacacaauguaaacgucggaaagagcacgacaaauauaaugaucaccacuauuaucauugugaucauaguuauccugcuacuccugauugcggugggccuuuucuuguauugcaaggcccgcugaggacuaguggaagcauuuuccuggcugauuaaaagaaauuacucagcuauggucaucuguuccuguuagaaggcuaugcagcauauuauauacuaugcgcauguuaugaaaugcauaauaaaaaauuuuaaaaaaucuaaaagaucuaaaaaaaaaaaaaaaaaaaaaaaaaaaaaaaaaaaaaaaaaaaaaaaaaaaaaaaaaaaaaaaaugcaucccccccccccccccccccccccccccccccaaaggcucuuuucagagccaccagaauu

SEQ ID NO: 16102 - RNA, 1919 nt, Artificial Sequence
  mRNA product Design h-3 comprising derived and/or modified sequence from HRSV(Memphis-37)__AIY60640.1__F-del_DSCav1_mut3 (opt4)
gggagacccgugacccggaaguuguacggcuacgcgacuuucccucccacaaacccucgcgcccuuccuuuccuacuugggcccggcagaaagcuuaccauggagcugcccauccugaagaccaacgccaucaccaccauccuggccgccgugacccugugcuucgccagcagccagaacaucaccgaggaguucuaccagagcaccugcagcgccgugagcaagggcuaccugggcgcccugagaaccggcugguacaccagcgugaucaccaucgagcugagcaacaucaaggagaucaagugcaacggcaccgacgccaaggugaagcugaucaagcaggagcuggacaaguacaagaacgccgugaccgaccugcagcugcugaugcagagcacccccgccgccggcagcggcagcgccaucugcagcggcaucgccgugugcaaggugcugcaccuggagggcgaggugaacaagaucaagaacgcccugcugagcaccaacaaggccguggugagccugagcaacggcgugagcgugcugaccuucaaggugcuggaccugaagaacuacaucgacaagcagcugcugcccauccugaacaagcagagcugcagcauccccaacaucgagaccgugaucgaguuccagcagaagaacaacagacugcuggagaucaccagagaguucagcgugaacgccggcgugaccacccccgugagcaccuacaugcugaccaacagcgagcugcugagccugaucaacgacaugcccaucaccaacgaccagaagaagcugaugagcaacaacgugcagaucgugagacagcagagcuacagcaucaugugcaucaucaaggaggaggugcuggccuacguggugcagcugccccuguacggcgugaucgacacccccugcuggaagcugcacaccagcccccugugcaccaccaacaccaaggagggcagcaacaucugccugaccagaaccgacagaggcugguacugcgacaacgccggcagcgugagcuucuucccccaggccgagaccugcaaggugcagagcaacagaguguucugcgacaccaugaacagccugacccugcccagcgaggugaaccugugcaacaucgacaucuucaaccccaaguacgacugcaagaucaugaccagcaagaccgacgugagcagcagcgugaucaccagccugggcgccaucgugagcugcuacggcaagaccaagugcaccgccagcaacaagaacagaggcaucaucaagaccuucagcaacggcugcgacuacgugagcaacaagggcguggacaccgugagcgugggcaacacccuguacugcgugaacaagcaggagggccagagccuguacgugaagggcgagcccaucaucaacuucuacgacccccugguguuccccagcgacgaguucgacgccagcaucagccaggugaacgagaagaucaaccagagccuggccuucaucagaaagagcgacgagcugcugcacaacgugaacgugggcaagagcaccaccaacaucaugaucaccaccaucaucaucgugaucaucgugauccugcugcugcugaucgccgugggccuguuccuguacugcaaggccagaugaggacuaguggaagcauuuuccuggcugauuaaaagaaauuacucagcuauggucaucuguuccuguuagaaggcuaugcagcauauuauauacuaugcgcauguuaugaaaugcauaauaaaaaauuuuaaaaaaucuaaaagaucuaaaaaaaaaaaaaaaaaaaaaaaaaaaaaaaaaaaaaaaaaaaaaaaaaaaaaaaaaaaaaaaaugcaucccccccccccccccccccccccccccccccaaaggcucuuuucagagccaccagaauu

SEQ ID NO: 16103 - RNA, 1919 nt, Artificial Sequence
  mRNA product Design h-3 comprising derived and/or modified sequence from HRSV(Memphis-37)__AIY60640.1__F-del_DSCav1_mut3 (opt5)
gggagacccgugacccggaaguuguacggcuacgcgacuuucccucccacaaacccucgcgcccuuccuuuccuacuugggcccggcagaaagcuuaccauggagcugcccauccucaagaccaacgccauuacaacgauccuggcugccgugacccuuugcuucgcgagcucccagaauauuacagaagaguuuuaccaaucuaccuguagcgcugucuccaaaggcuaucugggggcccucagaacaggaugguacaccucuguuaucacaauugaacugagcaacaucaaggagaucaaaugcaauggcaccgacgccaaggugaaacuuauuaagcaggaacuggauaaguauaaaaacgcugugacggaccuccagcugcugaugcaguccaccccugccgcugggucuggaagcgccaucuguuccggcauugcggucugcaaggugcuccaccuggagggggagguuaauaaaaucaagaacgcccuucugagcacaaauaaagcuguggucucucucuccaacggagugagcguucugaccuucaaggugcuugaucugaagaauuacauugacaaacaacuccugccgauccugaacaagcagucuuguuccauucccaauaucgaaacagucaucgaguuucagcagaaaaacaaucggcuccuggaaauuacccgcgaguucagcgugaacgccggcgugacgacaccugucucuaccuauaugcuuacaaauuccgagcugcucagccugaucaacgauaugcccauuaccaacgaccaaaagaaacuuauguccaauaacguucagaucgugagacagcagucuuacagcauuaugugcaucaucaaggaagaggugcuggcuuaugucgugcaacucccucuguacggcguuauugauacccccuguuggaaacugcauacauccccucucugcacgaccaauacaaaggaagggagcaacaucugucugacccggacagaccgcggaugguacugcgauaaugccggcucuguguccuuuuucccgcaggcggagaccuguaagguccagagcaacagaguguuuugcgacacgaugaacucucuuacacugcccagcgaaguuaaucucugcaauauugauaucuucaacccuaaauaugacuguaagauuaugaccuccaaaaccgaugugucuagcuccgucaucacaagccugggggccaucgugucuugcuacggaaagaccaaauguacagcuuccaauaagaaccggggcauuaucaagacguuuagcaaugggugcgacuaugucucuaacaaaggaguggacaccguuuccgugggcaauacacuuuacugugucaacaagcaagagggccagagccuguaugugaaaggggagcccauuaucaacuucuacgauccucucguuuuucccuccgacgaguucgaugccucuauuagccaggugaaugaaaagaucaaccagucccuggcuuuuauucgcaaaucugacgaacugcuccacaaugucaacgugggaaagagcaccacaaauaucaugaucaccacgauuaucauugugaucauuguuauccugcuucugcucaucgccgucggccuguuccuguauugcaaggccagaugaggacuaguggaagcauuuuccuggcugauuaaaagaaauuacucagcuauggucaucuguuccuguuagaaggcuaugcagcauauuauauacuaugcgcauguuaugaaaugcauaauaaaaaauuuuaaaaaaucuaaaagaucuaaaaaaaaaaaaaaaaaaaaaaaaaaaaaaaaaaaaaaaaaaaaaaaaaaaaaaaaaaaaaaaaugcaucccccccccccccccccccccccccccccccaaaggcucuuuucagagccaccagaauu

SEQ ID NO: 16104 - RNA, 1919 nt, Artificial Sequence
  mRNA product Design h-3 comprising derived and/or modified sequence from HRSV(Memphis-37)__AIY60640.1__F-del_DSCav1_mut3 (opt6)
gggagacccgugacccggaaguuguacggcuacgcgacuuucccucccacaaacccucgcgcccuuccuuuccuacuugggcccggcagaaagcuuaccauggaacuacccauccuaaaaacaaaugccauaaccacaauacucgccgcuguaacacuauguuucgcuaguucacaaaacauuacagaagaauuuuaccaauccacaugcucagcaguaucaaaaggauaccuaggugcacuaagaacaggaugguacacaagcguaauuacaauagaauuauccaauauuaaagaaauaaaauguaacggcacugacgcuaaaguaaaauuaaucaaacaagaacuagacaaauacaaaaacgcaguaacagaccuacaauuacucaugcaauccacacccgcagcaggaucaggcucagccauaugcucagguauagcaguaugcaaaguacuccaccuugaaggagaaguaaacaaaauaaaaaacgcauuacuaucaacaaacaaagcaguaguaucacuaucaaacggagucucugucuuaaccuuuaaaguauuagauuuaaaaaacuacauagacaaacaacuauuaccaauucuaaauaaacaaucauguucuauaccaaauauagaaacaguaauagaauuucaacaaaaaaacaaccgauuacuagaaaucacaagagaauuuucugucaacgccggcguaaccaccccagucucaacauauaugcuaacaaauagugaacucuuauccuuaauaaacgacaugccaauaacaaaugaccaaaaaaaauuaauguccaauaacguacaaauagucagacaacagucauacucaauaauguguaucaucaaagaagaaguauuagcauacguaguucaacuaccccuauacggcguaauagacacaccauguuggaaacuacacacaucacccuuaugcacaaccaauaccaaagaaggaucuaacauaugccuaaccagaacagacagaggcugguacugcgacaacgcagguucagucucauucuucccacaagccgaaacaugcaaaguccaauccaacagaguauuuugcgacacuaugaacucacuaacucuaccuucagaagucaaccuuuguaacauagacauauuuaacccaaaauacgauuguaaaauaaugaccagcaaaacagacgucucaucaagcguaauaacaucacuuggcgcaauagucuccugcuacggaaaaacaaaaugcacagcauccaacaaaaacagaggcaucauaaaaaccuucuccaacggcugcgacuauguaagcaacaaaggugucgauacaguaucaguaggaaacacacuauacugcguaaacaaacaagaaggacaaucacucuacguaaaaggugaaccaaucauaaacuucuacgacccauuaguuuucccaucagacgaauuugaugccuccauaucacaaguaaaugaaaaaauaaaucaaucccuagcauucauacgaaaaucugaugaauuacuucacaaugucaacgucggaaaaucaaccacuaacauaaugauaacaacaauuauaauaguaauaauaguaauacuccuacuauuaauagccgucggucuuuuccuauacugcaaagcacgauaaggacuaguggaagcauuuuccuggcugauuaaaagaaauuacucagcuauggucaucuguuccuguuagaaggcuaugcagcauauuauauacuaugcgcauguuaugaaaugcauaauaaaaaauuuuaaaaaaucuaaaagaucuaaaaaaaaaaaaaaaaaaaaaaaaaaaaaaaaaaaaaaaaaaaaaaaaaaaaaaaaaaaaaaaaugcaucccccccccccccccccccccccccccccccaaaggcucuuuucagagccaccagaauu

SEQ ID NO: 16105 - RNA, 1919 nt, Artificial Sequence
  mRNA product Design h-3 comprising derived and/or modified sequence from HRSV(Memphis-37)__AIY60640.1__F-del_DSCav1_mut3 (opt11)
gggagacccgugacccggaaguuguacggcuacgcgacuuucccucccacaaacccucgcgcccuuccuuuccuacuugggcccggcagaaagcuuaccauggaacuacccauccucaaaaccaacgccaucaccacaauccuagcugccgucacccuaugcuucgcaagcagccaaaacaucacagaagaauuuuaccaaucaaccugcuccgccgucuccaaaggguaccuaggugcccuccgcaccggcugguacacgucugucauaaccaucgaacucuccaacaucaaagaaaucaaauguaacggaacagacgcaaaagucaaacuaaucaaacaagaacuagacaaauacaaaaacgccguaaccgaccuccaacugcucaugcaauccacccccgcugccggcuccgggagcgcaaucugcucuggaaucgccguaugcaaaguccuccaccucgaaggagaaguaaacaaaaucaaaaacgcgcuccucaguaccaacaaagccgucgucucucuaucaaacggcguaucgguccucaccuucaaaguccucgaccuaaagaacuacauagacaaacaacuccuccccauccuaaacaaacaauccugcucaaucccaaacaucgaaaccgugaucgaguuccaacagaaaaacaaccgccuacucgaaaucacccgagaguucucagucaacgcaggagucaccacccccgucucaacauacaugcuuaccaacagcgaacuccuaucccucaucaacgacaugccaaucacaaacgaccaaaagaaacucaugagcaacaacguccagaucguaagacaacaaagcuacagcaucaugugcaucaucaaagaagaaguacuagcauacgucguccaacucccccucuacggcgucaucgacacccccugcuggaaacuccacaccucaccccucugcacaaccaacaccaaagaaggcuccaauaucugccucacacgcaccgaccgcggcugguacugcgacaacgccggcuccgucuccuucuucccucaagccgaaaccugcaaaguccaguccaacagagucuucugcgacaccaugaacucccuaacacuuccaucagaagucaaccuuuguaacaucgacaucuucaaucccaaauacgacuguaaaauaaugaccucaaaaacugacgugucaagcucaguuaucaccucccuaggggccaucgucuccugcuacggcaaaacaaaaugcaccgcauccaacaaaaaucgcggaaucaucaaaacauucuccaacggaugcgacuacgucucaaacaagggaguagauaccguaagcguuggcaacacccucuacugcguaaacaaacaagaaggccaaucacucuacgucaaaggcgaacccauaaucaacuucuacgacccccucgucuucccuuccgaugaguucgacgccagcaucucccaagucaacgagaaaauaaaccagucacucgcauucauccgcaaaagcgacgaacuccuccacaacguaaacguaggcaaauccacaaccaauaucaugauaaccacaaucaucaucgugaucaucgucauccuccuccuccucauagcugucggacucuuccucuacuguaaagcacgcugaggacuaguggaagcauuuuccuggcugauuaaaagaaauuacucagcuauggucaucuguuccuguuagaaggcuaugcagcauauuauauacuaugcgcauguuaugaaaugcauaauaaaaaauuuuaaaaaaucuaaaagaucuaaaaaaaaaaaaaaaaaaaaaaaaaaaaaaaaaaaaaaaaaaaaaaaaaaaaaaaaaaaaaaaaugcaucccccccccccccccccccccccccccccccaaaggcucuuuucagagccaccagaauu

SEQ ID NO: 16106 - RNA, 1982 nt, Artificial Sequence
  mRNA product Design h-4 comprising derived and/or modified sequence from HRSV(Memphis-37)__AIY60640.1__F-del_DSCav1_mut3 (opt1)
gggagagggcgcuuggcuugcaaggacccugagcugcggcauugaagcacacccaacccaacucgacugaagucagccucacugaaccggaucugagaaucuucucucucugggcuugccagggcucuccgaaccuagcuagcauccucuucaauuccaacuagaaagcuuaccauggagcugcccauccucaagaccaacgccaucaccacgauccuggccgcggugacccugugcuucgccagcucccagaacaucaccgaggaguucuaccagagcacgugcuccgccgucagcaagggcuaccucggcgcccugcgcaccgggugguacaccagcgugaucaccaucgagcuguccaacaucaaggagaucaagugcaacggcaccgacgccaaggugaagcucaucaagcaggagcuggacaaguacaagaacgcggucacggaccugcagcuccugaugcagagcaccccggccgccggcuccgggagcgcgaucugcuccggcaucgccgucugcaaggugcugcaccucgagggcgaggugaacaagaucaagaacgcccugcuguccaccaacaaggccgucgugagccucuccaacggggugagcguccugaccuucaaggugcuggaccucaagaacuacaucgacaagcagcugcugcccauccugaacaagcagagcugcuccauccccaacaucgagaccgucaucgaguuccagcagaagaacaaccgccuccuggagaucacgcgggaguucagcgugaacgcgggcgugaccacccccgucuccaccuacaugcugacgaacagcgagcuccugucccugaucaacgacaugccgaucaccaacgaccagaagaagcucaugagcaacaacgugcagaucgugcgccagcaguccuacagcaucaugugcaucaucaaggaggagguccuggccuacguggugcagcugccccucuacggggucaucgacacccccugcuggaagcugcacaccagcccccugugcacgaccaacaccaaggagggcuccaacaucugccucacccggacggaccgcgggugguacugcgacaacgccggcagcguguccuucuucccgcaggccgagaccugcaagguccagagcaaccggguguucugcgacaccaugaacucccugacccugcccagcgaggugaaccucugcaacaucgacaucuucaaccccaaguacgacugcaagaucaugacguccaagaccgacgucagcuccagcgugaucaccucccugggcgccaucgugagcugcuacgggaagaccaagugcacggcgagcaacaagaaccgcggcaucaucaagaccuucuccaacgggugcgacuacgucagcaacaagggcguggacaccguguccgucggcaacacccuguacugcgugaacaagcaggagggccagagccucuacgugaagggggagcccaucaucaacuucuacgacccgcuggucuuccccuccgacgaguucgacgccagcaucucccaggugaacgagaagaucaaccagagccuggccuucauccggaaguccgacgagcuccugcacaacgugaacgucggcaagagcaccacgaacaucaugaucaccaccaucaucaucgugaucaucgugauccugcugcuccugaucgccgucgggcuguuccucuacugcaaggcccgcugaggacuaguaauaaggaaacuguaugaaugucugugggcaggaagugaagagauccuucuguaaagguuuuuggaauuaugucugcugaauaauaaacuuuuuugaaauaauaaaucugguagaaaaaugagaucuaaaaaaaaaaaaaaaaaaaaaaaaaaaaaaaaaaaaaaaaaaaaaaaaaaaaaaaaaaaaaaaaugcaucccccccccccccccccccccccccccccccaaaggcucuuuucagagccaccagaauu

SEQ ID NO: 16107 - RNA, 1982 nt, Artificial Sequence
  mRNA product Design h-4 comprising derived and/or modified sequence from HRSV(Memphis-37)__AIY60640.1__F-del_DSCav1_mut3 (opt1)
gggagagggcgcuuggcuugcaaggacccugagcugcggcauugaagcacacccaacccaacucgacugaagucagccucacugaaccggaucugagaaucuucucucucugggcuugccagggcucuccgaaccuagcuagcauccucuucaauuccaacuagaaagcuuaccauggagcugcccauccucaagaccaacgccaucaccacgauccuggccgcggugacccugugcuucgccagcucccagaacaucaccgaggaguucuaccagagcacgugcuccgccgucagcaagggcuaccucggggcccugcgcaccggcugguacaccuccgugaucaccaucgagcugagcaacaucaaggagaucaagugcaacgggaccgacgccaaggugaagcucaucaagcaggagcuggacaaguacaagaacgcggucacggaccugcagcuccugaugcaguccaccccggccgccggcagcggguccgccaucugcagcggcaucgcggugugcaaggugcugcaccucgagggcgaggucaacaagaucaagaacgcccugcuguccaccaacaaggccguggugagccucuccaacggggucagcgugcugaccuucaaggugcuggaccucaagaacuacaucgacaagcagcugcugcccauccucaacaagcaguccugcagcauccccaacaucgagacggucaucgaguuccagcagaagaacaaccggcugcuggagaucacccgcgaguucuccgugaacgccggcgugaccacccccgucagcacguacaugcucaccaacuccgagcugcugagccucaucaacgacaugccgaucaccaacgaccagaagaagcugaugagcaacaacgugcagaucgugcggcagcaguccuacagcaucaugugcaucaucaaggaggagguccuggccuacguggugcagcucccccuguacggggucaucgacacccccugcuggaagcugcacacgagcccccucugcaccaccaacaccaaggagggcuccaacaucugccugacgcgcaccgaccgggggugguacugcgacaacgcgggcuccgugagcuucuucccgcaggccgagaccugcaaggugcaguccaaccgcgucuucugcgacaccaugaacagccugacgcuccccuccgaggugaaccugugcaacaucgacaucuucaaccccaaguacgacugcaagaucaugaccagcaagaccgacgucuccagcuccgugaucaccagccugggcgccaucguguccugcuacgggaagacgaagugcaccgccagcaacaagaaccggggcaucaucaagaccuucuccaacgggugcgacuacgucagcaacaagggcguggacaccguguccgucggcaacacgcucuacugcgugaacaagcaggaggggcagagccuguacgugaagggcgagcccaucaucaacuucuacgacccgcuggucuuccccagcgacgaguucgacgccuccaucagccaggugaacgagaagaucaaccagucccucgcguucauccgcaagagcgacgagcugcugcacaacgugaacgucgggaaguccaccaccaacaucaugaucaccaccaucaucaucgugaucaucgugauccuccugcugcucaucgccgucggccuguuccuguacugcaaggcccggugaggacuaguaauaaggaaacuguaugaaugucugugggcaggaagugaagagauccuucuguaaagguuuuuggaauuaugucugcugaauaauaaacuuuuuugaaauaauaaaucugguagaaaaaugagaucuaaaaaaaaaaaaaaaaaaaaaaaaaaaaaaaaaaaaaaaaaaaaaaaaaaaaaaaaaaaaaaaaugcaucccccccccccccccccccccccccccccccaaaggcucuuuucagagccaccagaauu

SEQ ID NO: 16108 - RNA, 1982 nt, Artificial Sequence
  mRNA product Design h-4 comprising derived and/or modified sequence from HRSV(Memphis-37)__AIY60640.1__F-del_DSCav1_mut3 (opt2)
gggagagggcgcuuggcuugcaaggacccugagcugcggcauugaagcacacccaacccaacucgacugaagucagccucacugaaccggaucugagaaucuucucucucugggcuugccagggcucuccgaaccuagcuagcauccucuucaauuccaacuagaaagcuuaccauggagcuccccauccucaagaccaacgccaucaccaccauccucgccgccgucacccucugcuucgccuccucccagaacaucaccgaggaguucuaccaguccaccugcuccgccgucuccaagggcuaccucggcgcccuccgcaccggcugguacaccuccgucaucaccaucgagcucuccaacaucaaggagaucaagugcaacggcaccgacgccaaggucaagcucaucaagcaggagcucgacaaguacaagaacgccgucaccgaccuccagcuccucaugcaguccacccccgccgccggcuccggcuccgccaucugcuccggcaucgccgucugcaagguccuccaccucgagggcgaggucaacaagaucaagaacgcccuccucuccaccaacaaggccgucgucucccucuccaacggcgucuccguccucaccuucaagguccucgaccucaagaacuacaucgacaagcagcuccuccccauccucaacaagcaguccugcuccauccccaacaucgagaccgucaucgaguuccagcagaagaacaaccgccuccucgagaucacccgcgaguucuccgucaacgccggcgucaccacccccgucuccaccuacaugcucaccaacuccgagcuccucucccucaucaacgacaugcccaucaccaacgaccagaagaagcucauguccaacaacguccagaucguccgccagcaguccuacuccaucaugugcaucaucaaggaggagguccucgccuacgucguccagcucccccucuacggcgucaucgacacccccugcuggaagcuccacaccuccccccucugcaccaccaacaccaaggagggcuccaacaucugccucacccgcaccgaccgcggcugguacugcgacaacgccggcuccgucuccuucuucccccaggccgagaccugcaagguccaguccaaccgcgucuucugcgacaccaugaacucccucacccuccccuccgaggucaaccucugcaacaucgacaucuucaaccccaaguacgacugcaagaucaugaccuccaagaccgacgucuccuccuccgucaucaccucccucggcgccaucgucuccugcuacggcaagaccaagugcaccgccuccaacaagaaccgcggcaucaucaagaccuucuccaacggcugcgacuacgucuccaacaagggcgucgacaccgucuccgucggcaacacccucuacugcgucaacaagcaggagggccagucccucuacgucaagggcgagcccaucaucaacuucuacgacccccucgucuuccccuccgacgaguucgacgccuccaucucccaggucaacgagaagaucaaccagucccucgccuucauccgcaaguccgacgagcuccuccacaacgucaacgucggcaaguccaccaccaacaucaugaucaccaccaucaucaucgucaucaucgucauccuccuccuccucaucgccgucggccucuuccucuacugcaaggcccgcugaggacuaguaauaaggaaacuguaugaaugucugugggcaggaagugaagagauccuucuguaaagguuuuuggaauuaugucugcugaauaauaaacuuuuuugaaauaauaaaucugguagaaaaaugagaucuaaaaaaaaaaaaaaaaaaaaaaaaaaaaaaaaaaaaaaaaaaaaaaaaaaaaaaaaaaaaaaaaugcaucccccccccccccccccccccccccccccccaaaggcucuuuucagagccaccagaauu

SEQ ID NO: 16109 - RNA, 1982 nt, Artificial Sequence
  mRNA product Design h-4 comprising derived and/or modified sequence from HRSV(Memphis-37)__AIY60640.1__F-del_DSCav1_mut3 (opt3)
gggagagggcgcuuggcuugcaaggacccugagcugcggcauugaagcacacccaacccaacucgacugaagucagccucacugaaccggaucugagaaucuucucucucugggcuugccagggcucuccgaaccuagcuagcauccucuucaauuccaacuagaaagcuuaccauggagcugcccauccucaagaccaacgccauuacaacuauacuugcugcagugacgcugugcuucgccagcucccagaauaucaccgaagaguuuuaccaaucuacauguucagcggucaguaaaggcuauuugggggcuuuaagaacuggaugguacaccagcguuauuacaaucgaacuguccaacauuaaggagaucaaaugcaaugguaccgacgccaaggugaaacuaauaaagcaggaacucgauaaguauaaaaacgcaguaacugaccugcagcuucugaugcagucuacuccugccgcuggcucggggucagcaaucuguagcggaauugccgugugcaaggucuugcaccucgagggcgaggugaauaaaaucaagaacgcucugcugaguaccaauaaagccguugugucccucucuaacggugucagcguguuaacguucaagguacuggaucuuaagaauuacauugacaaacaauugcugccaauccuaaacaagcaguccuguucaauaccgaauauugaaacuguuaucgaguuucagcagaaaaacaauaggcuccuggaaauuacccgggaguucagugugaacgcgggggucacaacucccgugagcaccuauaugcuuacaaauucugagcuguugucccucaucaacgauaugccuaucaccaacgaccaaaagaaacugaugucaaauaacgugcagauuguccgccagcagagcuacaguauaaugugcaucauuaaggaagagguuuuagcauaugugguacaacugccacucuacggagugaucgauacgcccuguuggaaacuucauacuucuccucugugcacaaccaauacuaaggaaggcuccaacauauguuugacacgaaccgaccguggcugguacugcgauaaugccgggagcgucucguuuuucccacaggcugagacguguaaggugcagucuaacagaguuuucugcgacaccaugaacucccuaacacugcccucagaagugaaucucugcaauauugauaucuucaacccuaaauaugacuguaagaucaugacaaguaaaaccgaugucagcuccucugugauuacaagccugggagccaucguaucaugcuacgguaagacuaaauguaccgcaaguaauaagaacaggggcauuauaaagacauuuuccaaugggugcgacuauguuagcaacaaaggaguggacaccgucucugugggcaauacucuuuacugugucaacaagcaagagggucagucacuguaugugaaaggggagccaaucauuaacuucuacgauccguugguuuuucccagugacgaauuugaugcuagcaucucccaggugaaugagaagaucaaccagucucucgccuuuauucggaaaucggacgaacuguuacacaauguaaacgucggaaagagcacgacaaauauaaugaucaccacuauuaucauugugaucauaguuauccugcuacuccugauugcggugggccuuuucuuguauugcaaggcccgcugaggacuaguaauaaggaaacuguaugaaugucugugggcaggaagugaagagauccuucuguaaagguuuuuggaauuaugucugcugaauaauaaacuuuuuugaaauaauaaaucugguagaaaaaugagaucuaaaaaaaaaaaaaaaaaaaaaaaaaaaaaaaaaaaaaaaaaaaaaaaaaaaaaaaaaaaaaaaaugcaucccccccccccccccccccccccccccccccaaaggcucuuuucagagccaccagaauu

SEQ ID NO: 16110 - RNA, 1982 nt, Artificial Sequence
  mRNA product Design h-4 comprising derived and/or modified sequence from HRSV(Memphis-37)__AIY60640.1__F-del_DSCav1_mut3 (opt4)
gggagagggcgcuuggcuugcaaggacccugagcugcggcauugaagcacacccaacccaacucgacugaagucagccucacugaaccggaucugagaaucuucucucucugggcuugccagggcucuccgaaccuagcuagcauccucuucaauuccaacuagaaagcuuaccauggagcugcccauccugaagaccaacgccaucaccaccauccuggccgccgugacccugugcuucgccagcagccagaacaucaccgaggaguucuaccagagcaccugcagcgccgugagcaagggcuaccugggcgcccugagaaccggcugguacaccagcgugaucaccaucgagcugagcaacaucaaggagaucaagugcaacggcaccgacgccaaggugaagcugaucaagcaggagcuggacaaguacaagaacgccgugaccgaccugcagcugcugaugcagagcacccccgccgccggcagcggcagcgccaucugcagcggcaucgccgugugcaaggugcugcaccuggagggcgaggugaacaagaucaagaacgcccugcugagcaccaacaaggccguggugagccugagcaacggcgugagcgugcugaccuucaaggugcuggaccugaagaacuacaucgacaagcagcugcugcccauccugaacaagcagagcugcagcauccccaacaucgagaccgugaucgaguuccagcagaagaacaacagacugcuggagaucaccagagaguucagcgugaacgccggcgugaccacccccgugagcaccuacaugcugaccaacagcgagcugcugagccugaucaacgacaugcccaucaccaacgaccagaagaagcugaugagcaacaacgugcagaucgugagacagcagagcuacagcaucaugugcaucaucaaggaggaggugcuggccuacguggugcagcugccccuguacggcgugaucgacacccccugcuggaagcugcacaccagcccccugugcaccaccaacaccaaggagggcagcaacaucugccugaccagaaccgacagaggcugguacugcgacaacgccggcagcgugagcuucuucccccaggccgagaccugcaaggugcagagcaacagaguguucugcgacaccaugaacagccugacccugcccagcgaggugaaccugugcaacaucgacaucuucaaccccaaguacgacugcaagaucaugaccagcaagaccgacgugagcagcagcgugaucaccagccugggcgccaucgugagcugcuacggcaagaccaagugcaccgccagcaacaagaacagaggcaucaucaagaccuucagcaacggcugcgacuacgugagcaacaagggcguggacaccgugagcgugggcaacacccuguacugcgugaacaagcaggagggccagagccuguacgugaagggcgagcccaucaucaacuucuacgacccccugguguuccccagcgacgaguucgacgccagcaucagccaggugaacgagaagaucaaccagagccuggccuucaucagaaagagcgacgagcugcugcacaacgugaacgugggcaagagcaccaccaacaucaugaucaccaccaucaucaucgugaucaucgugauccugcugcugcugaucgccgugggccuguuccuguacugcaaggccagaugaggacuaguaauaaggaaacuguaugaaugucugugggcaggaagugaagagauccuucuguaaagguuuuuggaauuaugucugcugaauaauaaacuuuuuugaaauaauaaaucugguagaaaaaugagaucuaaaaaaaaaaaaaaaaaaaaaaaaaaaaaaaaaaaaaaaaaaaaaaaaaaaaaaaaaaaaaaaaugcaucccccccccccccccccccccccccccccccaaaggcucuuuucagagccaccagaauu

SEQ ID NO: 16111 - RNA, 1982 nt, Artificial Sequence
  mRNA product Design h-4 comprising derived and/or modified sequence from HRSV(Memphis-37)__AIY60640.1__F-del_DSCav1_mut3 (opt5)
gggagagggcgcuuggcuugcaaggacccugagcugcggcauugaagcacacccaacccaacucgacugaagucagccucacugaaccggaucugagaaucuucucucucugggcuugccagggcucuccgaaccuagcuagcauccucuucaauuccaacuagaaagcuuaccauggagcugcccauccucaagaccaacgccauuacaacgauccuggcugccgugacccuuugcuucgcgagcucccagaauauuacagaagaguuuuaccaaucuaccuguagcgcugucuccaaaggcuaucugggggcccucagaacaggaugguacaccucuguuaucacaauugaacugagcaacaucaaggagaucaaaugcaauggcaccgacgccaaggugaaacuuauuaagcaggaacuggauaaguauaaaaacgcugugacggaccuccagcugcugaugcaguccaccccugccgcugggucuggaagcgccaucuguuccggcauugcggucugcaaggugcuccaccuggagggggagguuaauaaaaucaagaacgcccuucugagcacaaauaaagcuguggucucucucuccaacggagugagcguucugaccuucaaggugcuugaucugaagaauuacauugacaaacaacuccugccgauccugaacaagcagucuuguuccauucccaauaucgaaacagucaucgaguuucagcagaaaaacaaucggcuccuggaaauuacccgcgaguucagcgugaacgccggcgugacgacaccugucucuaccuauaugcuuacaaauuccgagcugcucagccugaucaacgauaugcccauuaccaacgaccaaaagaaacuuauguccaauaacguucagaucgugagacagcagucuuacagcauuaugugcaucaucaaggaagaggugcuggcuuaugucgugcaacucccucuguacggcguuauugauacccccuguuggaaacugcauacauccccucucugcacgaccaauacaaaggaagggagcaacaucugucugacccggacagaccgcggaugguacugcgauaaugccggcucuguguccuuuuucccgcaggcggagaccuguaagguccagagcaacagaguguuuugcgacacgaugaacucucuuacacugcccagcgaaguuaaucucugcaauauugauaucuucaacccuaaauaugacuguaagauuaugaccuccaaaaccgaugugucuagcuccgucaucacaagccugggggccaucgugucuugcuacggaaagaccaaauguacagcuuccaauaagaaccggggcauuaucaagacguuuagcaaugggugcgacuaugucucuaacaaaggaguggacaccguuuccgugggcaauacacuuuacugugucaacaagcaagagggccagagccuguaugugaaaggggagcccauuaucaacuucuacgauccucucguuuuucccuccgacgaguucgaugccucuauuagccaggugaaugaaaagaucaaccagucccuggcuuuuauucgcaaaucugacgaacugcuccacaaugucaacgugggaaagagcaccacaaauaucaugaucaccacgauuaucauugugaucauuguuauccugcuucugcucaucgccgucggccuguuccuguauugcaaggccagaugaggacuaguaauaaggaaacuguaugaaugucugugggcaggaagugaagagauccuucuguaaagguuuuuggaauuaugucugcugaauaauaaacuuuuuugaaauaauaaaucugguagaaaaaugagaucuaaaaaaaaaaaaaaaaaaaaaaaaaaaaaaaaaaaaaaaaaaaaaaaaaaaaaaaaaaaaaaaaugcaucccccccccccccccccccccccccccccccaaaggcucuuuucagagccaccagaauu

SEQ ID NO: 16112 - RNA, 1982 nt, Artificial Sequence
  mRNA product Design h-4 comprising derived and/or modified sequence from HRSV(Memphis-37)__AIY60640.1__F-del_DSCav1_mut3 (opt6)
gggagagggcgcuuggcuugcaaggacccugagcugcggcauugaagcacacccaacccaacucgacugaagucagccucacugaaccggaucugagaaucuucucucucugggcuugccagggcucuccgaaccuagcuagcauccucuucaauuccaacuagaaagcuuaccauggaacuacccauccuaaaaacaaaugccauaaccacaauacucgccgcuguaacacuauguuucgcuaguucacaaaacauuacagaagaauuuuaccaauccacaugcucagcaguaucaaaaggauaccuaggugcacuaagaacaggaugguacacaagcguaauuacaauagaauuauccaauauuaaagaaauaaaauguaacggcacugacgcuaaaguaaaauuaaucaaacaagaacuagacaaauacaaaaacgcaguaacagaccuacaauuacucaugcaauccacacccgcagcaggaucaggcucagccauaugcucagguauagcaguaugcaaaguacuccaccuugaaggagaaguaaacaaaauaaaaaacgcauuacuaucaacaaacaaagcaguaguaucacuaucaaacggagucucugucuuaaccuuuaaaguauuagauuuaaaaaacuacauagacaaacaacuauuaccaauucuaaauaaacaaucauguucuauaccaaauauagaaacaguaauagaauuucaacaaaaaaacaaccgauuacuagaaaucacaagagaauuuucugucaacgccggcguaaccaccccagucucaacauauaugcuaacaaauagugaacucuuauccuuaauaaacgacaugccaauaacaaaugaccaaaaaaaauuaauguccaauaacguacaaauagucagacaacagucauacucaauaauguguaucaucaaagaagaaguauuagcauacguaguucaacuaccccuauacggcguaauagacacaccauguuggaaacuacacacaucacccuuaugcacaaccaauaccaaagaaggaucuaacauaugccuaaccagaacagacagaggcugguacugcgacaacgcagguucagucucauucuucccacaagccgaaacaugcaaaguccaauccaacagaguauuuugcgacacuaugaacucacuaacucuaccuucagaagucaaccuuuguaacauagacauauuuaacccaaaauacgauuguaaaauaaugaccagcaaaacagacgucucaucaagcguaauaacaucacuuggcgcaauagucuccugcuacggaaaaacaaaaugcacagcauccaacaaaaacagaggcaucauaaaaaccuucuccaacggcugcgacuauguaagcaacaaaggugucgauacaguaucaguaggaaacacacuauacugcguaaacaaacaagaaggacaaucacucuacguaaaaggugaaccaaucauaaacuucuacgacccauuaguuuucccaucagacgaauuugaugccuccauaucacaaguaaaugaaaaaauaaaucaaucccuagcauucauacgaaaaucugaugaauuacuucacaaugucaacgucggaaaaucaaccacuaacauaaugauaacaacaauuauaauaguaauaauaguaauacuccuacuauuaauagccgucggucuuuuccuauacugcaaagcacgauaaggacuaguaauaaggaaacuguaugaaugucugugggcaggaagugaagagauccuucuguaaagguuuuuggaauuaugucugcugaauaauaaacuuuuuugaaauaauaaaucugguagaaaaaugagaucuaaaaaaaaaaaaaaaaaaaaaaaaaaaaaaaaaaaaaaaaaaaaaaaaaaaaaaaaaaaaaaaaugcaucccccccccccccccccccccccccccccccaaaggcucuuuucagagccaccagaauu

SEQ ID NO: 16113 - RNA, 1982 nt, Artificial Sequence
  mRNA product Design h-4 comprising derived and/or modified sequence from HRSV(Memphis-37)__AIY60640.1__F-del_DSCav1_mut3 (opt11)
gggagagggcgcuuggcuugcaaggacccugagcugcggcauugaagcacacccaacccaacucgacugaagucagccucacugaaccggaucugagaaucuucucucucugggcuugccagggcucuccgaaccuagcuagcauccucuucaauuccaacuagaaagcuuaccauggaacuacccauccucaaaaccaacgccaucaccacaauccuagcugccgucacccuaugcuucgcaagcagccaaaacaucacagaagaauuuuaccaaucaaccugcuccgccgucuccaaaggguaccuaggugcccuccgcaccggcugguacacgucugucauaaccaucgaacucuccaacaucaaagaaaucaaauguaacggaacagacgcaaaagucaaacuaaucaaacaagaacuagacaaauacaaaaacgccguaaccgaccuccaacugcucaugcaauccacccccgcugccggcuccgggagcgcaaucugcucuggaaucgccguaugcaaaguccuccaccucgaaggagaaguaaacaaaaucaaaaacgcgcuccucaguaccaacaaagccgucgucucucuaucaaacggcguaucgguccucaccuucaaaguccucgaccuaaagaacuacauagacaaacaacuccuccccauccuaaacaaacaauccugcucaaucccaaacaucgaaaccgugaucgaguuccaacagaaaaacaaccgccuacucgaaaucacccgagaguucucagucaacgcaggagucaccacccccgucucaacauacaugcuuaccaacagcgaacuccuaucccucaucaacgacaugccaaucacaaacgaccaaaagaaacucaugagcaacaacguccagaucguaagacaacaaagcuacagcaucaugugcaucaucaaagaagaaguacuagcauacgucguccaacucccccucuacggcgucaucgacacccccugcuggaaacuccacaccucaccccucugcacaaccaacaccaaagaaggcuccaauaucugccucacacgcaccgaccgcggcugguacugcgacaacgccggcuccgucuccuucuucccucaagccgaaaccugcaaaguccaguccaacagagucuucugcgacaccaugaacucccuaacacuuccaucagaagucaaccuuuguaacaucgacaucuucaaucccaaauacgacuguaaaauaaugaccucaaaaacugacgugucaagcucaguuaucaccucccuaggggccaucgucuccugcuacggcaaaacaaaaugcaccgcauccaacaaaaaucgcggaaucaucaaaacauucuccaacggaugcgacuacgucucaaacaagggaguagauaccguaagcguuggcaacacccucuacugcguaaacaaacaagaaggccaaucacucuacgucaaaggcgaacccauaaucaacuucuacgacccccucgucuucccuuccgaugaguucgacgccagcaucucccaagucaacgagaaaauaaaccagucacucgcauucauccgcaaaagcgacgaacuccuccacaacguaaacguaggcaaauccacaaccaauaucaugauaaccacaaucaucaucgugaucaucgucauccuccuccuccucauagcugucggacucuuccucuacuguaaagcacgcugaggacuaguaauaaggaaacuguaugaaugucugugggcaggaagugaagagauccuucuguaaagguuuuuggaauuaugucugcugaauaauaaacuuuuuugaaauaauaaaucugguagaaaaaugagaucuaaaaaaaaaaaaaaaaaaaaaaaaaaaaaaaaaaaaaaaaaaaaaaaaaaaaaaaaaaaaaaaaugcaucccccccccccccccccccccccccccccccaaaggcucuuuucagagccaccagaauu

SEQ ID NO: 16114 - RNA, 1998 nt, Artificial Sequence
  mRNA product Design h-5 comprising derived and/or modified sequence from HRSV(Memphis-37)__AIY60640.1__F-del_DSCav1_mut3 (opt1)
gggagagggcgcuuggcuugcaaggacccugagcugcggcauugaagcacacccaacccaacucgacugaagucagccucacugaaccggaucugagaaucuucucucucugggcuugccagggcucuccgaaccuagcuagcauccucuucaauuccaacuagaaagcuuaccauggagcugcccauccucaagaccaacgccaucaccacgauccuggccgcggugacccugugcuucgccagcucccagaacaucaccgaggaguucuaccagagcacgugcuccgccgucagcaagggcuaccucggcgcccugcgcaccgggugguacaccagcgugaucaccaucgagcuguccaacaucaaggagaucaagugcaacggcaccgacgccaaggugaagcucaucaagcaggagcuggacaaguacaagaacgcggucacggaccugcagcuccugaugcagagcaccccggccgccggcuccgggagcgcgaucugcuccggcaucgccgucugcaaggugcugcaccucgagggcgaggugaacaagaucaagaacgcccugcuguccaccaacaaggccgucgugagccucuccaacggggugagcguccugaccuucaaggugcuggaccucaagaacuacaucgacaagcagcugcugcccauccugaacaagcagagcugcuccauccccaacaucgagaccgucaucgaguuccagcagaagaacaaccgccuccuggagaucacgcgggaguucagcgugaacgcgggcgugaccacccccgucuccaccuacaugcugacgaacagcgagcuccugucccugaucaacgacaugccgaucaccaacgaccagaagaagcucaugagcaacaacgugcagaucgugcgccagcaguccuacagcaucaugugcaucaucaaggaggagguccuggccuacguggugcagcugccccucuacggggucaucgacacccccugcuggaagcugcacaccagcccccugugcacgaccaacaccaaggagggcuccaacaucugccucacccggacggaccgcgggugguacugcgacaacgccggcagcguguccuucuucccgcaggccgagaccugcaagguccagagcaaccggguguucugcgacaccaugaacucccugacccugcccagcgaggugaaccucugcaacaucgacaucuucaaccccaaguacgacugcaagaucaugacguccaagaccgacgucagcuccagcgugaucaccucccugggcgccaucgugagcugcuacgggaagaccaagugcacggcgagcaacaagaaccgcggcaucaucaagaccuucuccaacgggugcgacuacgucagcaacaagggcguggacaccguguccgucggcaacacccuguacugcgugaacaagcaggagggccagagccucuacgugaagggggagcccaucaucaacuucuacgacccgcuggucuuccccuccgacgaguucgacgccagcaucucccaggugaacgagaagaucaaccagagccuggccuucauccggaaguccgacgagcuccugcacaacgugaacgucggcaagagcaccacgaacaucaugaucaccaccaucaucaucgugaucaucgugauccugcugcuccugaucgccgucgggcuguuccucuacugcaaggcccgcugaggacuaguacuggcugcaucucccuuuccucuguccuccauccuucucccaggauggugaagggggaccugguacccagugauccccaccccaggauccuaaaucaugacuuaccugcuaauaaaaacucauuggaaaagugagaagaucuaaaaaaaaaaaaaaaaaaaaaaaaaaaaaaaaaaaaaaaaaaaaaaaaaaaaaaaaaaaaaaaaugcaucccccccccccccccccccccccccccccccaaaggcucuuuucagagccaccagaauu

SEQ ID NO: 16115 - RNA, 1998 nt, Artificial Sequence
  mRNA product Design h-5 comprising derived and/or modified sequence from HRSV(Memphis-37)__AIY60640.1__F-del_DSCav1_mut3 (opt1)
gggagagggcgcuuggcuugcaaggacccugagcugcggcauugaagcacacccaacccaacucgacugaagucagccucacugaaccggaucugagaaucuucucucucugggcuugccagggcucuccgaaccuagcuagcauccucuucaauuccaacuagaaagcuuaccauggagcugcccauccucaagaccaacgccaucaccacgauccuggccgcggugacccugugcuucgccagcucccagaacaucaccgaggaguucuaccagagcacgugcuccgccgucagcaagggcuaccucggggcccugcgcaccggcugguacaccuccgugaucaccaucgagcugagcaacaucaaggagaucaagugcaacgggaccgacgccaaggugaagcucaucaagcaggagcuggacaaguacaagaacgcggucacggaccugcagcuccugaugcaguccaccccggccgccggcagcggguccgccaucugcagcggcaucgcggugugcaaggugcugcaccucgagggcgaggucaacaagaucaagaacgcccugcuguccaccaacaaggccguggugagccucuccaacggggucagcgugcugaccuucaaggugcuggaccucaagaacuacaucgacaagcagcugcugcccauccucaacaagcaguccugcagcauccccaacaucgagacggucaucgaguuccagcagaagaacaaccggcugcuggagaucacccgcgaguucuccgugaacgccggcgugaccacccccgucagcacguacaugcucaccaacuccgagcugcugagccucaucaacgacaugccgaucaccaacgaccagaagaagcugaugagcaacaacgugcagaucgugcggcagcaguccuacagcaucaugugcaucaucaaggaggagguccuggccuacguggugcagcucccccuguacggggucaucgacacccccugcuggaagcugcacacgagcccccucugcaccaccaacaccaaggagggcuccaacaucugccugacgcgcaccgaccgggggugguacugcgacaacgcgggcuccgugagcuucuucccgcaggccgagaccugcaaggugcaguccaaccgcgucuucugcgacaccaugaacagccugacgcuccccuccgaggugaaccugugcaacaucgacaucuucaaccccaaguacgacugcaagaucaugaccagcaagaccgacgucuccagcuccgugaucaccagccugggcgccaucguguccugcuacgggaagacgaagugcaccgccagcaacaagaaccggggcaucaucaagaccuucuccaacgggugcgacuacgucagcaacaagggcguggacaccguguccgucggcaacacgcucuacugcgugaacaagcaggaggggcagagccuguacgugaagggcgagcccaucaucaacuucuacgacccgcuggucuuccccagcgacgaguucgacgccuccaucagccaggugaacgagaagaucaaccagucccucgcguucauccgcaagagcgacgagcugcugcacaacgugaacgucgggaaguccaccaccaacaucaugaucaccaccaucaucaucgugaucaucgugauccuccugcugcucaucgccgucggccuguuccuguacugcaaggcccggugaggacuaguacuggcugcaucucccuuuccucuguccuccauccuucucccaggauggugaagggggaccugguacccagugauccccaccccaggauccuaaaucaugacuuaccugcuaauaaaaacucauuggaaaagugagaagaucuaaaaaaaaaaaaaaaaaaaaaaaaaaaaaaaaaaaaaaaaaaaaaaaaaaaaaaaaaaaaaaaaugcaucccccccccccccccccccccccccccccccaaaggcucuuuucagagccaccagaauu

SEQ ID NO: 16116 - RNA, 1998 nt, Artificial Sequence
  mRNA product Design h-5 comprising derived and/or modified sequence from HRSV(Memphis-37)__AIY60640.1__F-del_DSCav1_mut3 (opt2)
gggagagggcgcuuggcuugcaaggacccugagcugcggcauugaagcacacccaacccaacucgacugaagucagccucacugaaccggaucugagaaucuucucucucugggcuugccagggcucuccgaaccuagcuagcauccucuucaauuccaacuagaaagcuuaccauggagcuccccauccucaagaccaacgccaucaccaccauccucgccgccgucacccucugcuucgccuccucccagaacaucaccgaggaguucuaccaguccaccugcuccgccgucuccaagggcuaccucggcgcccuccgcaccggcugguacaccuccgucaucaccaucgagcucuccaacaucaaggagaucaagugcaacggcaccgacgccaaggucaagcucaucaagcaggagcucgacaaguacaagaacgccgucaccgaccuccagcuccucaugcaguccacccccgccgccggcuccggcuccgccaucugcuccggcaucgccgucugcaagguccuccaccucgagggcgaggucaacaagaucaagaacgcccuccucuccaccaacaaggccgucgucucccucuccaacggcgucuccguccucaccuucaagguccucgaccucaagaacuacaucgacaagcagcuccuccccauccucaacaagcaguccugcuccauccccaacaucgagaccgucaucgaguuccagcagaagaacaaccgccuccucgagaucacccgcgaguucuccgucaacgccggcgucaccacccccgucuccaccuacaugcucaccaacuccgagcuccucucccucaucaacgacaugcccaucaccaacgaccagaagaagcucauguccaacaacguccagaucguccgccagcaguccuacuccaucaugugcaucaucaaggaggagguccucgccuacgucguccagcucccccucuacggcgucaucgacacccccugcuggaagcuccacaccuccccccucugcaccaccaacaccaaggagggcuccaacaucugccucacccgcaccgaccgcggcugguacugcgacaacgccggcuccgucuccuucuucccccaggccgagaccugcaagguccaguccaaccgcgucuucugcgacaccaugaacucccucacccuccccuccgaggucaaccucugcaacaucgacaucuucaaccccaaguacgacugcaagaucaugaccuccaagaccgacgucuccuccuccgucaucaccucccucggcgccaucgucuccugcuacggcaagaccaagugcaccgccuccaacaagaaccgcggcaucaucaagaccuucuccaacggcugcgacuacgucuccaacaagggcgucgacaccgucuccgucggcaacacccucuacugcgucaacaagcaggagggccagucccucuacgucaagggcgagcccaucaucaacuucuacgacccccucgucuuccccuccgacgaguucgacgccuccaucucccaggucaacgagaagaucaaccagucccucgccuucauccgcaaguccgacgagcuccuccacaacgucaacgucggcaaguccaccaccaacaucaugaucaccaccaucaucaucgucaucaucgucauccuccuccuccucaucgccgucggccucuuccucuacugcaaggcccgcugaggacuaguacuggcugcaucucccuuuccucuguccuccauccuucucccaggauggugaagggggaccugguacccagugauccccaccccaggauccuaaaucaugacuuaccugcuaauaaaaacucauuggaaaagugagaagaucuaaaaaaaaaaaaaaaaaaaaaaaaaaaaaaaaaaaaaaaaaaaaaaaaaaaaaaaaaaaaaaaaugcaucccccccccccccccccccccccccccccccaaaggcucuuuucagagccaccagaauu

SEQ ID NO: 16117 - RNA, 1998 nt, Artificial Sequence
  mRNA product Design h-5 comprising derived and/or modified sequence from HRSV(Memphis-37)__AIY60640.1__F-del_DSCav1_mut3 (opt3)
gggagagggcgcuuggcuugcaaggacccugagcugcggcauugaagcacacccaacccaacucgacugaagucagccucacugaaccggaucugagaaucuucucucucugggcuugccagggcucuccgaaccuagcuagcauccucuucaauuccaacuagaaagcuuaccauggagcugcccauccucaagaccaacgccauuacaacuauacuugcugcagugacgcugugcuucgccagcucccagaauaucaccgaagaguuuuaccaaucuacauguucagcggucaguaaaggcuauuugggggcuuuaagaacuggaugguacaccagcguuauuacaaucgaacuguccaacauuaaggagaucaaaugcaaugguaccgacgccaaggugaaacuaauaaagcaggaacucgauaaguauaaaaacgcaguaacugaccugcagcuucugaugcagucuacuccugccgcuggcucggggucagcaaucuguagcggaauugccgugugcaaggucuugcaccucgagggcgaggugaauaaaaucaagaacgcucugcugaguaccaauaaagccguugugucccucucuaacggugucagcguguuaacguucaagguacuggaucuuaagaauuacauugacaaacaauugcugccaauccuaaacaagcaguccuguucaauaccgaauauugaaacuguuaucgaguuucagcagaaaaacaauaggcuccuggaaauuacccgggaguucagugugaacgcgggggucacaacucccgugagcaccuauaugcuuacaaauucugagcuguugucccucaucaacgauaugccuaucaccaacgaccaaaagaaacugaugucaaauaacgugcagauuguccgccagcagagcuacaguauaaugugcaucauuaaggaagagguuuuagcauaugugguacaacugccacucuacggagugaucgauacgcccuguuggaaacuucauacuucuccucugugcacaaccaauacuaaggaaggcuccaacauauguuugacacgaaccgaccguggcugguacugcgauaaugccgggagcgucucguuuuucccacaggcugagacguguaaggugcagucuaacagaguuuucugcgacaccaugaacucccuaacacugcccucagaagugaaucucugcaauauugauaucuucaacccuaaauaugacuguaagaucaugacaaguaaaaccgaugucagcuccucugugauuacaagccugggagccaucguaucaugcuacgguaagacuaaauguaccgcaaguaauaagaacaggggcauuauaaagacauuuuccaaugggugcgacuauguuagcaacaaaggaguggacaccgucucugugggcaauacucuuuacugugucaacaagcaagagggucagucacuguaugugaaaggggagccaaucauuaacuucuacgauccguugguuuuucccagugacgaauuugaugcuagcaucucccaggugaaugagaagaucaaccagucucucgccuuuauucggaaaucggacgaacuguuacacaauguaaacgucggaaagagcacgacaaauauaaugaucaccacuauuaucauugugaucauaguuauccugcuacuccugauugcggugggccuuuucuuguauugcaaggcccgcugaggacuaguacuggcugcaucucccuuuccucuguccuccauccuucucccaggauggugaagggggaccugguacccagugauccccaccccaggauccuaaaucaugacuuaccugcuaauaaaaacucauuggaaaagugagaagaucuaaaaaaaaaaaaaaaaaaaaaaaaaaaaaaaaaaaaaaaaaaaaaaaaaaaaaaaaaaaaaaaaugcaucccccccccccccccccccccccccccccccaaaggcucuuuucagagccaccagaauu

SEQ ID NO: 16118 - RNA, 1998 nt, Artificial Sequence
  mRNA product Design h-5 comprising derived and/or modified sequence from HRSV(Memphis-37)__AIY60640.1__F-del_DSCav1_mut3 (opt4)
gggagagggcgcuuggcuugcaaggacccugagcugcggcauugaagcacacccaacccaacucgacugaagucagccucacugaaccggaucugagaaucuucucucucugggcuugccagggcucuccgaaccuagcuagcauccucuucaauuccaacuagaaagcuuaccauggagcugcccauccugaagaccaacgccaucaccaccauccuggccgccgugacccugugcuucgccagcagccagaacaucaccgaggaguucuaccagagcaccugcagcgccgugagcaagggcuaccugggcgcccugagaaccggcugguacaccagcgugaucaccaucgagcugagcaacaucaaggagaucaagugcaacggcaccgacgccaaggugaagcugaucaagcaggagcuggacaaguacaagaacgccgugaccgaccugcagcugcugaugcagagcacccccgccgccggcagcggcagcgccaucugcagcggcaucgccgugugcaaggugcugcaccuggagggcgaggugaacaagaucaagaacgcccugcugagcaccaacaaggccguggugagccugagcaacggcgugagcgugcugaccuucaaggugcuggaccugaagaacuacaucgacaagcagcugcugcccauccugaacaagcagagcugcagcauccccaacaucgagaccgugaucgaguuccagcagaagaacaacagacugcuggagaucaccagagaguucagcgugaacgccggcgugaccacccccgugagcaccuacaugcugaccaacagcgagcugcugagccugaucaacgacaugcccaucaccaacgaccagaagaagcugaugagcaacaacgugcagaucgugagacagcagagcuacagcaucaugugcaucaucaaggaggaggugcuggccuacguggugcagcugccccuguacggcgugaucgacacccccugcuggaagcugcacaccagcccccugugcaccaccaacaccaaggagggcagcaacaucugccugaccagaaccgacagaggcugguacugcgacaacgccggcagcgugagcuucuucccccaggccgagaccugcaaggugcagagcaacagaguguucugcgacaccaugaacagccugacccugcccagcgaggugaaccugugcaacaucgacaucuucaaccccaaguacgacugcaagaucaugaccagcaagaccgacgugagcagcagcgugaucaccagccugggcgccaucgugagcugcuacggcaagaccaagugcaccgccagcaacaagaacagaggcaucaucaagaccuucagcaacggcugcgacuacgugagcaacaagggcguggacaccgugagcgugggcaacacccuguacugcgugaacaagcaggagggccagagccuguacgugaagggcgagcccaucaucaacuucuacgacccccugguguuccccagcgacgaguucgacgccagcaucagccaggugaacgagaagaucaaccagagccuggccuucaucagaaagagcgacgagcugcugcacaacgugaacgugggcaagagcaccaccaacaucaugaucaccaccaucaucaucgugaucaucgugauccugcugcugcugaucgccgugggccuguuccuguacugcaaggccagaugaggacuaguacuggcugcaucucccuuuccucuguccuccauccuucucccaggauggugaagggggaccugguacccagugauccccaccccaggauccuaaaucaugacuuaccugcuaauaaaaacucauuggaaaagugagaagaucuaaaaaaaaaaaaaaaaaaaaaaaaaaaaaaaaaaaaaaaaaaaaaaaaaaaaaaaaaaaaaaaaugcaucccccccccccccccccccccccccccccccaaaggcucuuuucagagccaccagaauu

SEQ ID NO: 16119 - RNA, 1998 nt, Artificial Sequence
  mRNA product Design h-5 comprising derived and/or modified sequence from HRSV(Memphis-37)__AIY60640.1__F-del_DSCav1_mut3 (opt5)
gggagagggcgcuuggcuugcaaggacccugagcugcggcauugaagcacacccaacccaacucgacugaagucagccucacugaaccggaucugagaaucuucucucucugggcuugccagggcucuccgaaccuagcuagcauccucuucaauuccaacuagaaagcuuaccauggagcugcccauccucaagaccaacgccauuacaacgauccuggcugccgugacccuuugcuucgcgagcucccagaauauuacagaagaguuuuaccaaucuaccuguagcgcugucuccaaaggcuaucugggggcccucagaacaggaugguacaccucuguuaucacaauugaacugagcaacaucaaggagaucaaaugcaauggcaccgacgccaaggugaaacuuauuaagcaggaacuggauaaguauaaaaacgcugugacggaccuccagcugcugaugcaguccaccccugccgcugggucuggaagcgccaucuguuccggcauugcggucugcaaggugcuccaccuggagggggagguuaauaaaaucaagaacgcccuucugagcacaaauaaagcuguggucucucucuccaacggagugagcguucugaccuucaaggugcuugaucugaagaauuacauugacaaacaacuccugccgauccugaacaagcagucuuguuccauucccaauaucgaaacagucaucgaguuucagcagaaaaacaaucggcuccuggaaauuacccgcgaguucagcgugaacgccggcgugacgacaccugucucuaccuauaugcuuacaaauuccgagcugcucagccugaucaacgauaugcccauuaccaacgaccaaaagaaacuuauguccaauaacguucagaucgugagacagcagucuuacagcauuaugugcaucaucaaggaagaggugcuggcuuaugucgugcaacucccucuguacggcguuauugauacccccuguuggaaacugcauacauccccucucugcacgaccaauacaaaggaagggagcaacaucugucugacccggacagaccgcggaugguacugcgauaaugccggcucuguguccuuuuucccgcaggcggagaccuguaagguccagagcaacagaguguuuugcgacacgaugaacucucuuacacugcccagcgaaguuaaucucugcaauauugauaucuucaacccuaaauaugacuguaagauuaugaccuccaaaaccgaugugucuagcuccgucaucacaagccugggggccaucgugucuugcuacggaaagaccaaauguacagcuuccaauaagaaccggggcauuaucaagacguuuagcaaugggugcgacuaugucucuaacaaaggaguggacaccguuuccgugggcaauacacuuuacugugucaacaagcaagagggccagagccuguaugugaaaggggagcccauuaucaacuucuacgauccucucguuuuucccuccgacgaguucgaugccucuauuagccaggugaaugaaaagaucaaccagucccuggcuuuuauucgcaaaucugacgaacugcuccacaaugucaacgugggaaagagcaccacaaauaucaugaucaccacgauuaucauugugaucauuguuauccugcuucugcucaucgccgucggccuguuccuguauugcaaggccagaugaggacuaguacuggcugcaucucccuuuccucuguccuccauccuucucccaggauggugaagggggaccugguacccagugauccccaccccaggauccuaaaucaugacuuaccugcuaauaaaaacucauuggaaaagugagaagaucuaaaaaaaaaaaaaaaaaaaaaaaaaaaaaaaaaaaaaaaaaaaaaaaaaaaaaaaaaaaaaaaaugcaucccccccccccccccccccccccccccccccaaaggcucuuuucagagccaccagaauu

SEQ ID NO: 16120 - RNA, 1998 nt, Artificial Sequence
  mRNA product Design h-5 comprising derived and/or modified sequence from HRSV(Memphis-37)__AIY60640.1__F-del_DSCav1_mut3 (opt6)
gggagagggcgcuuggcuugcaaggacccugagcugcggcauugaagcacacccaacccaacucgacugaagucagccucacugaaccggaucugagaaucuucucucucugggcuugccagggcucuccgaaccuagcuagcauccucuucaauuccaacuagaaagcuuaccauggaacuacccauccuaaaaacaaaugccauaaccacaauacucgccgcuguaacacuauguuucgcuaguucacaaaacauuacagaagaauuuuaccaauccacaugcucagcaguaucaaaaggauaccuaggugcacuaagaacaggaugguacacaagcguaauuacaauagaauuauccaauauuaaagaaauaaaauguaacggcacugacgcuaaaguaaaauuaaucaaacaagaacuagacaaauacaaaaacgcaguaacagaccuacaauuacucaugcaauccacacccgcagcaggaucaggcucagccauaugcucagguauagcaguaugcaaaguacuccaccuugaaggagaaguaaacaaaauaaaaaacgcauuacuaucaacaaacaaagcaguaguaucacuaucaaacggagucucugucuuaaccuuuaaaguauuagauuuaaaaaacuacauagacaaacaacuauuaccaauucuaaauaaacaaucauguucuauaccaaauauagaaacaguaauagaauuucaacaaaaaaacaaccgauuacuagaaaucacaagagaauuuucugucaacgccggcguaaccaccccagucucaacauauaugcuaacaaauagugaacucuuauccuuaauaaacgacaugccaauaacaaaugaccaaaaaaaauuaauguccaauaacguacaaauagucagacaacagucauacucaauaauguguaucaucaaagaagaaguauuagcauacguaguucaacuaccccuauacggcguaauagacacaccauguuggaaacuacacacaucacccuuaugcacaaccaauaccaaagaaggaucuaacauaugccuaaccagaacagacagaggcugguacugcgacaacgcagguucagucucauucuucccacaagccgaaacaugcaaaguccaauccaacagaguauuuugcgacacuaugaacucacuaacucuaccuucagaagucaaccuuuguaacauagacauauuuaacccaaaauacgauuguaaaauaaugaccagcaaaacagacgucucaucaagcguaauaacaucacuuggcgcaauagucuccugcuacggaaaaacaaaaugcacagcauccaacaaaaacagaggcaucauaaaaaccuucuccaacggcugcgacuauguaagcaacaaaggugucgauacaguaucaguaggaaacacacuauacugcguaaacaaacaagaaggacaaucacucuacguaaaaggugaaccaaucauaaacuucuacgacccauuaguuuucccaucagacgaauuugaugccuccauaucacaaguaaaugaaaaaauaaaucaaucccuagcauucauacgaaaaucugaugaauuacuucacaaugucaacgucggaaaaucaaccacuaacauaaugauaacaacaauuauaauaguaauaauaguaauacuccuacuauuaauagccgucggucuuuuccuauacugcaaagcacgauaaggacuaguacuggcugcaucucccuuuccucuguccuccauccuucucccaggauggugaagggggaccugguacccagugauccccaccccaggauccuaaaucaugacuuaccugcuaauaaaaacucauuggaaaagugagaagaucuaaaaaaaaaaaaaaaaaaaaaaaaaaaaaaaaaaaaaaaaaaaaaaaaaaaaaaaaaaaaaaaaugcaucccccccccccccccccccccccccccccccaaaggcucuuuucagagccaccagaauu

SEQ ID NO: 16121 - RNA, 1998 nt, Artificial Sequence
  mRNA product Design h-5 comprising derived and/or modified sequence from HRSV(Memphis-37)__AIY60640.1__F-del_DSCav1_mut3 (opt11)
gggagagggcgcuuggcuugcaaggacccugagcugcggcauugaagcacacccaacccaacucgacugaagucagccucacugaaccggaucugagaaucuucucucucugggcuugccagggcucuccgaaccuagcuagcauccucuucaauuccaacuagaaagcuuaccauggaacuacccauccucaaaaccaacgccaucaccacaauccuagcugccgucacccuaugcuucgcaagcagccaaaacaucacagaagaauuuuaccaaucaaccugcuccgccgucuccaaaggguaccuaggugcccuccgcaccggcugguacacgucugucauaaccaucgaacucuccaacaucaaagaaaucaaauguaacggaacagacgcaaaagucaaacuaaucaaacaagaacuagacaaauacaaaaacgccguaaccgaccuccaacugcucaugcaauccacccccgcugccggcuccgggagcgcaaucugcucuggaaucgccguaugcaaaguccuccaccucgaaggagaaguaaacaaaaucaaaaacgcgcuccucaguaccaacaaagccgucgucucucuaucaaacggcguaucgguccucaccuucaaaguccucgaccuaaagaacuacauagacaaacaacuccuccccauccuaaacaaacaauccugcucaaucccaaacaucgaaaccgugaucgaguuccaacagaaaaacaaccgccuacucgaaaucacccgagaguucucagucaacgcaggagucaccacccccgucucaacauacaugcuuaccaacagcgaacuccuaucccucaucaacgacaugccaaucacaaacgaccaaaagaaacucaugagcaacaacguccagaucguaagacaacaaagcuacagcaucaugugcaucaucaaagaagaaguacuagcauacgucguccaacucccccucuacggcgucaucgacacccccugcuggaaacuccacaccucaccccucugcacaaccaacaccaaagaaggcuccaauaucugccucacacgcaccgaccgcggcugguacugcgacaacgccggcuccgucuccuucuucccucaagccgaaaccugcaaaguccaguccaacagagucuucugcgacaccaugaacucccuaacacuuccaucagaagucaaccuuuguaacaucgacaucuucaaucccaaauacgacuguaaaauaaugaccucaaaaacugacgugucaagcucaguuaucaccucccuaggggccaucgucuccugcuacggcaaaacaaaaugcaccgcauccaacaaaaaucgcggaaucaucaaaacauucuccaacggaugcgacuacgucucaaacaagggaguagauaccguaagcguuggcaacacccucuacugcguaaacaaacaagaaggccaaucacucuacgucaaaggcgaacccauaaucaacuucuacgacccccucgucuucccuuccgaugaguucgacgccagcaucucccaagucaacgagaaaauaaaccagucacucgcauucauccgcaaaagcgacgaacuccuccacaacguaaacguaggcaaauccacaaccaauaucaugauaaccacaaucaucaucgugaucaucgucauccuccuccuccucauagcugucggacucuuccucuacuguaaagcacgcugaggacuaguacuggcugcaucucccuuuccucuguccuccauccuucucccaggauggugaagggggaccugguacccagugauccccaccccaggauccuaaaucaugacuuaccugcuaauaaaaacucauuggaaaagugagaagaucuaaaaaaaaaaaaaaaaaaaaaaaaaaaaaaaaaaaaaaaaaaaaaaaaaaaaaaaaaaaaaaaaugcaucccccccccccccccccccccccccccccccaaaggcucuuuucagagccaccagaauu

SEQ ID NO: 16122 - RNA, 1931 nt, Artificial Sequence
  mRNA product Design i-1 comprising derived and/or modified sequence from HRSV(Memphis-37)__AIY60640.1__F-del_DSCav1_mut3 (opt1)
gggagagggcgcuuggcuugcaaggacccugagcugcggcauugaagcacacccaacccaacucgacugaagucagccucacugaaccggaucugagaaucuucucucucugggcuugccagggcucuccgaaccuagcuagcauccucuucaauuccaacuagaaagcuuaccauggagcugcccauccucaagaccaacgccaucaccacgauccuggccgcggugacccugugcuucgccagcucccagaacaucaccgaggaguucuaccagagcacgugcuccgccgucagcaagggcuaccucggcgcccugcgcaccgggugguacaccagcgugaucaccaucgagcuguccaacaucaaggagaucaagugcaacggcaccgacgccaaggugaagcucaucaagcaggagcuggacaaguacaagaacgcggucacggaccugcagcuccugaugcagagcaccccggccgccggcuccgggagcgcgaucugcuccggcaucgccgucugcaaggugcugcaccucgagggcgaggugaacaagaucaagaacgcccugcuguccaccaacaaggccgucgugagccucuccaacggggugagcguccugaccuucaaggugcuggaccucaagaacuacaucgacaagcagcugcugcccauccugaacaagcagagcugcuccauccccaacaucgagaccgucaucgaguuccagcagaagaacaaccgccuccuggagaucacgcgggaguucagcgugaacgcgggcgugaccacccccgucuccaccuacaugcugacgaacagcgagcuccugucccugaucaacgacaugccgaucaccaacgaccagaagaagcucaugagcaacaacgugcagaucgugcgccagcaguccuacagcaucaugugcaucaucaaggaggagguccuggccuacguggugcagcugccccucuacggggucaucgacacccccugcuggaagcugcacaccagcccccugugcacgaccaacaccaaggagggcuccaacaucugccucacccggacggaccgcgggugguacugcgacaacgccggcagcguguccuucuucccgcaggccgagaccugcaagguccagagcaaccggguguucugcgacaccaugaacucccugacccugcccagcgaggugaaccucugcaacaucgacaucuucaaccccaaguacgacugcaagaucaugacguccaagaccgacgucagcuccagcgugaucaccucccugggcgccaucgugagcugcuacgggaagaccaagugcacggcgagcaacaagaaccgcggcaucaucaagaccuucuccaacgggugcgacuacgucagcaacaagggcguggacaccguguccgucggcaacacccuguacugcgugaacaagcaggagggccagagccucuacgugaagggggagcccaucaucaacuucuacgacccgcuggucuuccccuccgacgaguucgacgccagcaucucccaggugaacgagaagaucaaccagagccuggccuucauccggaaguccgacgagcuccugcacaacgugaacgucggcaagagcaccacgaacaucaugaucaccaccaucaucaucgugaucaucgugauccugcugcuccugaucgccgucgggcuguuccucuacugcaaggcccgcugaggacuaguguccaccugucccuccugggcugcuggauugucucguuuuccugccaaauaaacaggaucagcgcuuuacagaucuaaaaaaaaaaaaaaaaaaaaaaaaaaaaaaaaaaaaaaaaaaaaaaaaaaaaaaaaaaaaaaaaugcaucccccccccccccccccccccccccccccccaaaggcucuuuucagagccaccagaauu

SEQ ID NO: 16123 - RNA, 1931 nt, Artificial Sequence
  mRNA product Design i-1 comprising derived and/or modified sequence from HRSV(Memphis-37)__AIY60640.1__F-del_DSCav1_mut3 (opt1)
gggagagggcgcuuggcuugcaaggacccugagcugcggcauugaagcacacccaacccaacucgacugaagucagccucacugaaccggaucugagaaucuucucucucugggcuugccagggcucuccgaaccuagcuagcauccucuucaauuccaacuagaaagcuuaccauggagcugcccauccucaagaccaacgccaucaccacgauccuggccgcggugacccugugcuucgccagcucccagaacaucaccgaggaguucuaccagagcacgugcuccgccgucagcaagggcuaccucggggcccugcgcaccggcugguacaccuccgugaucaccaucgagcugagcaacaucaaggagaucaagugcaacgggaccgacgccaaggugaagcucaucaagcaggagcuggacaaguacaagaacgcggucacggaccugcagcuccugaugcaguccaccccggccgccggcagcggguccgccaucugcagcggcaucgcggugugcaaggugcugcaccucgagggcgaggucaacaagaucaagaacgcccugcuguccaccaacaaggccguggugagccucuccaacggggucagcgugcugaccuucaaggugcuggaccucaagaacuacaucgacaagcagcugcugcccauccucaacaagcaguccugcagcauccccaacaucgagacggucaucgaguuccagcagaagaacaaccggcugcuggagaucacccgcgaguucuccgugaacgccggcgugaccacccccgucagcacguacaugcucaccaacuccgagcugcugagccucaucaacgacaugccgaucaccaacgaccagaagaagcugaugagcaacaacgugcagaucgugcggcagcaguccuacagcaucaugugcaucaucaaggaggagguccuggccuacguggugcagcucccccuguacggggucaucgacacccccugcuggaagcugcacacgagcccccucugcaccaccaacaccaaggagggcuccaacaucugccugacgcgcaccgaccgggggugguacugcgacaacgcgggcuccgugagcuucuucccgcaggccgagaccugcaaggugcaguccaaccgcgucuucugcgacaccaugaacagccugacgcuccccuccgaggugaaccugugcaacaucgacaucuucaaccccaaguacgacugcaagaucaugaccagcaagaccgacgucuccagcuccgugaucaccagccugggcgccaucguguccugcuacgggaagacgaagugcaccgccagcaacaagaaccggggcaucaucaagaccuucuccaacgggugcgacuacgucagcaacaagggcguggacaccguguccgucggcaacacgcucuacugcgugaacaagcaggaggggcagagccuguacgugaagggcgagcccaucaucaacuucuacgacccgcuggucuuccccagcgacgaguucgacgccuccaucagccaggugaacgagaagaucaaccagucccucgcguucauccgcaagagcgacgagcugcugcacaacgugaacgucgggaaguccaccaccaacaucaugaucaccaccaucaucaucgugaucaucgugauccuccugcugcucaucgccgucggccuguuccuguacugcaaggcccggugaggacuaguguccaccugucccuccugggcugcuggauugucucguuuuccugccaaauaaacaggaucagcgcuuuacagaucuaaaaaaaaaaaaaaaaaaaaaaaaaaaaaaaaaaaaaaaaaaaaaaaaaaaaaaaaaaaaaaaaugcaucccccccccccccccccccccccccccccccaaaggcucuuuucagagccaccagaauu

SEQ ID NO: 16124 - RNA, 1931 nt, Artificial Sequence
  mRNA product Design i-1 comprising derived and/or modified sequence from HRSV(Memphis-37)__AIY60640.1__F-del_DSCav1_mut3 (opt2)
gggagagggcgcuuggcuugcaaggacccugagcugcggcauugaagcacacccaacccaacucgacugaagucagccucacugaaccggaucugagaaucuucucucucugggcuugccagggcucuccgaaccuagcuagcauccucuucaauuccaacuagaaagcuuaccauggagcuccccauccucaagaccaacgccaucaccaccauccucgccgccgucacccucugcuucgccuccucccagaacaucaccgaggaguucuaccaguccaccugcuccgccgucuccaagggcuaccucggcgcccuccgcaccggcugguacaccuccgucaucaccaucgagcucuccaacaucaaggagaucaagugcaacggcaccgacgccaaggucaagcucaucaagcaggagcucgacaaguacaagaacgccgucaccgaccuccagcuccucaugcaguccacccccgccgccggcuccggcuccgccaucugcuccggcaucgccgucugcaagguccuccaccucgagggcgaggucaacaagaucaagaacgcccuccucuccaccaacaaggccgucgucucccucuccaacggcgucuccguccucaccuucaagguccucgaccucaagaacuacaucgacaagcagcuccuccccauccucaacaagcaguccugcuccauccccaacaucgagaccgucaucgaguuccagcagaagaacaaccgccuccucgagaucacccgcgaguucuccgucaacgccggcgucaccacccccgucuccaccuacaugcucaccaacuccgagcuccucucccucaucaacgacaugcccaucaccaacgaccagaagaagcucauguccaacaacguccagaucguccgccagcaguccuacuccaucaugugcaucaucaaggaggagguccucgccuacgucguccagcucccccucuacggcgucaucgacacccccugcuggaagcuccacaccuccccccucugcaccaccaacaccaaggagggcuccaacaucugccucacccgcaccgaccgcggcugguacugcgacaacgccggcuccgucuccuucuucccccaggccgagaccugcaagguccaguccaaccgcgucuucugcgacaccaugaacucccucacccuccccuccgaggucaaccucugcaacaucgacaucuucaaccccaaguacgacugcaagaucaugaccuccaagaccgacgucuccuccuccgucaucaccucccucggcgccaucgucuccugcuacggcaagaccaagugcaccgccuccaacaagaaccgcggcaucaucaagaccuucuccaacggcugcgacuacgucuccaacaagggcgucgacaccgucuccgucggcaacacccucuacugcgucaacaagcaggagggccagucccucuacgucaagggcgagcccaucaucaacuucuacgacccccucgucuuccccuccgacgaguucgacgccuccaucucccaggucaacgagaagaucaaccagucccucgccuucauccgcaaguccgacgagcuccuccacaacgucaacgucggcaaguccaccaccaacaucaugaucaccaccaucaucaucgucaucaucgucauccuccuccuccucaucgccgucggccucuuccucuacugcaaggcccgcugaggacuaguguccaccugucccuccugggcugcuggauugucucguuuuccugccaaauaaacaggaucagcgcuuuacagaucuaaaaaaaaaaaaaaaaaaaaaaaaaaaaaaaaaaaaaaaaaaaaaaaaaaaaaaaaaaaaaaaaugcaucccccccccccccccccccccccccccccccaaaggcucuuuucagagccaccagaauu

SEQ ID NO: 16125 - RNA, 1931 nt, Artificial Sequence
  mRNA product Design i-1 comprising derived and/or modified sequence from HRSV(Memphis-37)__AIY60640.1__F-del_DSCav1_mut3 (opt3)
gggagagggcgcuuggcuugcaaggacccugagcugcggcauugaagcacacccaacccaacucgacugaagucagccucacugaaccggaucugagaaucuucucucucugggcuugccagggcucuccgaaccuagcuagcauccucuucaauuccaacuagaaagcuuaccauggagcugcccauccucaagaccaacgccauuacaacuauacuugcugcagugacgcugugcuucgccagcucccagaauaucaccgaagaguuuuaccaaucuacauguucagcggucaguaaaggcuauuugggggcuuuaagaacuggaugguacaccagcguuauuacaaucgaacuguccaacauuaaggagaucaaaugcaaugguaccgacgccaaggugaaacuaauaaagcaggaacucgauaaguauaaaaacgcaguaacugaccugcagcuucugaugcagucuacuccugccgcuggcucggggucagcaaucuguagcggaauugccgugugcaaggucuugcaccucgagggcgaggugaauaaaaucaagaacgcucugcugaguaccaauaaagccguugugucccucucuaacggugucagcguguuaacguucaagguacuggaucuuaagaauuacauugacaaacaauugcugccaauccuaaacaagcaguccuguucaauaccgaauauugaaacuguuaucgaguuucagcagaaaaacaauaggcuccuggaaauuacccgggaguucagugugaacgcgggggucacaacucccgugagcaccuauaugcuuacaaauucugagcuguugucccucaucaacgauaugccuaucaccaacgaccaaaagaaacugaugucaaauaacgugcagauuguccgccagcagagcuacaguauaaugugcaucauuaaggaagagguuuuagcauaugugguacaacugccacucuacggagugaucgauacgcccuguuggaaacuucauacuucuccucugugcacaaccaauacuaaggaaggcuccaacauauguuugacacgaaccgaccguggcugguacugcgauaaugccgggagcgucucguuuuucccacaggcugagacguguaaggugcagucuaacagaguuuucugcgacaccaugaacucccuaacacugcccucagaagugaaucucugcaauauugauaucuucaacccuaaauaugacuguaagaucaugacaaguaaaaccgaugucagcuccucugugauuacaagccugggagccaucguaucaugcuacgguaagacuaaauguaccgcaaguaauaagaacaggggcauuauaaagacauuuuccaaugggugcgacuauguuagcaacaaaggaguggacaccgucucugugggcaauacucuuuacugugucaacaagcaagagggucagucacuguaugugaaaggggagccaaucauuaacuucuacgauccguugguuuuucccagugacgaauuugaugcuagcaucucccaggugaaugagaagaucaaccagucucucgccuuuauucggaaaucggacgaacuguuacacaauguaaacgucggaaagagcacgacaaauauaaugaucaccacuauuaucauugugaucauaguuauccugcuacuccugauugcggugggccuuuucuuguauugcaaggcccgcugaggacuaguguccaccugucccuccugggcugcuggauugucucguuuuccugccaaauaaacaggaucagcgcuuuacagaucuaaaaaaaaaaaaaaaaaaaaaaaaaaaaaaaaaaaaaaaaaaaaaaaaaaaaaaaaaaaaaaaaugcaucccccccccccccccccccccccccccccccaaaggcucuuuucagagccaccagaauu

SEQ ID NO: 16126 - RNA, 1931 nt, Artificial Sequence
  mRNA product Design i-1 comprising derived and/or modified sequence from HRSV(Memphis-37)__AIY60640.1__F-del_DSCav1_mut3 (opt4)
gggagagggcgcuuggcuugcaaggacccugagcugcggcauugaagcacacccaacccaacucgacugaagucagccucacugaaccggaucugagaaucuucucucucugggcuugccagggcucuccgaaccuagcuagcauccucuucaauuccaacuagaaagcuuaccauggagcugcccauccugaagaccaacgccaucaccaccauccuggccgccgugacccugugcuucgccagcagccagaacaucaccgaggaguucuaccagagcaccugcagcgccgugagcaagggcuaccugggcgcccugagaaccggcugguacaccagcgugaucaccaucgagcugagcaacaucaaggagaucaagugcaacggcaccgacgccaaggugaagcugaucaagcaggagcuggacaaguacaagaacgccgugaccgaccugcagcugcugaugcagagcacccccgccgccggcagcggcagcgccaucugcagcggcaucgccgugugcaaggugcugcaccuggagggcgaggugaacaagaucaagaacgcccugcugagcaccaacaaggccguggugagccugagcaacggcgugagcgugcugaccuucaaggugcuggaccugaagaacuacaucgacaagcagcugcugcccauccugaacaagcagagcugcagcauccccaacaucgagaccgugaucgaguuccagcagaagaacaacagacugcuggagaucaccagagaguucagcgugaacgccggcgugaccacccccgugagcaccuacaugcugaccaacagcgagcugcugagccugaucaacgacaugcccaucaccaacgaccagaagaagcugaugagcaacaacgugcagaucgugagacagcagagcuacagcaucaugugcaucaucaaggaggaggugcuggccuacguggugcagcugccccuguacggcgugaucgacacccccugcuggaagcugcacaccagcccccugugcaccaccaacaccaaggagggcagcaacaucugccugaccagaaccgacagaggcugguacugcgacaacgccggcagcgugagcuucuucccccaggccgagaccugcaaggugcagagcaacagaguguucugcgacaccaugaacagccugacccugcccagcgaggugaaccugugcaacaucgacaucuucaaccccaaguacgacugcaagaucaugaccagcaagaccgacgugagcagcagcgugaucaccagccugggcgccaucgugagcugcuacggcaagaccaagugcaccgccagcaacaagaacagaggcaucaucaagaccuucagcaacggcugcgacuacgugagcaacaagggcguggacaccgugagcgugggcaacacccuguacugcgugaacaagcaggagggccagagccuguacgugaagggcgagcccaucaucaacuucuacgacccccugguguuccccagcgacgaguucgacgccagcaucagccaggugaacgagaagaucaaccagagccuggccuucaucagaaagagcgacgagcugcugcacaacgugaacgugggcaagagcaccaccaacaucaugaucaccaccaucaucaucgugaucaucgugauccugcugcugcugaucgccgugggccuguuccuguacugcaaggccagaugaggacuaguguccaccugucccuccugggcugcuggauugucucguuuuccugccaaauaaacaggaucagcgcuuuacagaucuaaaaaaaaaaaaaaaaaaaaaaaaaaaaaaaaaaaaaaaaaaaaaaaaaaaaaaaaaaaaaaaaugcaucccccccccccccccccccccccccccccccaaaggcucuuuucagagccaccagaauu

SEQ ID NO: 16127 - RNA, 1931 nt, Artificial Sequence
  mRNA product Design i-1 comprising derived and/or modified sequence from HRSV(Memphis-37)__AIY60640.1__F-del_DSCav1_mut3 (opt5)
gggagagggcgcuuggcuugcaaggacccugagcugcggcauugaagcacacccaacccaacucgacugaagucagccucacugaaccggaucugagaaucuucucucucugggcuugccagggcucuccgaaccuagcuagcauccucuucaauuccaacuagaaagcuuaccauggagcugcccauccucaagaccaacgccauuacaacgauccuggcugccgugacccuuugcuucgcgagcucccagaauauuacagaagaguuuuaccaaucuaccuguagcgcugucuccaaaggcuaucugggggcccucagaacaggaugguacaccucuguuaucacaauugaacugagcaacaucaaggagaucaaaugcaauggcaccgacgccaaggugaaacuuauuaagcaggaacuggauaaguauaaaaacgcugugacggaccuccagcugcugaugcaguccaccccugccgcugggucuggaagcgccaucuguuccggcauugcggucugcaaggugcuccaccuggagggggagguuaauaaaaucaagaacgcccuucugagcacaaauaaagcuguggucucucucuccaacggagugagcguucugaccuucaaggugcuugaucugaagaauuacauugacaaacaacuccugccgauccugaacaagcagucuuguuccauucccaauaucgaaacagucaucgaguuucagcagaaaaacaaucggcuccuggaaauuacccgcgaguucagcgugaacgccggcgugacgacaccugucucuaccuauaugcuuacaaauuccgagcugcucagccugaucaacgauaugcccauuaccaacgaccaaaagaaacuuauguccaauaacguucagaucgugagacagcagucuuacagcauuaugugcaucaucaaggaagaggugcuggcuuaugucgugcaacucccucuguacggcguuauugauacccccuguuggaaacugcauacauccccucucugcacgaccaauacaaaggaagggagcaacaucugucugacccggacagaccgcggaugguacugcgauaaugccggcucuguguccuuuuucccgcaggcggagaccuguaagguccagagcaacagaguguuuugcgacacgaugaacucucuuacacugcccagcgaaguuaaucucugcaauauugauaucuucaacccuaaauaugacuguaagauuaugaccuccaaaaccgaugugucuagcuccgucaucacaagccugggggccaucgugucuugcuacggaaagaccaaauguacagcuuccaauaagaaccggggcauuaucaagacguuuagcaaugggugcgacuaugucucuaacaaaggaguggacaccguuuccgugggcaauacacuuuacugugucaacaagcaagagggccagagccuguaugugaaaggggagcccauuaucaacuucuacgauccucucguuuuucccuccgacgaguucgaugccucuauuagccaggugaaugaaaagaucaaccagucccuggcuuuuauucgcaaaucugacgaacugcuccacaaugucaacgugggaaagagcaccacaaauaucaugaucaccacgauuaucauugugaucauuguuauccugcuucugcucaucgccgucggccuguuccuguauugcaaggccagaugaggacuaguguccaccugucccuccugggcugcuggauugucucguuuuccugccaaauaaacaggaucagcgcuuuacagaucuaaaaaaaaaaaaaaaaaaaaaaaaaaaaaaaaaaaaaaaaaaaaaaaaaaaaaaaaaaaaaaaaugcaucccccccccccccccccccccccccccccccaaaggcucuuuucagagccaccagaauu

SEQ ID NO: 16128 - RNA, 1931 nt, Artificial Sequence
  mRNA product Design i-1 comprising derived and/or modified sequence from HRSV(Memphis-37)__AIY60640.1__F-del_DSCav1_mut3 (opt6)
gggagagggcgcuuggcuugcaaggacccugagcugcggcauugaagcacacccaacccaacucgacugaagucagccucacugaaccggaucugagaaucuucucucucugggcuugccagggcucuccgaaccuagcuagcauccucuucaauuccaacuagaaagcuuaccauggaacuacccauccuaaaaacaaaugccauaaccacaauacucgccgcuguaacacuauguuucgcuaguucacaaaacauuacagaagaauuuuaccaauccacaugcucagcaguaucaaaaggauaccuaggugcacuaagaacaggaugguacacaagcguaauuacaauagaauuauccaauauuaaagaaauaaaauguaacggcacugacgcuaaaguaaaauuaaucaaacaagaacuagacaaauacaaaaacgcaguaacagaccuacaauuacucaugcaauccacacccgcagcaggaucaggcucagccauaugcucagguauagcaguaugcaaaguacuccaccuugaaggagaaguaaacaaaauaaaaaacgcauuacuaucaacaaacaaagcaguaguaucacuaucaaacggagucucugucuuaaccuuuaaaguauuagauuuaaaaaacuacauagacaaacaacuauuaccaauucuaaauaaacaaucauguucuauaccaaauauagaaacaguaauagaauuucaacaaaaaaacaaccgauuacuagaaaucacaagagaauuuucugucaacgccggcguaaccaccccagucucaacauauaugcuaacaaauagugaacucuuauccuuaauaaacgacaugccaauaacaaaugaccaaaaaaaauuaauguccaauaacguacaaauagucagacaacagucauacucaauaauguguaucaucaaagaagaaguauuagcauacguaguucaacuaccccuauacggcguaauagacacaccauguuggaaacuacacacaucacccuuaugcacaaccaauaccaaagaaggaucuaacauaugccuaaccagaacagacagaggcugguacugcgacaacgcagguucagucucauucuucccacaagccgaaacaugcaaaguccaauccaacagaguauuuugcgacacuaugaacucacuaacucuaccuucagaagucaaccuuuguaacauagacauauuuaacccaaaauacgauuguaaaauaaugaccagcaaaacagacgucucaucaagcguaauaacaucacuuggcgcaauagucuccugcuacggaaaaacaaaaugcacagcauccaacaaaaacagaggcaucauaaaaaccuucuccaacggcugcgacuauguaagcaacaaaggugucgauacaguaucaguaggaaacacacuauacugcguaaacaaacaagaaggacaaucacucuacguaaaaggugaaccaaucauaaacuucuacgacccauuaguuuucccaucagacgaauuugaugccuccauaucacaaguaaaugaaaaaauaaaucaaucccuagcauucauacgaaaaucugaugaauuacuucacaaugucaacgucggaaaaucaaccacuaacauaaugauaacaacaauuauaauaguaauaauaguaauacuccuacuauuaauagccgucggucuuuuccuauacugcaaagcacgauaaggacuaguguccaccugucccuccugggcugcuggauugucucguuuuccugccaaauaaacaggaucagcgcuuuacagaucuaaaaaaaaaaaaaaaaaaaaaaaaaaaaaaaaaaaaaaaaaaaaaaaaaaaaaaaaaaaaaaaaugcaucccccccccccccccccccccccccccccccaaaggcucuuuucagagccaccagaauu

SEQ ID NO: 16129 - RNA, 1931 nt, Artificial Sequence
  mRNA product Design i-1 comprising derived and/or modified sequence from HRSV(Memphis-37)__AIY60640.1__F-del_DSCav1_mut3 (opt11)
gggagagggcgcuuggcuugcaaggacccugagcugcggcauugaagcacacccaacccaacucgacugaagucagccucacugaaccggaucugagaaucuucucucucugggcuugccagggcucuccgaaccuagcuagcauccucuucaauuccaacuagaaagcuuaccauggaacuacccauccucaaaaccaacgccaucaccacaauccuagcugccgucacccuaugcuucgcaagcagccaaaacaucacagaagaauuuuaccaaucaaccugcuccgccgucuccaaaggguaccuaggugcccuccgcaccggcugguacacgucugucauaaccaucgaacucuccaacaucaaagaaaucaaauguaacggaacagacgcaaaagucaaacuaaucaaacaagaacuagacaaauacaaaaacgccguaaccgaccuccaacugcucaugcaauccacccccgcugccggcuccgggagcgcaaucugcucuggaaucgccguaugcaaaguccuccaccucgaaggagaaguaaacaaaaucaaaaacgcgcuccucaguaccaacaaagccgucgucucucuaucaaacggcguaucgguccucaccuucaaaguccucgaccuaaagaacuacauagacaaacaacuccuccccauccuaaacaaacaauccugcucaaucccaaacaucgaaaccgugaucgaguuccaacagaaaaacaaccgccuacucgaaaucacccgagaguucucagucaacgcaggagucaccacccccgucucaacauacaugcuuaccaacagcgaacuccuaucccucaucaacgacaugccaaucacaaacgaccaaaagaaacucaugagcaacaacguccagaucguaagacaacaaagcuacagcaucaugugcaucaucaaagaagaaguacuagcauacgucguccaacucccccucuacggcgucaucgacacccccugcuggaaacuccacaccucaccccucugcacaaccaacaccaaagaaggcuccaauaucugccucacacgcaccgaccgcggcugguacugcgacaacgccggcuccgucuccuucuucccucaagccgaaaccugcaaaguccaguccaacagagucuucugcgacaccaugaacucccuaacacuuccaucagaagucaaccuuuguaacaucgacaucuucaaucccaaauacgacuguaaaauaaugaccucaaaaacugacgugucaagcucaguuaucaccucccuaggggccaucgucuccugcuacggcaaaacaaaaugcaccgcauccaacaaaaaucgcggaaucaucaaaacauucuccaacggaugcgacuacgucucaaacaagggaguagauaccguaagcguuggcaacacccucuacugcguaaacaaacaagaaggccaaucacucuacgucaaaggcgaacccauaaucaacuucuacgacccccucgucuucccuuccgaugaguucgacgccagcaucucccaagucaacgagaaaauaaaccagucacucgcauucauccgcaaaagcgacgaacuccuccacaacguaaacguaggcaaauccacaaccaauaucaugauaaccacaaucaucaucgugaucaucgucauccuccuccuccucauagcugucggacucuuccucuacuguaaagcacgcugaggacuaguguccaccugucccuccugggcugcuggauugucucguuuuccugccaaauaaacaggaucagcgcuuuacagaucuaaaaaaaaaaaaaaaaaaaaaaaaaaaaaaaaaaaaaaaaaaaaaaaaaaaaaaaaaaaaaaaaugcaucccccccccccccccccccccccccccccccaaaggcucuuuucagagccaccagaauu

SEQ ID NO: 16130 - RNA, 1931 nt, Artificial Sequence
  mRNA product Design i-2 comprising derived and/or modified sequence from HRSV(Memphis-37)__AIY60640.1__F-del_DSCav1_mut3 (opt1)
gggagaggcgcugccuacggagguggcagccaucuccuucucggcaucaagcuuaccauggagcugcccauccucaagaccaacgccaucaccacgauccuggccgcggugacccugugcuucgccagcucccagaacaucaccgaggaguucuaccagagcacgugcuccgccgucagcaagggcuaccucggcgcccugcgcaccgggugguacaccagcgugaucaccaucgagcuguccaacaucaaggagaucaagugcaacggcaccgacgccaaggugaagcucaucaagcaggagcuggacaaguacaagaacgcggucacggaccugcagcuccugaugcagagcaccccggccgccggcuccgggagcgcgaucugcuccggcaucgccgucugcaaggugcugcaccucgagggcgaggugaacaagaucaagaacgcccugcuguccaccaacaaggccgucgugagccucuccaacggggugagcguccugaccuucaaggugcuggaccucaagaacuacaucgacaagcagcugcugcccauccugaacaagcagagcugcuccauccccaacaucgagaccgucaucgaguuccagcagaagaacaaccgccuccuggagaucacgcgggaguucagcgugaacgcgggcgugaccacccccgucuccaccuacaugcugacgaacagcgagcuccugucccugaucaacgacaugccgaucaccaacgaccagaagaagcucaugagcaacaacgugcagaucgugcgccagcaguccuacagcaucaugugcaucaucaaggaggagguccuggccuacguggugcagcugccccucuacggggucaucgacacccccugcuggaagcugcacaccagcccccugugcacgaccaacaccaaggagggcuccaacaucugccucacccggacggaccgcgggugguacugcgacaacgccggcagcguguccuucuucccgcaggccgagaccugcaagguccagagcaaccggguguucugcgacaccaugaacucccugacccugcccagcgaggugaaccucugcaacaucgacaucuucaaccccaaguacgacugcaagaucaugacguccaagaccgacgucagcuccagcgugaucaccucccugggcgccaucgugagcugcuacgggaagaccaagugcacggcgagcaacaagaaccgcggcaucaucaagaccuucuccaacgggugcgacuacgucagcaacaagggcguggacaccguguccgucggcaacacccuguacugcgugaacaagcaggagggccagagccucuacgugaagggggagcccaucaucaacuucuacgacccgcuggucuuccccuccgacgaguucgacgccagcaucucccaggugaacgagaagaucaaccagagccuggccuucauccggaaguccgacgagcuccugcacaacgugaacgucggcaagagcaccacgaacaucaugaucaccaccaucaucaucgugaucaucgugauccugcugcuccugaucgccgucgggcuguuccucuacugcaaggcccgcugaggacuagugcaucacauuuaaaagcaucucagccuaccaugagaauaagagaaagaaaaugaagaucaauagcuuauucaucucuuuuucuuuuucguugguguaaagccaacacccugucuaaaaaacauaaauuucuuuaaucauuuugccucuuuucucugugcuucaauuaauaaaaaauggaaagaaccuagaucuaaaaaaaaaaaaaaaaaaaaaaaaaaaaaaaaaaaaaaaaaaaaaaaaaaaaaaaaaaaaaaaaugcaucccccccccccccccccccccccccccccccaaaggcucuuuucagagccaccagaauu

SEQ ID NO: 16131 - RNA, 1931 nt, Artificial Sequence
  mRNA product Design i-2 comprising derived and/or modified sequence from HRSV(Memphis-37)__AIY60640.1__F-del_DSCav1_mut3 (opt1)
gggagaggcgcugccuacggagguggcagccaucuccuucucggcaucaagcuuaccauggagcugcccauccucaagaccaacgccaucaccacgauccuggccgcggugacccugugcuucgccagcucccagaacaucaccgaggaguucuaccagagcacgugcuccgccgucagcaagggcuaccucggggcccugcgcaccggcugguacaccuccgugaucaccaucgagcugagcaacaucaaggagaucaagugcaacgggaccgacgccaaggugaagcucaucaagcaggagcuggacaaguacaagaacgcggucacggaccugcagcuccugaugcaguccaccccggccgccggcagcggguccgccaucugcagcggcaucgcggugugcaaggugcugcaccucgagggcgaggucaacaagaucaagaacgcccugcuguccaccaacaaggccguggugagccucuccaacggggucagcgugcugaccuucaaggugcuggaccucaagaacuacaucgacaagcagcugcugcccauccucaacaagcaguccugcagcauccccaacaucgagacggucaucgaguuccagcagaagaacaaccggcugcuggagaucacccgcgaguucuccgugaacgccggcgugaccacccccgucagcacguacaugcucaccaacuccgagcugcugagccucaucaacgacaugccgaucaccaacgaccagaagaagcugaugagcaacaacgugcagaucgugcggcagcaguccuacagcaucaugugcaucaucaaggaggagguccuggccuacguggugcagcucccccuguacggggucaucgacacccccugcuggaagcugcacacgagcccccucugcaccaccaacaccaaggagggcuccaacaucugccugacgcgcaccgaccgggggugguacugcgacaacgcgggcuccgugagcuucuucccgcaggccgagaccugcaaggugcaguccaaccgcgucuucugcgacaccaugaacagccugacgcuccccuccgaggugaaccugugcaacaucgacaucuucaaccccaaguacgacugcaagaucaugaccagcaagaccgacgucuccagcuccgugaucaccagccugggcgccaucguguccugcuacgggaagacgaagugcaccgccagcaacaagaaccggggcaucaucaagaccuucuccaacgggugcgacuacgucagcaacaagggcguggacaccguguccgucggcaacacgcucuacugcgugaacaagcaggaggggcagagccuguacgugaagggcgagcccaucaucaacuucuacgacccgcuggucuuccccagcgacgaguucgacgccuccaucagccaggugaacgagaagaucaaccagucccucgcguucauccgcaagagcgacgagcugcugcacaacgugaacgucgggaaguccaccaccaacaucaugaucaccaccaucaucaucgugaucaucgugauccuccugcugcucaucgccgucggccuguuccuguacugcaaggcccggugaggacuagugcaucacauuuaaaagcaucucagccuaccaugagaauaagagaaagaaaaugaagaucaauagcuuauucaucucuuuuucuuuuucguugguguaaagccaacacccugucuaaaaaacauaaauuucuuuaaucauuuugccucuuuucucugugcuucaauuaauaaaaaauggaaagaaccuagaucuaaaaaaaaaaaaaaaaaaaaaaaaaaaaaaaaaaaaaaaaaaaaaaaaaaaaaaaaaaaaaaaaugcaucccccccccccccccccccccccccccccccaaaggcucuuuucagagccaccagaauu

SEQ ID NO: 16132 - RNA, 1931 nt, Artificial Sequence
  mRNA product Design i-2 comprising derived and/or modified sequence from HRSV(Memphis-37)__AIY60640.1__F-del_DSCav1_mut3 (opt2)
gggagaggcgcugccuacggagguggcagccaucuccuucucggcaucaagcuuaccauggagcuccccauccucaagaccaacgccaucaccaccauccucgccgccgucacccucugcuucgccuccucccagaacaucaccgaggaguucuaccaguccaccugcuccgccgucuccaagggcuaccucggcgcccuccgcaccggcugguacaccuccgucaucaccaucgagcucuccaacaucaaggagaucaagugcaacggcaccgacgccaaggucaagcucaucaagcaggagcucgacaaguacaagaacgccgucaccgaccuccagcuccucaugcaguccacccccgccgccggcuccggcuccgccaucugcuccggcaucgccgucugcaagguccuccaccucgagggcgaggucaacaagaucaagaacgcccuccucuccaccaacaaggccgucgucucccucuccaacggcgucuccguccucaccuucaagguccucgaccucaagaacuacaucgacaagcagcuccuccccauccucaacaagcaguccugcuccauccccaacaucgagaccgucaucgaguuccagcagaagaacaaccgccuccucgagaucacccgcgaguucuccgucaacgccggcgucaccacccccgucuccaccuacaugcucaccaacuccgagcuccucucccucaucaacgacaugcccaucaccaacgaccagaagaagcucauguccaacaacguccagaucguccgccagcaguccuacuccaucaugugcaucaucaaggaggagguccucgccuacgucguccagcucccccucuacggcgucaucgacacccccugcuggaagcuccacaccuccccccucugcaccaccaacaccaaggagggcuccaacaucugccucacccgcaccgaccgcggcugguacugcgacaacgccggcuccgucuccuucuucccccaggccgagaccugcaagguccaguccaaccgcgucuucugcgacaccaugaacucccucacccuccccuccgaggucaaccucugcaacaucgacaucuucaaccccaaguacgacugcaagaucaugaccuccaagaccgacgucuccuccuccgucaucaccucccucggcgccaucgucuccugcuacggcaagaccaagugcaccgccuccaacaagaaccgcggcaucaucaagaccuucuccaacggcugcgacuacgucuccaacaagggcgucgacaccgucuccgucggcaacacccucuacugcgucaacaagcaggagggccagucccucuacgucaagggcgagcccaucaucaacuucuacgacccccucgucuuccccuccgacgaguucgacgccuccaucucccaggucaacgagaagaucaaccagucccucgccuucauccgcaaguccgacgagcuccuccacaacgucaacgucggcaaguccaccaccaacaucaugaucaccaccaucaucaucgucaucaucgucauccuccuccuccucaucgccgucggccucuuccucuacugcaaggcccgcugaggacuagugcaucacauuuaaaagcaucucagccuaccaugagaauaagagaaagaaaaugaagaucaauagcuuauucaucucuuuuucuuuuucguugguguaaagccaacacccugucuaaaaaacauaaauuucuuuaaucauuuugccucuuuucucugugcuucaauuaauaaaaaauggaaagaaccuagaucuaaaaaaaaaaaaaaaaaaaaaaaaaaaaaaaaaaaaaaaaaaaaaaaaaaaaaaaaaaaaaaaaugcaucccccccccccccccccccccccccccccccaaaggcucuuuucagagccaccagaauu

SEQ ID NO: 16133 - RNA, 1931 nt, Artificial Sequence
  mRNA product Design i-2 comprising derived and/or modified sequence from HRSV(Memphis-37)__AIY60640.1__F-del_DSCav1_mut3 (opt3)
gggagaggcgcugccuacggagguggcagccaucuccuucucggcaucaagcuuaccauggagcugcccauccucaagaccaacgccauuacaacuauacuugcugcagugacgcugugcuucgccagcucccagaauaucaccgaagaguuuuaccaaucuacauguucagcggucaguaaaggcuauuugggggcuuuaagaacuggaugguacaccagcguuauuacaaucgaacuguccaacauuaaggagaucaaaugcaaugguaccgacgccaaggugaaacuaauaaagcaggaacucgauaaguauaaaaacgcaguaacugaccugcagcuucugaugcagucuacuccugccgcuggcucggggucagcaaucuguagcggaauugccgugugcaaggucuugcaccucgagggcgaggugaauaaaaucaagaacgcucugcugaguaccaauaaagccguugugucccucucuaacggugucagcguguuaacguucaagguacuggaucuuaagaauuacauugacaaacaauugcugccaauccuaaacaagcaguccuguucaauaccgaauauugaaacuguuaucgaguuucagcagaaaaacaauaggcuccuggaaauuacccgggaguucagugugaacgcgggggucacaacucccgugagcaccuauaugcuuacaaauucugagcuguugucccucaucaacgauaugccuaucaccaacgaccaaaagaaacugaugucaaauaacgugcagauuguccgccagcagagcuacaguauaaugugcaucauuaaggaagagguuuuagcauaugugguacaacugccacucuacggagugaucgauacgcccuguuggaaacuucauacuucuccucugugcacaaccaauacuaaggaaggcuccaacauauguuugacacgaaccgaccguggcugguacugcgauaaugccgggagcgucucguuuuucccacaggcugagacguguaaggugcagucuaacagaguuuucugcgacaccaugaacucccuaacacugcccucagaagugaaucucugcaauauugauaucuucaacccuaaauaugacuguaagaucaugacaaguaaaaccgaugucagcuccucugugauuacaagccugggagccaucguaucaugcuacgguaagacuaaauguaccgcaaguaauaagaacaggggcauuauaaagacauuuuccaaugggugcgacuauguuagcaacaaaggaguggacaccgucucugugggcaauacucuuuacugugucaacaagcaagagggucagucacuguaugugaaaggggagccaaucauuaacuucuacgauccguugguuuuucccagugacgaauuugaugcuagcaucucccaggugaaugagaagaucaaccagucucucgccuuuauucggaaaucggacgaacuguuacacaauguaaacgucggaaagagcacgacaaauauaaugaucaccacuauuaucauugugaucauaguuauccugcuacuccugauugcggugggccuuuucuuguauugcaaggcccgcugaggacuagugcaucacauuuaaaagcaucucagccuaccaugagaauaagagaaagaaaaugaagaucaauagcuuauucaucucuuuuucuuuuucguugguguaaagccaacacccugucuaaaaaacauaaauuucuuuaaucauuuugccucuuuucucugugcuucaauuaauaaaaaauggaaagaaccuagaucuaaaaaaaaaaaaaaaaaaaaaaaaaaaaaaaaaaaaaaaaaaaaaaaaaaaaaaaaaaaaaaaaugcaucccccccccccccccccccccccccccccccaaaggcucuuuucagagccaccagaauu

SEQ ID NO: 16134 - RNA, 1931 nt, Artificial Sequence
  mRNA product Design i-2 comprising derived and/or modified sequence from HRSV(Memphis-37)__AIY60640.1__F-del_DSCav1_mut3 (opt4)
gggagaggcgcugccuacggagguggcagccaucuccuucucggcaucaagcuuaccauggagcugcccauccugaagaccaacgccaucaccaccauccuggccgccgugacccugugcuucgccagcagccagaacaucaccgaggaguucuaccagagcaccugcagcgccgugagcaagggcuaccugggcgcccugagaaccggcugguacaccagcgugaucaccaucgagcugagcaacaucaaggagaucaagugcaacggcaccgacgccaaggugaagcugaucaagcaggagcuggacaaguacaagaacgccgugaccgaccugcagcugcugaugcagagcacccccgccgccggcagcggcagcgccaucugcagcggcaucgccgugugcaaggugcugcaccuggagggcgaggugaacaagaucaagaacgcccugcugagcaccaacaaggccguggugagccugagcaacggcgugagcgugcugaccuucaaggugcuggaccugaagaacuacaucgacaagcagcugcugcccauccugaacaagcagagcugcagcauccccaacaucgagaccgugaucgaguuccagcagaagaacaacagacugcuggagaucaccagagaguucagcgugaacgccggcgugaccacccccgugagcaccuacaugcugaccaacagcgagcugcugagccugaucaacgacaugcccaucaccaacgaccagaagaagcugaugagcaacaacgugcagaucgugagacagcagagcuacagcaucaugugcaucaucaaggaggaggugcuggccuacguggugcagcugccccuguacggcgugaucgacacccccugcuggaagcugcacaccagcccccugugcaccaccaacaccaaggagggcagcaacaucugccugaccagaaccgacagaggcugguacugcgacaacgccggcagcgugagcuucuucccccaggccgagaccugcaaggugcagagcaacagaguguucugcgacaccaugaacagccugacccugcccagcgaggugaaccugugcaacaucgacaucuucaaccccaaguacgacugcaagaucaugaccagcaagaccgacgugagcagcagcgugaucaccagccugggcgccaucgugagcugcuacggcaagaccaagugcaccgccagcaacaagaacagaggcaucaucaagaccuucagcaacggcugcgacuacgugagcaacaagggcguggacaccgugagcgugggcaacacccuguacugcgugaacaagcaggagggccagagccuguacgugaagggcgagcccaucaucaacuucuacgacccccugguguuccccagcgacgaguucgacgccagcaucagccaggugaacgagaagaucaaccagagccuggccuucaucagaaagagcgacgagcugcugcacaacgugaacgugggcaagagcaccaccaacaucaugaucaccaccaucaucaucgugaucaucgugauccugcugcugcugaucgccgugggccuguuccuguacugcaaggccagaugaggacuagugcaucacauuuaaaagcaucucagccuaccaugagaauaagagaaagaaaaugaagaucaauagcuuauucaucucuuuuucuuuuucguugguguaaagccaacacccugucuaaaaaacauaaauuucuuuaaucauuuugccucuuuucucugugcuucaauuaauaaaaaauggaaagaaccuagaucuaaaaaaaaaaaaaaaaaaaaaaaaaaaaaaaaaaaaaaaaaaaaaaaaaaaaaaaaaaaaaaaaugcaucccccccccccccccccccccccccccccccaaaggcucuuuucagagccaccagaauu

SEQ ID NO: 16135 - RNA, 1931 nt, Artificial Sequence
  mRNA product Design i-2 comprising derived and/or modified sequence from HRSV(Memphis-37)__AIY60640.1__F-del_DSCav1_mut3 (opt5)
gggagaggcgcugccuacggagguggcagccaucuccuucucggcaucaagcuuaccauggagcugcccauccucaagaccaacgccauuacaacgauccuggcugccgugacccuuugcuucgcgagcucccagaauauuacagaagaguuuuaccaaucuaccuguagcgcugucuccaaaggcuaucugggggcccucagaacaggaugguacaccucuguuaucacaauugaacugagcaacaucaaggagaucaaaugcaauggcaccgacgccaaggugaaacuuauuaagcaggaacuggauaaguauaaaaacgcugugacggaccuccagcugcugaugcaguccaccccugccgcugggucuggaagcgccaucuguuccggcauugcggucugcaaggugcuccaccuggagggggagguuaauaaaaucaagaacgcccuucugagcacaaauaaagcuguggucucucucuccaacggagugagcguucugaccuucaaggugcuugaucugaagaauuacauugacaaacaacuccugccgauccugaacaagcagucuuguuccauucccaauaucgaaacagucaucgaguuucagcagaaaaacaaucggcuccuggaaauuacccgcgaguucagcgugaacgccggcgugacgacaccugucucuaccuauaugcuuacaaauuccgagcugcucagccugaucaacgauaugcccauuaccaacgaccaaaagaaacuuauguccaauaacguucagaucgugagacagcagucuuacagcauuaugugcaucaucaaggaagaggugcuggcuuaugucgugcaacucccucuguacggcguuauugauacccccuguuggaaacugcauacauccccucucugcacgaccaauacaaaggaagggagcaacaucugucugacccggacagaccgcggaugguacugcgauaaugccggcucuguguccuuuuucccgcaggcggagaccuguaagguccagagcaacagaguguuuugcgacacgaugaacucucuuacacugcccagcgaaguuaaucucugcaauauugauaucuucaacccuaaauaugacuguaagauuaugaccuccaaaaccgaugugucuagcuccgucaucacaagccugggggccaucgugucuugcuacggaaagaccaaauguacagcuuccaauaagaaccggggcauuaucaagacguuuagcaaugggugcgacuaugucucuaacaaaggaguggacaccguuuccgugggcaauacacuuuacugugucaacaagcaagagggccagagccuguaugugaaaggggagcccauuaucaacuucuacgauccucucguuuuucccuccgacgaguucgaugccucuauuagccaggugaaugaaaagaucaaccagucccuggcuuuuauucgcaaaucugacgaacugcuccacaaugucaacgugggaaagagcaccacaaauaucaugaucaccacgauuaucauugugaucauuguuauccugcuucugcucaucgccgucggccuguuccuguauugcaaggccagaugaggacuagugcaucacauuuaaaagcaucucagccuaccaugagaauaagagaaagaaaaugaagaucaauagcuuauucaucucuuuuucuuuuucguugguguaaagccaacacccugucuaaaaaacauaaauuucuuuaaucauuuugccucuuuucucugugcuucaauuaauaaaaaauggaaagaaccuagaucuaaaaaaaaaaaaaaaaaaaaaaaaaaaaaaaaaaaaaaaaaaaaaaaaaaaaaaaaaaaaaaaaugcaucccccccccccccccccccccccccccccccaaaggcucuuuucagagccaccagaauu

SEQ ID NO: 16136 - RNA, 1931 nt, Artificial Sequence
  mRNA product Design i-2 comprising derived and/or modified sequence from HRSV(Memphis-37)__AIY60640.1__F-del_DSCav1_mut3 (opt6)
gggagaggcgcugccuacggagguggcagccaucuccuucucggcaucaagcuuaccauggaacuacccauccuaaaaacaaaugccauaaccacaauacucgccgcuguaacacuauguuucgcuaguucacaaaacauuacagaagaauuuuaccaauccacaugcucagcaguaucaaaaggauaccuaggugcacuaagaacaggaugguacacaagcguaauuacaauagaauuauccaauauuaaagaaauaaaauguaacggcacugacgcuaaaguaaaauuaaucaaacaagaacuagacaaauacaaaaacgcaguaacagaccuacaauuacucaugcaauccacacccgcagcaggaucaggcucagccauaugcucagguauagcaguaugcaaaguacuccaccuugaaggagaaguaaacaaaauaaaaaacgcauuacuaucaacaaacaaagcaguaguaucacuaucaaacggagucucugucuuaaccuuuaaaguauuagauuuaaaaaacuacauagacaaacaacuauuaccaauucuaaauaaacaaucauguucuauaccaaauauagaaacaguaauagaauuucaacaaaaaaacaaccgauuacuagaaaucacaagagaauuuucugucaacgccggcguaaccaccccagucucaacauauaugcuaacaaauagugaacucuuauccuuaauaaacgacaugccaauaacaaaugaccaaaaaaaauuaauguccaauaacguacaaauagucagacaacagucauacucaauaauguguaucaucaaagaagaaguauuagcauacguaguucaacuaccccuauacggcguaauagacacaccauguuggaaacuacacacaucacccuuaugcacaaccaauaccaaagaaggaucuaacauaugccuaaccagaacagacagaggcugguacugcgacaacgcagguucagucucauucuucccacaagccgaaacaugcaaaguccaauccaacagaguauuuugcgacacuaugaacucacuaacucuaccuucagaagucaaccuuuguaacauagacauauuuaacccaaaauacgauuguaaaauaaugaccagcaaaacagacgucucaucaagcguaauaacaucacuuggcgcaauagucuccugcuacggaaaaacaaaaugcacagcauccaacaaaaacagaggcaucauaaaaaccuucuccaacggcugcgacuauguaagcaacaaaggugucgauacaguaucaguaggaaacacacuauacugcguaaacaaacaagaaggacaaucacucuacguaaaaggugaaccaaucauaaacuucuacgacccauuaguuuucccaucagacgaauuugaugccuccauaucacaaguaaaugaaaaaauaaaucaaucccuagcauucauacgaaaaucugaugaauuacuucacaaugucaacgucggaaaaucaaccacuaacauaaugauaacaacaauuauaauaguaauaauaguaauacuccuacuauuaauagccgucggucuuuuccuauacugcaaagcacgauaaggacuagugcaucacauuuaaaagcaucucagccuaccaugagaauaagagaaagaaaaugaagaucaauagcuuauucaucucuuuuucuuuuucguugguguaaagccaacacccugucuaaaaaacauaaauuucuuuaaucauuuugccucuuuucucugugcuucaauuaauaaaaaauggaaagaaccuagaucuaaaaaaaaaaaaaaaaaaaaaaaaaaaaaaaaaaaaaaaaaaaaaaaaaaaaaaaaaaaaaaaaugcaucccccccccccccccccccccccccccccccaaaggcucuuuucagagccaccagaauu

SEQ ID NO: 16137 - RNA, 1931 nt, Artificial Sequence
  mRNA product Design i-2 comprising derived and/or modified sequence from HRSV(Memphis-37)__AIY60640.1__F-del_DSCav1_mut3 (opt11)
gggagaggcgcugccuacggagguggcagccaucuccuucucggcaucaagcuuaccauggaacuacccauccucaaaaccaacgccaucaccacaauccuagcugccgucacccuaugcuucgcaagcagccaaaacaucacagaagaauuuuaccaaucaaccugcuccgccgucuccaaaggguaccuaggugcccuccgcaccggcugguacacgucugucauaaccaucgaacucuccaacaucaaagaaaucaaauguaacggaacagacgcaaaagucaaacuaaucaaacaagaacuagacaaauacaaaaacgccguaaccgaccuccaacugcucaugcaauccacccccgcugccggcuccgggagcgcaaucugcucuggaaucgccguaugcaaaguccuccaccucgaaggagaaguaaacaaaaucaaaaacgcgcuccucaguaccaacaaagccgucgucucucuaucaaacggcguaucgguccucaccuucaaaguccucgaccuaaagaacuacauagacaaacaacuccuccccauccuaaacaaacaauccugcucaaucccaaacaucgaaaccgugaucgaguuccaacagaaaaacaaccgccuacucgaaaucacccgagaguucucagucaacgcaggagucaccacccccgucucaacauacaugcuuaccaacagcgaacuccuaucccucaucaacgacaugccaaucacaaacgaccaaaagaaacucaugagcaacaacguccagaucguaagacaacaaagcuacagcaucaugugcaucaucaaagaagaaguacuagcauacgucguccaacucccccucuacggcgucaucgacacccccugcuggaaacuccacaccucaccccucugcacaaccaacaccaaagaaggcuccaauaucugccucacacgcaccgaccgcggcugguacugcgacaacgccggcuccgucuccuucuucccucaagccgaaaccugcaaaguccaguccaacagagucuucugcgacaccaugaacucccuaacacuuccaucagaagucaaccuuuguaacaucgacaucuucaaucccaaauacgacuguaaaauaaugaccucaaaaacugacgugucaagcucaguuaucaccucccuaggggccaucgucuccugcuacggcaaaacaaaaugcaccgcauccaacaaaaaucgcggaaucaucaaaacauucuccaacggaugcgacuacgucucaaacaagggaguagauaccguaagcguuggcaacacccucuacugcguaaacaaacaagaaggccaaucacucuacgucaaaggcgaacccauaaucaacuucuacgacccccucgucuucccuuccgaugaguucgacgccagcaucucccaagucaacgagaaaauaaaccagucacucgcauucauccgcaaaagcgacgaacuccuccacaacguaaacguaggcaaauccacaaccaauaucaugauaaccacaaucaucaucgugaucaucgucauccuccuccuccucauagcugucggacucuuccucuacuguaaagcacgcugaggacuagugcaucacauuuaaaagcaucucagccuaccaugagaauaagagaaagaaaaugaagaucaauagcuuauucaucucuuuuucuuuuucguugguguaaagccaacacccugucuaaaaaacauaaauuucuuuaaucauuuugccucuuuucucugugcuucaauuaauaaaaaauggaaagaaccuagaucuaaaaaaaaaaaaaaaaaaaaaaaaaaaaaaaaaaaaaaaaaaaaaaaaaaaaaaaaaaaaaaaaugcaucccccccccccccccccccccccccccccccaaaggcucuuuucagagccaccagaauu

SEQ ID NO: 16138 - RNA, 1927 nt, Artificial Sequence
  mRNA product Design i-2 comprising derived and/or modified sequence from HRSV(Memphis-37)__AIY60640.1__F-del_DSCav1_mut3 (opt1)
ggggcgcugccuacggagguggcagccaucuccuucucggcaucaagcuuaccauggagcugcccauccucaagaccaacgccaucaccacgauccuggccgcggugacccugugcuucgccagcucccagaacaucaccgaggaguucuaccagagcacgugcuccgccgucagcaagggcuaccucggcgcccugcgcaccgggugguacaccagcgugaucaccaucgagcuguccaacaucaaggagaucaagugcaacggcaccgacgccaaggugaagcucaucaagcaggagcuggacaaguacaagaacgcggucacggaccugcagcuccugaugcagagcaccccggccgccggcuccgggagcgcgaucugcuccggcaucgccgucugcaaggugcugcaccucgagggcgaggugaacaagaucaagaacgcccugcuguccaccaacaaggccgucgugagccucuccaacggggugagcguccugaccuucaaggugcuggaccucaagaacuacaucgacaagcagcugcugcccauccugaacaagcagagcugcuccauccccaacaucgagaccgucaucgaguuccagcagaagaacaaccgccuccuggagaucacgcgggaguucagcgugaacgcgggcgugaccacccccgucuccaccuacaugcugacgaacagcgagcuccugucccugaucaacgacaugccgaucaccaacgaccagaagaagcucaugagcaacaacgugcagaucgugcgccagcaguccuacagcaucaugugcaucaucaaggaggagguccuggccuacguggugcagcugccccucuacggggucaucgacacccccugcuggaagcugcacaccagcccccugugcacgaccaacaccaaggagggcuccaacaucugccucacccggacggaccgcgggugguacugcgacaacgccggcagcguguccuucuucccgcaggccgagaccugcaagguccagagcaaccggguguucugcgacaccaugaacucccugacccugcccagcgaggugaaccucugcaacaucgacaucuucaaccccaaguacgacugcaagaucaugacguccaagaccgacgucagcuccagcgugaucaccucccugggcgccaucgugagcugcuacgggaagaccaagugcacggcgagcaacaagaaccgcggcaucaucaagaccuucuccaacgggugcgacuacgucagcaacaagggcguggacaccguguccgucggcaacacccuguacugcgugaacaagcaggagggccagagccucuacgugaagggggagcccaucaucaacuucuacgacccgcuggucuuccccuccgacgaguucgacgccagcaucucccaggugaacgagaagaucaaccagagccuggccuucauccggaaguccgacgagcuccugcacaacgugaacgucggcaagagcaccacgaacaucaugaucaccaccaucaucaucgugaucaucgugauccugcugcuccugaucgccgucgggcuguuccucuacugcaaggcccgcugaggacuagugcaucacauuuaaaagcaucucagccuaccaugagaauaagagaaagaaaaugaagaucaauagcuuauucaucucuuuuucuuuuucguugguguaaagccaacacccugucuaaaaaacauaaauuucuuuaaucauuuugccucuuuucucugugcuucaauuaauaaaaaauggaaagaaccuagaucuaaaaaaaaaaaaaaaaaaaaaaaaaaaaaaaaaaaaaaaaaaaaaaaaaaaaaaaaaaaaaaaaugcaucccccccccccccccccccccccccccccccaaaggcucuuuucagagccaccagaauu

SEQ ID NO: 16139 - RNA, 1927 nt, Artificial Sequence
  mRNA product Design i-2 comprising derived and/or modified sequence from HRSV(Memphis-37)__AIY60640.1__F-del_DSCav1_mut3 (opt1)
ggggcgcugccuacggagguggcagccaucuccuucucggcaucaagcuuaccauggagcugcccauccucaagaccaacgccaucaccacgauccuggccgcggugacccugugcuucgccagcucccagaacaucaccgaggaguucuaccagagcacgugcuccgccgucagcaagggcuaccucggggcccugcgcaccggcugguacaccuccgugaucaccaucgagcugagcaacaucaaggagaucaagugcaacgggaccgacgccaaggugaagcucaucaagcaggagcuggacaaguacaagaacgcggucacggaccugcagcuccugaugcaguccaccccggccgccggcagcggguccgccaucugcagcggcaucgcggugugcaaggugcugcaccucgagggcgaggucaacaagaucaagaacgcccugcuguccaccaacaaggccguggugagccucuccaacggggucagcgugcugaccuucaaggugcuggaccucaagaacuacaucgacaagcagcugcugcccauccucaacaagcaguccugcagcauccccaacaucgagacggucaucgaguuccagcagaagaacaaccggcugcuggagaucacccgcgaguucuccgugaacgccggcgugaccacccccgucagcacguacaugcucaccaacuccgagcugcugagccucaucaacgacaugccgaucaccaacgaccagaagaagcugaugagcaacaacgugcagaucgugcggcagcaguccuacagcaucaugugcaucaucaaggaggagguccuggccuacguggugcagcucccccuguacggggucaucgacacccccugcuggaagcugcacacgagcccccucugcaccaccaacaccaaggagggcuccaacaucugccugacgcgcaccgaccgggggugguacugcgacaacgcgggcuccgugagcuucuucccgcaggccgagaccugcaaggugcaguccaaccgcgucuucugcgacaccaugaacagccugacgcuccccuccgaggugaaccugugcaacaucgacaucuucaaccccaaguacgacugcaagaucaugaccagcaagaccgacgucuccagcuccgugaucaccagccugggcgccaucguguccugcuacgggaagacgaagugcaccgccagcaacaagaaccggggcaucaucaagaccuucuccaacgggugcgacuacgucagcaacaagggcguggacaccguguccgucggcaacacgcucuacugcgugaacaagcaggaggggcagagccuguacgugaagggcgagcccaucaucaacuucuacgacccgcuggucuuccccagcgacgaguucgacgccuccaucagccaggugaacgagaagaucaaccagucccucgcguucauccgcaagagcgacgagcugcugcacaacgugaacgucgggaaguccaccaccaacaucaugaucaccaccaucaucaucgugaucaucgugauccuccugcugcucaucgccgucggccuguuccuguacugcaaggcccggugaggacuagugcaucacauuuaaaagcaucucagccuaccaugagaauaagagaaagaaaaugaagaucaauagcuuauucaucucuuuuucuuuuucguugguguaaagccaacacccugucuaaaaaacauaaauuucuuuaaucauuuugccucuuuucucugugcuucaauuaauaaaaaauggaaagaaccuagaucuaaaaaaaaaaaaaaaaaaaaaaaaaaaaaaaaaaaaaaaaaaaaaaaaaaaaaaaaaaaaaaaaugcaucccccccccccccccccccccccccccccccaaaggcucuuuucagagccaccagaauu

SEQ ID NO: 16140 - RNA, 1927 nt, Artificial Sequence
  mRNA product Design i-2 comprising derived and/or modified sequence from HRSV(Memphis-37)__AIY60640.1__F-del_DSCav1_mut3 (opt2)
ggggcgcugccuacggagguggcagccaucuccuucucggcaucaagcuuaccauggagcuccccauccucaagaccaacgccaucaccaccauccucgccgccgucacccucugcuucgccuccucccagaacaucaccgaggaguucuaccaguccaccugcuccgccgucuccaagggcuaccucggcgcccuccgcaccggcugguacaccuccgucaucaccaucgagcucuccaacaucaaggagaucaagugcaacggcaccgacgccaaggucaagcucaucaagcaggagcucgacaaguacaagaacgccgucaccgaccuccagcuccucaugcaguccacccccgccgccggcuccggcuccgccaucugcuccggcaucgccgucugcaagguccuccaccucgagggcgaggucaacaagaucaagaacgcccuccucuccaccaacaaggccgucgucucccucuccaacggcgucuccguccucaccuucaagguccucgaccucaagaacuacaucgacaagcagcuccuccccauccucaacaagcaguccugcuccauccccaacaucgagaccgucaucgaguuccagcagaagaacaaccgccuccucgagaucacccgcgaguucuccgucaacgccggcgucaccacccccgucuccaccuacaugcucaccaacuccgagcuccucucccucaucaacgacaugcccaucaccaacgaccagaagaagcucauguccaacaacguccagaucguccgccagcaguccuacuccaucaugugcaucaucaaggaggagguccucgccuacgucguccagcucccccucuacggcgucaucgacacccccugcuggaagcuccacaccuccccccucugcaccaccaacaccaaggagggcuccaacaucugccucacccgcaccgaccgcggcugguacugcgacaacgccggcuccgucuccuucuucccccaggccgagaccugcaagguccaguccaaccgcgucuucugcgacaccaugaacucccucacccuccccuccgaggucaaccucugcaacaucgacaucuucaaccccaaguacgacugcaagaucaugaccuccaagaccgacgucuccuccuccgucaucaccucccucggcgccaucgucuccugcuacggcaagaccaagugcaccgccuccaacaagaaccgcggcaucaucaagaccuucuccaacggcugcgacuacgucuccaacaagggcgucgacaccgucuccgucggcaacacccucuacugcgucaacaagcaggagggccagucccucuacgucaagggcgagcccaucaucaacuucuacgacccccucgucuuccccuccgacgaguucgacgccuccaucucccaggucaacgagaagaucaaccagucccucgccuucauccgcaaguccgacgagcuccuccacaacgucaacgucggcaaguccaccaccaacaucaugaucaccaccaucaucaucgucaucaucgucauccuccuccuccucaucgccgucggccucuuccucuacugcaaggcccgcugaggacuagugcaucacauuuaaaagcaucucagccuaccaugagaauaagagaaagaaaaugaagaucaauagcuuauucaucucuuuuucuuuuucguugguguaaagccaacacccugucuaaaaaacauaaauuucuuuaaucauuuugccucuuuucucugugcuucaauuaauaaaaaauggaaagaaccuagaucuaaaaaaaaaaaaaaaaaaaaaaaaaaaaaaaaaaaaaaaaaaaaaaaaaaaaaaaaaaaaaaaaugcaucccccccccccccccccccccccccccccccaaaggcucuuuucagagccaccagaauu

SEQ ID NO: 16141 - RNA, 1927 nt, Artificial Sequence
  mRNA product Design i-2 comprising derived and/or modified sequence from HRSV(Memphis-37)__AIY60640.1__F-del_DSCav1_mut3 (opt3)
ggggcgcugccuacggagguggcagccaucuccuucucggcaucaagcuuaccauggagcugcccauccucaagaccaacgccauuacaacuauacuugcugcagugacgcugugcuucgccagcucccagaauaucaccgaagaguuuuaccaaucuacauguucagcggucaguaaaggcuauuugggggcuuuaagaacuggaugguacaccagcguuauuacaaucgaacuguccaacauuaaggagaucaaaugcaaugguaccgacgccaaggugaaacuaauaaagcaggaacucgauaaguauaaaaacgcaguaacugaccugcagcuucugaugcagucuacuccugccgcuggcucggggucagcaaucuguagcggaauugccgugugcaaggucuugcaccucgagggcgaggugaauaaaaucaagaacgcucugcugaguaccaauaaagccguugugucccucucuaacggugucagcguguuaacguucaagguacuggaucuuaagaauuacauugacaaacaauugcugccaauccuaaacaagcaguccuguucaauaccgaauauugaaacuguuaucgaguuucagcagaaaaacaauaggcuccuggaaauuacccgggaguucagugugaacgcgggggucacaacucccgugagcaccuauaugcuuacaaauucugagcuguugucccucaucaacgauaugccuaucaccaacgaccaaaagaaacugaugucaaauaacgugcagauuguccgccagcagagcuacaguauaaugugcaucauuaaggaagagguuuuagcauaugugguacaacugccacucuacggagugaucgauacgcccuguuggaaacuucauacuucuccucugugcacaaccaauacuaaggaaggcuccaacauauguuugacacgaaccgaccguggcugguacugcgauaaugccgggagcgucucguuuuucccacaggcugagacguguaaggugcagucuaacagaguuuucugcgacaccaugaacucccuaacacugcccucagaagugaaucucugcaauauugauaucuucaacccuaaauaugacuguaagaucaugacaaguaaaaccgaugucagcuccucugugauuacaagccugggagccaucguaucaugcuacgguaagacuaaauguaccgcaaguaauaagaacaggggcauuauaaagacauuuuccaaugggugcgacuauguuagcaacaaaggaguggacaccgucucugugggcaauacucuuuacugugucaacaagcaagagggucagucacuguaugugaaaggggagccaaucauuaacuucuacgauccguugguuuuucccagugacgaauuugaugcuagcaucucccaggugaaugagaagaucaaccagucucucgccuuuauucggaaaucggacgaacuguuacacaauguaaacgucggaaagagcacgacaaauauaaugaucaccacuauuaucauugugaucauaguuauccugcuacuccugauugcggugggccuuuucuuguauugcaaggcccgcugaggacuagugcaucacauuuaaaagcaucucagccuaccaugagaauaagagaaagaaaaugaagaucaauagcuuauucaucucuuuuucuuuuucguugguguaaagccaacacccugucuaaaaaacauaaauuucuuuaaucauuuugccucuuuucucugugcuucaauuaauaaaaaauggaaagaaccuagaucuaaaaaaaaaaaaaaaaaaaaaaaaaaaaaaaaaaaaaaaaaaaaaaaaaaaaaaaaaaaaaaaaugcaucccccccccccccccccccccccccccccccaaaggcucuuuucagagccaccagaauu

SEQ ID NO: 16142 - RNA, 1927 nt, Artificial Sequence
  mRNA product Design i-2 comprising derived and/or modified sequence from HRSV(Memphis-37)__AIY60640.1__F-del_DSCav1_mut3 (opt4)
ggggcgcugccuacggagguggcagccaucuccuucucggcaucaagcuuaccauggagcugcccauccugaagaccaacgccaucaccaccauccuggccgccgugacccugugcuucgccagcagccagaacaucaccgaggaguucuaccagagcaccugcagcgccgugagcaagggcuaccugggcgcccugagaaccggcugguacaccagcgugaucaccaucgagcugagcaacaucaaggagaucaagugcaacggcaccgacgccaaggugaagcugaucaagcaggagcuggacaaguacaagaacgccgugaccgaccugcagcugcugaugcagagcacccccgccgccggcagcggcagcgccaucugcagcggcaucgccgugugcaaggugcugcaccuggagggcgaggugaacaagaucaagaacgcccugcugagcaccaacaaggccguggugagccugagcaacggcgugagcgugcugaccuucaaggugcuggaccugaagaacuacaucgacaagcagcugcugcccauccugaacaagcagagcugcagcauccccaacaucgagaccgugaucgaguuccagcagaagaacaacagacugcuggagaucaccagagaguucagcgugaacgccggcgugaccacccccgugagcaccuacaugcugaccaacagcgagcugcugagccugaucaacgacaugcccaucaccaacgaccagaagaagcugaugagcaacaacgugcagaucgugagacagcagagcuacagcaucaugugcaucaucaaggaggaggugcuggccuacguggugcagcugccccuguacggcgugaucgacacccccugcuggaagcugcacaccagcccccugugcaccaccaacaccaaggagggcagcaacaucugccugaccagaaccgacagaggcugguacugcgacaacgccggcagcgugagcuucuucccccaggccgagaccugcaaggugcagagcaacagaguguucugcgacaccaugaacagccugacccugcccagcgaggugaaccugugcaacaucgacaucuucaaccccaaguacgacugcaagaucaugaccagcaagaccgacgugagcagcagcgugaucaccagccugggcgccaucgugagcugcuacggcaagaccaagugcaccgccagcaacaagaacagaggcaucaucaagaccuucagcaacggcugcgacuacgugagcaacaagggcguggacaccgugagcgugggcaacacccuguacugcgugaacaagcaggagggccagagccuguacgugaagggcgagcccaucaucaacuucuacgacccccugguguuccccagcgacgaguucgacgccagcaucagccaggugaacgagaagaucaaccagagccuggccuucaucagaaagagcgacgagcugcugcacaacgugaacgugggcaagagcaccaccaacaucaugaucaccaccaucaucaucgugaucaucgugauccugcugcugcugaucgccgugggccuguuccuguacugcaaggccagaugaggacuagugcaucacauuuaaaagcaucucagccuaccaugagaauaagagaaagaaaaugaagaucaauagcuuauucaucucuuuuucuuuuucguugguguaaagccaacacccugucuaaaaaacauaaauuucuuuaaucauuuugccucuuuucucugugcuucaauuaauaaaaaauggaaagaaccuagaucuaaaaaaaaaaaaaaaaaaaaaaaaaaaaaaaaaaaaaaaaaaaaaaaaaaaaaaaaaaaaaaaaugcaucccccccccccccccccccccccccccccccaaaggcucuuuucagagccaccagaauu

SEQ ID NO: 16143 - RNA, 1927 nt, Artificial Sequence
  mRNA product Design i-2 comprising derived and/or modified sequence from HRSV(Memphis-37)__AIY60640.1__F-del_DSCav1_mut3 (opt5)
ggggcgcugccuacggagguggcagccaucuccuucucggcaucaagcuuaccauggagcugcccauccucaagaccaacgccauuacaacgauccuggcugccgugacccuuugcuucgcgagcucccagaauauuacagaagaguuuuaccaaucuaccuguagcgcugucuccaaaggcuaucugggggcccucagaacaggaugguacaccucuguuaucacaauugaacugagcaacaucaaggagaucaaaugcaauggcaccgacgccaaggugaaacuuauuaagcaggaacuggauaaguauaaaaacgcugugacggaccuccagcugcugaugcaguccaccccugccgcugggucuggaagcgccaucuguuccggcauugcggucugcaaggugcuccaccuggagggggagguuaauaaaaucaagaacgcccuucugagcacaaauaaagcuguggucucucucuccaacggagugagcguucugaccuucaaggugcuugaucugaagaauuacauugacaaacaacuccugccgauccugaacaagcagucuuguuccauucccaauaucgaaacagucaucgaguuucagcagaaaaacaaucggcuccuggaaauuacccgcgaguucagcgugaacgccggcgugacgacaccugucucuaccuauaugcuuacaaauuccgagcugcucagccugaucaacgauaugcccauuaccaacgaccaaaagaaacuuauguccaauaacguucagaucgugagacagcagucuuacagcauuaugugcaucaucaaggaagaggugcuggcuuaugucgugcaacucccucuguacggcguuauugauacccccuguuggaaacugcauacauccccucucugcacgaccaauacaaaggaagggagcaacaucugucugacccggacagaccgcggaugguacugcgauaaugccggcucuguguccuuuuucccgcaggcggagaccuguaagguccagagcaacagaguguuuugcgacacgaugaacucucuuacacugcccagcgaaguuaaucucugcaauauugauaucuucaacccuaaauaugacuguaagauuaugaccuccaaaaccgaugugucuagcuccgucaucacaagccugggggccaucgugucuugcuacggaaagaccaaauguacagcuuccaauaagaaccggggcauuaucaagacguuuagcaaugggugcgacuaugucucuaacaaaggaguggacaccguuuccgugggcaauacacuuuacugugucaacaagcaagagggccagagccuguaugugaaaggggagcccauuaucaacuucuacgauccucucguuuuucccuccgacgaguucgaugccucuauuagccaggugaaugaaaagaucaaccagucccuggcuuuuauucgcaaaucugacgaacugcuccacaaugucaacgugggaaagagcaccacaaauaucaugaucaccacgauuaucauugugaucauuguuauccugcuucugcucaucgccgucggccuguuccuguauugcaaggccagaugaggacuagugcaucacauuuaaaagcaucucagccuaccaugagaauaagagaaagaaaaugaagaucaauagcuuauucaucucuuuuucuuuuucguugguguaaagccaacacccugucuaaaaaacauaaauuucuuuaaucauuuugccucuuuucucugugcuucaauuaauaaaaaauggaaagaaccuagaucuaaaaaaaaaaaaaaaaaaaaaaaaaaaaaaaaaaaaaaaaaaaaaaaaaaaaaaaaaaaaaaaaugcaucccccccccccccccccccccccccccccccaaaggcucuuuucagagccaccagaauu

SEQ ID NO: 16144 - RNA, 1927 nt, Artificial Sequence
  mRNA product Design i-2 comprising derived and/or modified sequence from HRSV(Memphis-37)__AIY60640.1__F-del_DSCav1_mut3 (opt6)
ggggcgcugccuacggagguggcagccaucuccuucucggcaucaagcuuaccauggaacuacccauccuaaaaacaaaugccauaaccacaauacucgccgcuguaacacuauguuucgcuaguucacaaaacauuacagaagaauuuuaccaauccacaugcucagcaguaucaaaaggauaccuaggugcacuaagaacaggaugguacacaagcguaauuacaauagaauuauccaauauuaaagaaauaaaauguaacggcacugacgcuaaaguaaaauuaaucaaacaagaacuagacaaauacaaaaacgcaguaacagaccuacaauuacucaugcaauccacacccgcagcaggaucaggcucagccauaugcucagguauagcaguaugcaaaguacuccaccuugaaggagaaguaaacaaaauaaaaaacgcauuacuaucaacaaacaaagcaguaguaucacuaucaaacggagucucugucuuaaccuuuaaaguauuagauuuaaaaaacuacauagacaaacaacuauuaccaauucuaaauaaacaaucauguucuauaccaaauauagaaacaguaauagaauuucaacaaaaaaacaaccgauuacuagaaaucacaagagaauuuucugucaacgccggcguaaccaccccagucucaacauauaugcuaacaaauagugaacucuuauccuuaauaaacgacaugccaauaacaaaugaccaaaaaaaauuaauguccaauaacguacaaauagucagacaacagucauacucaauaauguguaucaucaaagaagaaguauuagcauacguaguucaacuaccccuauacggcguaauagacacaccauguuggaaacuacacacaucacccuuaugcacaaccaauaccaaagaaggaucuaacauaugccuaaccagaacagacagaggcugguacugcgacaacgcagguucagucucauucuucccacaagccgaaacaugcaaaguccaauccaacagaguauuuugcgacacuaugaacucacuaacucuaccuucagaagucaaccuuuguaacauagacauauuuaacccaaaauacgauuguaaaauaaugaccagcaaaacagacgucucaucaagcguaauaacaucacuuggcgcaauagucuccugcuacggaaaaacaaaaugcacagcauccaacaaaaacagaggcaucauaaaaaccuucuccaacggcugcgacuauguaagcaacaaaggugucgauacaguaucaguaggaaacacacuauacugcguaaacaaacaagaaggacaaucacucuacguaaaaggugaaccaaucauaaacuucuacgacccauuaguuuucccaucagacgaauuugaugccuccauaucacaaguaaaugaaaaaauaaaucaaucccuagcauucauacgaaaaucugaugaauuacuucacaaugucaacgucggaaaaucaaccacuaacauaaugauaacaacaauuauaauaguaauaauaguaauacuccuacuauuaauagccgucggucuuuuccuauacugcaaagcacgauaaggacuagugcaucacauuuaaaagcaucucagccuaccaugagaauaagagaaagaaaaugaagaucaauagcuuauucaucucuuuuucuuuuucguugguguaaagccaacacccugucuaaaaaacauaaauuucuuuaaucauuuugccucuuuucucugugcuucaauuaauaaaaaauggaaagaaccuagaucuaaaaaaaaaaaaaaaaaaaaaaaaaaaaaaaaaaaaaaaaaaaaaaaaaaaaaaaaaaaaaaaaugcaucccccccccccccccccccccccccccccccaaaggcucuuuucagagccaccagaauu

SEQ ID NO: 16145 - RNA, 1927 nt, Artificial Sequence
  mRNA product Design i-2 comprising derived and/or modified sequence from HRSV(Memphis-37)__AIY60640.1__F-del_DSCav1_mut3 (opt11)
ggggcgcugccuacggagguggcagccaucuccuucucggcaucaagcuuaccauggaacuacccauccucaaaaccaacgccaucaccacaauccuagcugccgucacccuaugcuucgcaagcagccaaaacaucacagaagaauuuuaccaaucaaccugcuccgccgucuccaaaggguaccuaggugcccuccgcaccggcugguacacgucugucauaaccaucgaacucuccaacaucaaagaaaucaaauguaacggaacagacgcaaaagucaaacuaaucaaacaagaacuagacaaauacaaaaacgccguaaccgaccuccaacugcucaugcaauccacccccgcugccggcuccgggagcgcaaucugcucuggaaucgccguaugcaaaguccuccaccucgaaggagaaguaaacaaaaucaaaaacgcgcuccucaguaccaacaaagccgucgucucucuaucaaacggcguaucgguccucaccuucaaaguccucgaccuaaagaacuacauagacaaacaacuccuccccauccuaaacaaacaauccugcucaaucccaaacaucgaaaccgugaucgaguuccaacagaaaaacaaccgccuacucgaaaucacccgagaguucucagucaacgcaggagucaccacccccgucucaacauacaugcuuaccaacagcgaacuccuaucccucaucaacgacaugccaaucacaaacgaccaaaagaaacucaugagcaacaacguccagaucguaagacaacaaagcuacagcaucaugugcaucaucaaagaagaaguacuagcauacgucguccaacucccccucuacggcgucaucgacacccccugcuggaaacuccacaccucaccccucugcacaaccaacaccaaagaaggcuccaauaucugccucacacgcaccgaccgcggcugguacugcgacaacgccggcuccgucuccuucuucccucaagccgaaaccugcaaaguccaguccaacagagucuucugcgacaccaugaacucccuaacacuuccaucagaagucaaccuuuguaacaucgacaucuucaaucccaaauacgacuguaaaauaaugaccucaaaaacugacgugucaagcucaguuaucaccucccuaggggccaucgucuccugcuacggcaaaacaaaaugcaccgcauccaacaaaaaucgcggaaucaucaaaacauucuccaacggaugcgacuacgucucaaacaagggaguagauaccguaagcguuggcaacacccucuacugcguaaacaaacaagaaggccaaucacucuacgucaaaggcgaacccauaaucaacuucuacgacccccucgucuucccuuccgaugaguucgacgccagcaucucccaagucaacgagaaaauaaaccagucacucgcauucauccgcaaaagcgacgaacuccuccacaacguaaacguaggcaaauccacaaccaauaucaugauaaccacaaucaucaucgugaucaucgucauccuccuccuccucauagcugucggacucuuccucuacuguaaagcacgcugaggacuagugcaucacauuuaaaagcaucucagccuaccaugagaauaagagaaagaaaaugaagaucaauagcuuauucaucucuuuuucuuuuucguugguguaaagccaacacccugucuaaaaaacauaaauuucuuuaaucauuuugccucuuuucucugugcuucaauuaauaaaaaauggaaagaaccuagaucuaaaaaaaaaaaaaaaaaaaaaaaaaaaaaaaaaaaaaaaaaaaaaaaaaaaaaaaaaaaaaaaaugcaucccccccccccccccccccccccccccccccaaaggcucuuuucagagccaccagaauu

SEQ ID NO: 16146 - RNA, 1762 nt, Artificial Sequence
  mRNA product Design i-3 comprising derived and/or modified sequence from HRSV(Memphis-37)__AIY60640.1__F-del_DSCav1_mut3 (opt1)
gggagaaagcuuaccauggagcugcccauccucaagaccaacgccaucaccacgauccuggccgcggugacccugugcuucgccagcucccagaacaucaccgaggaguucuaccagagcacgugcuccgccgucagcaagggcuaccucggcgcccugcgcaccgggugguacaccagcgugaucaccaucgagcuguccaacaucaaggagaucaagugcaacggcaccgacgccaaggugaagcucaucaagcaggagcuggacaaguacaagaacgcggucacggaccugcagcuccugaugcagagcaccccggccgccggcuccgggagcgcgaucugcuccggcaucgccgucugcaaggugcugcaccucgagggcgaggugaacaagaucaagaacgcccugcuguccaccaacaaggccgucgugagccucuccaacggggugagcguccugaccuucaaggugcuggaccucaagaacuacaucgacaagcagcugcugcccauccugaacaagcagagcugcuccauccccaacaucgagaccgucaucgaguuccagcagaagaacaaccgccuccuggagaucacgcgggaguucagcgugaacgcgggcgugaccacccccgucuccaccuacaugcugacgaacagcgagcuccugucccugaucaacgacaugccgaucaccaacgaccagaagaagcucaugagcaacaacgugcagaucgugcgccagcaguccuacagcaucaugugcaucaucaaggaggagguccuggccuacguggugcagcugccccucuacggggucaucgacacccccugcuggaagcugcacaccagcccccugugcacgaccaacaccaaggagggcuccaacaucugccucacccggacggaccgcgggugguacugcgacaacgccggcagcguguccuucuucccgcaggccgagaccugcaagguccagagcaaccggguguucugcgacaccaugaacucccugacccugcccagcgaggugaaccucugcaacaucgacaucuucaaccccaaguacgacugcaagaucaugacguccaagaccgacgucagcuccagcgugaucaccucccugggcgccaucgugagcugcuacgggaagaccaagugcacggcgagcaacaagaaccgcggcaucaucaagaccuucuccaacgggugcgacuacgucagcaacaagggcguggacaccguguccgucggcaacacccuguacugcgugaacaagcaggagggccagagccucuacgugaagggggagcccaucaucaacuucuacgacccgcuggucuuccccuccgacgaguucgacgccagcaucucccaggugaacgagaagaucaaccagagccuggccuucauccggaaguccgacgagcuccugcacaacgugaacgucggcaagagcaccacgaacaucaugaucaccaccaucaucaucgugaucaucgugauccugcugcuccugaucgccgucgggcuguuccucuacugcaaggcccgcugaggacuaguuauaagacugacuagcccgaugggccucccaacgggcccuccuccccuccuugcaccgagauuaauaaaaaaaaaaaaaaaaaaaaaaaaaaaaaaaaaaaaaaaaaaaaaaaaaaaaaaaaaaaaaaaaugcaucccccccccccccccccccccccccccccccaaaggcucuuuucagagccaccagaauu

SEQ ID NO: 16147 - RNA, 1762 nt, Artificial Sequence
  mRNA product Design i-3 comprising derived and/or modified sequence from HRSV(Memphis-37)__AIY60640.1__F-del_DSCav1_mut3 (opt1)
gggagaaagcuuaccauggagcugcccauccucaagaccaacgccaucaccacgauccuggccgcggugacccugugcuucgccagcucccagaacaucaccgaggaguucuaccagagcacgugcuccgccgucagcaagggcuaccucggggcccugcgcaccggcugguacaccuccgugaucaccaucgagcugagcaacaucaaggagaucaagugcaacgggaccgacgccaaggugaagcucaucaagcaggagcuggacaaguacaagaacgcggucacggaccugcagcuccugaugcaguccaccccggccgccggcagcggguccgccaucugcagcggcaucgcggugugcaaggugcugcaccucgagggcgaggucaacaagaucaagaacgcccugcuguccaccaacaaggccguggugagccucuccaacggggucagcgugcugaccuucaaggugcuggaccucaagaacuacaucgacaagcagcugcugcccauccucaacaagcaguccugcagcauccccaacaucgagacggucaucgaguuccagcagaagaacaaccggcugcuggagaucacccgcgaguucuccgugaacgccggcgugaccacccccgucagcacguacaugcucaccaacuccgagcugcugagccucaucaacgacaugccgaucaccaacgaccagaagaagcugaugagcaacaacgugcagaucgugcggcagcaguccuacagcaucaugugcaucaucaaggaggagguccuggccuacguggugcagcucccccuguacggggucaucgacacccccugcuggaagcugcacacgagcccccucugcaccaccaacaccaaggagggcuccaacaucugccugacgcgcaccgaccgggggugguacugcgacaacgcgggcuccgugagcuucuucccgcaggccgagaccugcaaggugcaguccaaccgcgucuucugcgacaccaugaacagccugacgcuccccuccgaggugaaccugugcaacaucgacaucuucaaccccaaguacgacugcaagaucaugaccagcaagaccgacgucuccagcuccgugaucaccagccugggcgccaucguguccugcuacgggaagacgaagugcaccgccagcaacaagaaccggggcaucaucaagaccuucuccaacgggugcgacuacgucagcaacaagggcguggacaccguguccgucggcaacacgcucuacugcgugaacaagcaggaggggcagagccuguacgugaagggcgagcccaucaucaacuucuacgacccgcuggucuuccccagcgacgaguucgacgccuccaucagccaggugaacgagaagaucaaccagucccucgcguucauccgcaagagcgacgagcugcugcacaacgugaacgucgggaaguccaccaccaacaucaugaucaccaccaucaucaucgugaucaucgugauccuccugcugcucaucgccgucggccuguuccuguacugcaaggcccggugaggacuaguuauaagacugacuagcccgaugggccucccaacgggcccuccuccccuccuugcaccgagauuaauaaaaaaaaaaaaaaaaaaaaaaaaaaaaaaaaaaaaaaaaaaaaaaaaaaaaaaaaaaaaaaaaugcaucccccccccccccccccccccccccccccccaaaggcucuuuucagagccaccagaauu

SEQ ID NO: 16148 - RNA, 1762 nt, Artificial Sequence
  mRNA product Design i-3 comprising derived and/or modified sequence from HRSV(Memphis-37)__AIY60640.1__F-del_DSCav1_mut3 (opt2)
gggagaaagcuuaccauggagcuccccauccucaagaccaacgccaucaccaccauccucgccgccgucacccucugcuucgccuccucccagaacaucaccgaggaguucuaccaguccaccugcuccgccgucuccaagggcuaccucggcgcccuccgcaccggcugguacaccuccgucaucaccaucgagcucuccaacaucaaggagaucaagugcaacggcaccgacgccaaggucaagcucaucaagcaggagcucgacaaguacaagaacgccgucaccgaccuccagcuccucaugcaguccacccccgccgccggcuccggcuccgccaucugcuccggcaucgccgucugcaagguccuccaccucgagggcgaggucaacaagaucaagaacgcccuccucuccaccaacaaggccgucgucucccucuccaacggcgucuccguccucaccuucaagguccucgaccucaagaacuacaucgacaagcagcuccuccccauccucaacaagcaguccugcuccauccccaacaucgagaccgucaucgaguuccagcagaagaacaaccgccuccucgagaucacccgcgaguucuccgucaacgccggcgucaccacccccgucuccaccuacaugcucaccaacuccgagcuccucucccucaucaacgacaugcccaucaccaacgaccagaagaagcucauguccaacaacguccagaucguccgccagcaguccuacuccaucaugugcaucaucaaggaggagguccucgccuacgucguccagcucccccucuacggcgucaucgacacccccugcuggaagcuccacaccuccccccucugcaccaccaacaccaaggagggcuccaacaucugccucacccgcaccgaccgcggcugguacugcgacaacgccggcuccgucuccuucuucccccaggccgagaccugcaagguccaguccaaccgcgucuucugcgacaccaugaacucccucacccuccccuccgaggucaaccucugcaacaucgacaucuucaaccccaaguacgacugcaagaucaugaccuccaagaccgacgucuccuccuccgucaucaccucccucggcgccaucgucuccugcuacggcaagaccaagugcaccgccuccaacaagaaccgcggcaucaucaagaccuucuccaacggcugcgacuacgucuccaacaagggcgucgacaccgucuccgucggcaacacccucuacugcgucaacaagcaggagggccagucccucuacgucaagggcgagcccaucaucaacuucuacgacccccucgucuuccccuccgacgaguucgacgccuccaucucccaggucaacgagaagaucaaccagucccucgccuucauccgcaaguccgacgagcuccuccacaacgucaacgucggcaaguccaccaccaacaucaugaucaccaccaucaucaucgucaucaucgucauccuccuccuccucaucgccgucggccucuuccucuacugcaaggcccgcugaggacuaguuauaagacugacuagcccgaugggccucccaacgggcccuccuccccuccuugcaccgagauuaauaaaaaaaaaaaaaaaaaaaaaaaaaaaaaaaaaaaaaaaaaaaaaaaaaaaaaaaaaaaaaaaaugcaucccccccccccccccccccccccccccccccaaaggcucuuuucagagccaccagaauu

SEQ ID NO: 16149 - RNA, 1762 nt, Artificial Sequence
  mRNA product Design i-3 comprising derived and/or modified sequence from HRSV(Memphis-37)__AIY60640.1__F-del_DSCav1_mut3 (opt3)
gggagaaagcuuaccauggagcugcccauccucaagaccaacgccauuacaacuauacuugcugcagugacgcugugcuucgccagcucccagaauaucaccgaagaguuuuaccaaucuacauguucagcggucaguaaaggcuauuugggggcuuuaagaacuggaugguacaccagcguuauuacaaucgaacuguccaacauuaaggagaucaaaugcaaugguaccgacgccaaggugaaacuaauaaagcaggaacucgauaaguauaaaaacgcaguaacugaccugcagcuucugaugcagucuacuccugccgcuggcucggggucagcaaucuguagcggaauugccgugugcaaggucuugcaccucgagggcgaggugaauaaaaucaagaacgcucugcugaguaccaauaaagccguugugucccucucuaacggugucagcguguuaacguucaagguacuggaucuuaagaauuacauugacaaacaauugcugccaauccuaaacaagcaguccuguucaauaccgaauauugaaacuguuaucgaguuucagcagaaaaacaauaggcuccuggaaauuacccgggaguucagugugaacgcgggggucacaacucccgugagcaccuauaugcuuacaaauucugagcuguugucccucaucaacgauaugccuaucaccaacgaccaaaagaaacugaugucaaauaacgugcagauuguccgccagcagagcuacaguauaaugugcaucauuaaggaagagguuuuagcauaugugguacaacugccacucuacggagugaucgauacgcccuguuggaaacuucauacuucuccucugugcacaaccaauacuaaggaaggcuccaacauauguuugacacgaaccgaccguggcugguacugcgauaaugccgggagcgucucguuuuucccacaggcugagacguguaaggugcagucuaacagaguuuucugcgacaccaugaacucccuaacacugcccucagaagugaaucucugcaauauugauaucuucaacccuaaauaugacuguaagaucaugacaaguaaaaccgaugucagcuccucugugauuacaagccugggagccaucguaucaugcuacgguaagacuaaauguaccgcaaguaauaagaacaggggcauuauaaagacauuuuccaaugggugcgacuauguuagcaacaaaggaguggacaccgucucugugggcaauacucuuuacugugucaacaagcaagagggucagucacuguaugugaaaggggagccaaucauuaacuucuacgauccguugguuuuucccagugacgaauuugaugcuagcaucucccaggugaaugagaagaucaaccagucucucgccuuuauucggaaaucggacgaacuguuacacaauguaaacgucggaaagagcacgacaaauauaaugaucaccacuauuaucauugugaucauaguuauccugcuacuccugauugcggugggccuuuucuuguauugcaaggcccgcugaggacuaguuauaagacugacuagcccgaugggccucccaacgggcccuccuccccuccuugcaccgagauuaauaaaaaaaaaaaaaaaaaaaaaaaaaaaaaaaaaaaaaaaaaaaaaaaaaaaaaaaaaaaaaaaaugcaucccccccccccccccccccccccccccccccaaaggcucuuuucagagccaccagaauu

SEQ ID NO: 16150 - RNA, 1762 nt, Artificial Sequence
  mRNA product Design i-3 comprising derived and/or modified sequence from HRSV(Memphis-37)__AIY60640.1__F-del_DSCav1_mut3 (opt4)
gggagaaagcuuaccauggagcugcccauccugaagaccaacgccaucaccaccauccuggccgccgugacccugugcuucgccagcagccagaacaucaccgaggaguucuaccagagcaccugcagcgccgugagcaagggcuaccugggcgcccugagaaccggcugguacaccagcgugaucaccaucgagcugagcaacaucaaggagaucaagugcaacggcaccgacgccaaggugaagcugaucaagcaggagcuggacaaguacaagaacgccgugaccgaccugcagcugcugaugcagagcacccccgccgccggcagcggcagcgccaucugcagcggcaucgccgugugcaaggugcugcaccuggagggcgaggugaacaagaucaagaacgcccugcugagcaccaacaaggccguggugagccugagcaacggcgugagcgugcugaccuucaaggugcuggaccugaagaacuacaucgacaagcagcugcugcccauccugaacaagcagagcugcagcauccccaacaucgagaccgugaucgaguuccagcagaagaacaacagacugcuggagaucaccagagaguucagcgugaacgccggcgugaccacccccgugagcaccuacaugcugaccaacagcgagcugcugagccugaucaacgacaugcccaucaccaacgaccagaagaagcugaugagcaacaacgugcagaucgugagacagcagagcuacagcaucaugugcaucaucaaggaggaggugcuggccuacguggugcagcugccccuguacggcgugaucgacacccccugcuggaagcugcacaccagcccccugugcaccaccaacaccaaggagggcagcaacaucugccugaccagaaccgacagaggcugguacugcgacaacgccggcagcgugagcuucuucccccaggccgagaccugcaaggugcagagcaacagaguguucugcgacaccaugaacagccugacccugcccagcgaggugaaccugugcaacaucgacaucuucaaccccaaguacgacugcaagaucaugaccagcaagaccgacgugagcagcagcgugaucaccagccugggcgccaucgugagcugcuacggcaagaccaagugcaccgccagcaacaagaacagaggcaucaucaagaccuucagcaacggcugcgacuacgugagcaacaagggcguggacaccgugagcgugggcaacacccuguacugcgugaacaagcaggagggccagagccuguacgugaagggcgagcccaucaucaacuucuacgacccccugguguuccccagcgacgaguucgacgccagcaucagccaggugaacgagaagaucaaccagagccuggccuucaucagaaagagcgacgagcugcugcacaacgugaacgugggcaagagcaccaccaacaucaugaucaccaccaucaucaucgugaucaucgugauccugcugcugcugaucgccgugggccuguuccuguacugcaaggccagaugaggacuaguuauaagacugacuagcccgaugggccucccaacgggcccuccuccccuccuugcaccgagauuaauaaaaaaaaaaaaaaaaaaaaaaaaaaaaaaaaaaaaaaaaaaaaaaaaaaaaaaaaaaaaaaaaugcaucccccccccccccccccccccccccccccccaaaggcucuuuucagagccaccagaauu

SEQ ID NO: 16151 - RNA, 1762 nt, Artificial Sequence
  mRNA product Design i-3 comprising derived and/or modified sequence from HRSV(Memphis-37)__AIY60640.1__F-del_DSCav1_mut3 (opt5)
gggagaaagcuuaccauggagcugcccauccucaagaccaacgccauuacaacgauccuggcugccgugacccuuugcuucgcgagcucccagaauauuacagaagaguuuuaccaaucuaccuguagcgcugucuccaaaggcuaucugggggcccucagaacaggaugguacaccucuguuaucacaauugaacugagcaacaucaaggagaucaaaugcaauggcaccgacgccaaggugaaacuuauuaagcaggaacuggauaaguauaaaaacgcugugacggaccuccagcugcugaugcaguccaccccugccgcugggucuggaagcgccaucuguuccggcauugcggucugcaaggugcuccaccuggagggggagguuaauaaaaucaagaacgcccuucugagcacaaauaaagcuguggucucucucuccaacggagugagcguucugaccuucaaggugcuugaucugaagaauuacauugacaaacaacuccugccgauccugaacaagcagucuuguuccauucccaauaucgaaacagucaucgaguuucagcagaaaaacaaucggcuccuggaaauuacccgcgaguucagcgugaacgccggcgugacgacaccugucucuaccuauaugcuuacaaauuccgagcugcucagccugaucaacgauaugcccauuaccaacgaccaaaagaaacuuauguccaauaacguucagaucgugagacagcagucuuacagcauuaugugcaucaucaaggaagaggugcuggcuuaugucgugcaacucccucuguacggcguuauugauacccccuguuggaaacugcauacauccccucucugcacgaccaauacaaaggaagggagcaacaucugucugacccggacagaccgcggaugguacugcgauaaugccggcucuguguccuuuuucccgcaggcggagaccuguaagguccagagcaacagaguguuuugcgacacgaugaacucucuuacacugcccagcgaaguuaaucucugcaauauugauaucuucaacccuaaauaugacuguaagauuaugaccuccaaaaccgaugugucuagcuccgucaucacaagccugggggccaucgugucuugcuacggaaagaccaaauguacagcuuccaauaagaaccggggcauuaucaagacguuuagcaaugggugcgacuaugucucuaacaaaggaguggacaccguuuccgugggcaauacacuuuacugugucaacaagcaagagggccagagccuguaugugaaaggggagcccauuaucaacuucuacgauccucucguuuuucccuccgacgaguucgaugccucuauuagccaggugaaugaaaagaucaaccagucccuggcuuuuauucgcaaaucugacgaacugcuccacaaugucaacgugggaaagagcaccacaaauaucaugaucaccacgauuaucauugugaucauuguuauccugcuucugcucaucgccgucggccuguuccuguauugcaaggccagaugaggacuaguuauaagacugacuagcccgaugggccucccaacgggcccuccuccccuccuugcaccgagauuaauaaaaaaaaaaaaaaaaaaaaaaaaaaaaaaaaaaaaaaaaaaaaaaaaaaaaaaaaaaaaaaaaugcaucccccccccccccccccccccccccccccccaaaggcucuuuucagagccaccagaauu

SEQ ID NO: 16152 - RNA, 1762 nt, Artificial Sequence
  mRNA product Design i-3 comprising derived and/or modified sequence from HRSV(Memphis-37)__AIY60640.1__F-del_DSCav1_mut3 (opt6)
gggagaaagcuuaccauggaacuacccauccuaaaaacaaaugccauaaccacaauacucgccgcuguaacacuauguuucgcuaguucacaaaacauuacagaagaauuuuaccaauccacaugcucagcaguaucaaaaggauaccuaggugcacuaagaacaggaugguacacaagcguaauuacaauagaauuauccaauauuaaagaaauaaaauguaacggcacugacgcuaaaguaaaauuaaucaaacaagaacuagacaaauacaaaaacgcaguaacagaccuacaauuacucaugcaauccacacccgcagcaggaucaggcucagccauaugcucagguauagcaguaugcaaaguacuccaccuugaaggagaaguaaacaaaauaaaaaacgcauuacuaucaacaaacaaagcaguaguaucacuaucaaacggagucucugucuuaaccuuuaaaguauuagauuuaaaaaacuacauagacaaacaacuauuaccaauucuaaauaaacaaucauguucuauaccaaauauagaaacaguaauagaauuucaacaaaaaaacaaccgauuacuagaaaucacaagagaauuuucugucaacgccggcguaaccaccccagucucaacauauaugcuaacaaauagugaacucuuauccuuaauaaacgacaugccaauaacaaaugaccaaaaaaaauuaauguccaauaacguacaaauagucagacaacagucauacucaauaauguguaucaucaaagaagaaguauuagcauacguaguucaacuaccccuauacggcguaauagacacaccauguuggaaacuacacacaucacccuuaugcacaaccaauaccaaagaaggaucuaacauaugccuaaccagaacagacagaggcugguacugcgacaacgcagguucagucucauucuucccacaagccgaaacaugcaaaguccaauccaacagaguauuuugcgacacuaugaacucacuaacucuaccuucagaagucaaccuuuguaacauagacauauuuaacccaaaauacgauuguaaaauaaugaccagcaaaacagacgucucaucaagcguaauaacaucacuuggcgcaauagucuccugcuacggaaaaacaaaaugcacagcauccaacaaaaacagaggcaucauaaaaaccuucuccaacggcugcgacuauguaagcaacaaaggugucgauacaguaucaguaggaaacacacuauacugcguaaacaaacaagaaggacaaucacucuacguaaaaggugaaccaaucauaaacuucuacgacccauuaguuuucccaucagacgaauuugaugccuccauaucacaaguaaaugaaaaaauaaaucaaucccuagcauucauacgaaaaucugaugaauuacuucacaaugucaacgucggaaaaucaaccacuaacauaaugauaacaacaauuauaauaguaauaauaguaauacuccuacuauuaauagccgucggucuuuuccuauacugcaaagcacgauaaggacuaguuauaagacugacuagcccgaugggccucccaacgggcccuccuccccuccuugcaccgagauuaauaaaaaaaaaaaaaaaaaaaaaaaaaaaaaaaaaaaaaaaaaaaaaaaaaaaaaaaaaaaaaaaaugcaucccccccccccccccccccccccccccccccaaaggcucuuuucagagccaccagaauu

SEQ ID NO: 16153 - RNA, 1762 nt, Artificial Sequence
  mRNA product Design i-3 comprising derived and/or modified sequence from HRSV(Memphis-37)__AIY60640.1__F-del_DSCav1_mut3 (opt11)
gggagaaagcuuaccauggaacuacccauccucaaaaccaacgccaucaccacaauccuagcugccgucacccuaugcuucgcaagcagccaaaacaucacagaagaauuuuaccaaucaaccugcuccgccgucuccaaaggguaccuaggugcccuccgcaccggcugguacacgucugucauaaccaucgaacucuccaacaucaaagaaaucaaauguaacggaacagacgcaaaagucaaacuaaucaaacaagaacuagacaaauacaaaaacgccguaaccgaccuccaacugcucaugcaauccacccccgcugccggcuccgggagcgcaaucugcucuggaaucgccguaugcaaaguccuccaccucgaaggagaaguaaacaaaaucaaaaacgcgcuccucaguaccaacaaagccgucgucucucuaucaaacggcguaucgguccucaccuucaaaguccucgaccuaaagaacuacauagacaaacaacuccuccccauccuaaacaaacaauccugcucaaucccaaacaucgaaaccgugaucgaguuccaacagaaaaacaaccgccuacucgaaaucacccgagaguucucagucaacgcaggagucaccacccccgucucaacauacaugcuuaccaacagcgaacuccuaucccucaucaacgacaugccaaucacaaacgaccaaaagaaacucaugagcaacaacguccagaucguaagacaacaaagcuacagcaucaugugcaucaucaaagaagaaguacuagcauacgucguccaacucccccucuacggcgucaucgacacccccugcuggaaacuccacaccucaccccucugcacaaccaacaccaaagaaggcuccaauaucugccucacacgcaccgaccgcggcugguacugcgacaacgccggcuccgucuccuucuucccucaagccgaaaccugcaaaguccaguccaacagagucuucugcgacaccaugaacucccuaacacuuccaucagaagucaaccuuuguaacaucgacaucuucaaucccaaauacgacuguaaaauaaugaccucaaaaacugacgugucaagcucaguuaucaccucccuaggggccaucgucuccugcuacggcaaaacaaaaugcaccgcauccaacaaaaaucgcggaaucaucaaaacauucuccaacggaugcgacuacgucucaaacaagggaguagauaccguaagcguuggcaacacccucuacugcguaaacaaacaagaaggccaaucacucuacgucaaaggcgaacccauaaucaacuucuacgacccccucgucuucccuuccgaugaguucgacgccagcaucucccaagucaacgagaaaauaaaccagucacucgcauucauccgcaaaagcgacgaacuccuccacaacguaaacguaggcaaauccacaaccaauaucaugauaaccacaaucaucaucgugaucaucgucauccuccuccuccucauagcugucggacucuuccucuacuguaaagcacgcugaggacuaguuauaagacugacuagcccgaugggccucccaacgggcccuccuccccuccuugcaccgagauuaauaaaaaaaaaaaaaaaaaaaaaaaaaaaaaaaaaaaaaaaaaaaaaaaaaaaaaaaaaaaaaaaaugcaucccccccccccccccccccccccccccccccaaaggcucuuuucagagccaccagaauu

SEQ ID NO: 16154 - protein, 535 aa, Artificial Sequence
  derived and/or modified protein sequence (artificial) from HRSV(Memphis-37)__AIY60640.1__F_DSCav1_mut4
MELPILKTNAITTILAAVTLCFASSQNITEEFYQSTCSAVSKGYLSALRTGWYTSVITIELSNIKENKCNGTDAKVKLIKQELDKYKNAVTELQLLMQSTPAAGSGSAICSGIAVCKVLHLEGEVNKIKNALLSTNKAVVSLSNGVSVLTFKVLDLKNYIDKQLLPILNKQSCSISNIETVIEFQQKNNRLLEITREFSVNAGVTTPVSTYMLTNSELLSLINDMPITNDQKKLMSNNVQIVRQQSYSIMCIIKEEVLAYVVQLPLYGVIDTPCWKLHTSPLCTTNTKEGSNICLTRTDRGWYCDNAGSVSFFPQAETCKVQSNRVFCDTMNSRTLPSEVNLCNIDIFNPKYDCKIMTSKTDVSSSVITSLGAIVSCYGKTKCTASNKNRGIIKTFSNGCDYVSNKGVDTVSVGNTLYCVNKQEGKSLYVKGEPIINFYDPLVFPSDEFDASISQVNEKINQSLAFIRKSDELLHNVNVGKSTTNIMITTIIIVIIVILLLLIAVGLFLYCKARSTPVTLSKDQLSGINNIAFSN

SEQ ID NO: 16155 - RNA, 1608 nt, Artificial Sequence
  derived and/or modified CDS sequence (opt1) from HRSV(Memphis-37)__AIY60640.1__F_DSCav1_mut4
auggagcugcccauccucaagaccaacgccaucaccacgauccuggccgcggugacccugugcuucgccagcucccagaacaucaccgaggaguucuaccagagcacgugcuccgccgucagcaagggcuaccucuccgcccugcgcaccgggugguacaccagcgugaucaccaucgagcuguccaacaucaaggagaacaagugcaacggcaccgacgccaaggugaagcucaucaagcaggagcuggacaaguacaagaacgcggucacggagcugcagcuccugaugcagagcaccccggccgccggcuccgggagcgcgaucugcuccggcaucgccgucugcaaggugcugcaccucgagggcgaggugaacaagaucaagaacgcccugcuguccaccaacaaggccgucgugagccucuccaacggggugagcguccugaccuucaaggugcuggaccucaagaacuacaucgacaagcagcugcugcccauccugaacaagcagagcugcuccaucagcaacaucgagaccgucaucgaguuccagcagaagaacaaccgccuccuggagaucacgcgggaguucagcgugaacgcgggcgugaccacccccgucuccaccuacaugcugacgaacagcgagcuccugucccugaucaacgacaugccgaucaccaacgaccagaagaagcucaugagcaacaacgugcagaucgugcgccagcaguccuacagcaucaugugcaucaucaaggaggagguccuggccuacguggugcagcugccccucuacggggucaucgacacccccugcuggaagcugcacaccagcccccugugcacgaccaacaccaaggagggcuccaacaucugccucacccggacggaccgcgggugguacugcgacaacgccggcagcguguccuucuucccgcaggccgagaccugcaagguccagagcaaccggguguucugcgacaccaugaacucccggacccugcccagcgaggugaaccucugcaacaucgacaucuucaaccccaaguacgacugcaagaucaugacguccaagaccgacgucagcuccagcgugaucaccucccugggcgccaucgugagcugcuacgggaagaccaagugcacggcgagcaacaagaaccgcggcaucaucaagaccuucuccaacgggugcgacuacgucagcaacaagggcguggacaccguguccgucggcaacacccuguacugcgugaacaagcaggagggcaagagccucuacgugaagggggagcccaucaucaacuucuacgacccgcuggucuuccccuccgacgaguucgacgccagcaucucccaggugaacgagaagaucaaccagagccuggccuucauccggaaguccgacgagcuccugcacaacgugaacgucggcaagagcaccacgaacaucaugaucaccaccaucaucaucgugaucaucgugauccugcugcuccugaucgccgucgggcuguuccucuacugcaaggcccgcuccacccccgugacgcugagcaaggaccagcuguccgggaucaacaacaucgcguucagcaacuga

SEQ ID NO: 16156 - RNA, 1608 nt, Artificial Sequence
  derived and/or modified CDS sequence (opt1) from HRSV(Memphis-37)__AIY60640.1__F_DSCav1_mut4
auggagcugcccauccucaagaccaacgccaucaccacgauccuggccgcggugacccugugcuucgccagcucccagaacaucaccgaggaguucuaccagagcacgugcuccgccgucagcaagggcuaccucuccgcccugcgcaccgggugguacaccagcgugaucaccaucgagcuguccaacaucaaggagaacaagugcaacggcaccgacgccaaggugaagcucaucaagcaggagcuggacaaguacaagaacgcggucacggagcugcagcuccugaugcagagcaccccggccgccggguccggcagcgccaucugcuccgggaucgcggugugcaaggugcugcaccucgagggcgaggucaacaagaucaagaacgcccugcugagcaccaacaaggccguggugucccucagcaacggcgucuccgugcugaccuucaaggugcuggaccucaagaacuacaucgacaagcagcugcugcccauccucaacaagcagagcugcuccaucagcaacaucgagacggucaucgaguuccagcagaagaacaaccggcugcuggagaucacccgcgaguucuccgugaacgccggggugaccacccccgucagcacguacaugcucaccaacagcgagcugcugucccucaucaacgacaugcccaucaccaacgaccagaagaagcugaugagcaacaacgugcagaucgugcggcagcaguccuacagcaucaugugcaucaucaaggaggagguccuggccuacguggugcagcucccgcuguacggcgucaucgacacccccugcuggaagcugcacacgagcccccucugcaccaccaacaccaaggagggguccaacaucugccugacgcgcaccgaccggggcugguacugcgacaacgcgggguccgugagcuucuucccccaggccgagaccugcaaggugcaguccaaccgcgucuucugcgacaccaugaacagccggacgcucccguccgaggugaaccugugcaacaucgacaucuucaaccccaaguacgacugcaagaucaugaccagcaagaccgacgucuccagcuccgugaucaccagccugggcgccaucguguccugcuacggcaagacgaagugcaccgccagcaacaagaaccgggggaucaucaagaccuucuccaacggcugcgacuacgucagcaacaaggggguggacaccgugagcgucggcaacacgcucuacugcgugaacaagcaggagggcaagucccuguacgugaagggggagcccaucaucaacuucuacgacccccuggucuucccgagcgacgaguucgacgccuccaucagccaggugaacgagaagaucaaccagucccucgcguucauccgcaagagcgacgagcugcugcacaacgugaacgucggcaaguccaccaccaacaucaugaucaccaccaucaucaucgugaucaucgugauccuccugcugcucaucgccgucgggcuguuccuguacugcaaggcccggagcacgcccgugacccuguccaaggaccagcucagcggcaucaacaacaucgccuucuccaacuga

SEQ ID NO: 16157 - RNA, 1608 nt, Artificial Sequence
  derived and/or modified CDS sequence (opt2) from HRSV(Memphis-37)__AIY60640.1__F_DSCav1_mut4
auggagcuccccauccucaagaccaacgccaucaccaccauccucgccgccgucacccucugcuucgccuccucccagaacaucaccgaggaguucuaccaguccaccugcuccgccgucuccaagggcuaccucuccgcccuccgcaccggcugguacaccuccgucaucaccaucgagcucuccaacaucaaggagaacaagugcaacggcaccgacgccaaggucaagcucaucaagcaggagcucgacaaguacaagaacgccgucaccgagcuccagcuccucaugcaguccacccccgccgccggcuccggcuccgccaucugcuccggcaucgccgucugcaagguccuccaccucgagggcgaggucaacaagaucaagaacgcccuccucuccaccaacaaggccgucgucucccucuccaacggcgucuccguccucaccuucaagguccucgaccucaagaacuacaucgacaagcagcuccuccccauccucaacaagcaguccugcuccaucuccaacaucgagaccgucaucgaguuccagcagaagaacaaccgccuccucgagaucacccgcgaguucuccgucaacgccggcgucaccacccccgucuccaccuacaugcucaccaacuccgagcuccucucccucaucaacgacaugcccaucaccaacgaccagaagaagcucauguccaacaacguccagaucguccgccagcaguccuacuccaucaugugcaucaucaaggaggagguccucgccuacgucguccagcucccccucuacggcgucaucgacacccccugcuggaagcuccacaccuccccccucugcaccaccaacaccaaggagggcuccaacaucugccucacccgcaccgaccgcggcugguacugcgacaacgccggcuccgucuccuucuucccccaggccgagaccugcaagguccaguccaaccgcgucuucugcgacaccaugaacucccgcacccuccccuccgaggucaaccucugcaacaucgacaucuucaaccccaaguacgacugcaagaucaugaccuccaagaccgacgucuccuccuccgucaucaccucccucggcgccaucgucuccugcuacggcaagaccaagugcaccgccuccaacaagaaccgcggcaucaucaagaccuucuccaacggcugcgacuacgucuccaacaagggcgucgacaccgucuccgucggcaacacccucuacugcgucaacaagcaggagggcaagucccucuacgucaagggcgagcccaucaucaacuucuacgacccccucgucuuccccuccgacgaguucgacgccuccaucucccaggucaacgagaagaucaaccagucccucgccuucauccgcaaguccgacgagcuccuccacaacgucaacgucggcaaguccaccaccaacaucaugaucaccaccaucaucaucgucaucaucgucauccuccuccuccucaucgccgucggccucuuccucuacugcaaggcccgcuccacccccgucacccucuccaaggaccagcucuccggcaucaacaacaucgccuucuccaacuga

SEQ ID NO: 16158 - RNA, 1608 nt, Artificial Sequence
  derived and/or modified CDS sequence (opt3) from HRSV(Memphis-37)__AIY60640.1__F_DSCav1_mut4
auggagcugcccauccucaagaccaacgccauuacaacuauacuugcugcagugacgcugugcuucgccagcucccagaauaucaccgaagaguuuuaccaaucuacauguucagcggucaguaaaggcuauuugagcgcuuuaagaacugggugguacaccuccguuauuacaaucgaacugucuaacauuaaggagaauaaaugcaacggaaccgacgccaaggugaaacuaaucaagcaggaacucgauaaguauaaaaaugcaguaacugagcugcagcuucugaugcagucgaccccugccgcugguucaggcagcgcaauauguagugggaucgccgugugcaaggucuugcaccucgagggagaagugaacaaaauuaagaaugcucugcuguccacaaacaaagccguugugucucucagcaauggcgucuccguguuaacguucaagguacuggaccuuaagaacuacaucgauaaacaauugcugccaauucuaaauaagcagucauguaguaucagcaacauagagacuguuauugaauuucagcagaaaaauaacaggcuccuggagaucacccgggaguucucugugaaugcgggugucacaacuccgguguccaccuauaugcuuacaaacucagaacuguugagccucauuaacgacaugcccaucaccaaugaucaaaagaaacugaugaguaacaaugugcagaucguccgccagcagucuuacuccauuaugugcauaaucaaggaggaaguuuuagcauaugugguacaacugccucucuacggggugauugacacgccauguuggaaacuucauacuagcccccugugcacaaccaacacuaaggagggaucgaauaucuguuugacacgaaccgaucguggcugguacugcgacaacgccggcucugucuccuuuuucccucaggcugaaacguguaaggugcagucaaauagaguguuuugcgauaccaugaacaguagaacacugccaagcgaggugaaucucugcaacauagacauuuucaaucccaaauaugauuguaagaucaugacuuccaaaaccgacgucucuagcucagugaucacaagucugggggccauuguauccugcuacggaaagacuaaauguaccgcaagcaacaagaauagggguaucauuaagacauuuucuaacggcugcgauuauguuucaaauaaagggguggacaccgucagugugggaaacacucuuuacugugucaacaagcaagagggcaaaagccuguaugugaagggugaaccuauaaucaauuucuacgacccauugguuuuuccguccgaugaguucgacgcuucuauuucgcagguuaacgagaaaaucaaucagagccucgccuuuauccggaaguccgaugaacuguuacacaacguaaaugucgggaagucaacgacaaacauuaugauaaccacuaucauuaucgugauuaucguuauacugcuacuccugaucgcggugggacuuuucuuguauugcaaagcccgcaguacccccgucacacugucuaaggaccagcucagcggcauuaauaacaucgcauucuccaauuga

SEQ ID NO: 16159 - RNA, 1608 nt, Artificial Sequence
  derived and/or modified CDS sequence (opt4) from HRSV(Memphis-37)__AIY60640.1__F_DSCav1_mut4
auggagcugcccauccugaagaccaacgccaucaccaccauccuggccgccgugacccugugcuucgccagcagccagaacaucaccgaggaguucuaccagagcaccugcagcgccgugagcaagggcuaccugagcgcccugagaaccggcugguacaccagcgugaucaccaucgagcugagcaacaucaaggagaacaagugcaacggcaccgacgccaaggugaagcugaucaagcaggagcuggacaaguacaagaacgccgugaccgagcugcagcugcugaugcagagcacccccgccgccggcagcggcagcgccaucugcagcggcaucgccgugugcaaggugcugcaccuggagggcgaggugaacaagaucaagaacgcccugcugagcaccaacaaggccguggugagccugagcaacggcgugagcgugcugaccuucaaggugcuggaccugaagaacuacaucgacaagcagcugcugcccauccugaacaagcagagcugcagcaucagcaacaucgagaccgugaucgaguuccagcagaagaacaacagacugcuggagaucaccagagaguucagcgugaacgccggcgugaccacccccgugagcaccuacaugcugaccaacagcgagcugcugagccugaucaacgacaugcccaucaccaacgaccagaagaagcugaugagcaacaacgugcagaucgugagacagcagagcuacagcaucaugugcaucaucaaggaggaggugcuggccuacguggugcagcugccccuguacggcgugaucgacacccccugcuggaagcugcacaccagcccccugugcaccaccaacaccaaggagggcagcaacaucugccugaccagaaccgacagaggcugguacugcgacaacgccggcagcgugagcuucuucccccaggccgagaccugcaaggugcagagcaacagaguguucugcgacaccaugaacagcagaacccugcccagcgaggugaaccugugcaacaucgacaucuucaaccccaaguacgacugcaagaucaugaccagcaagaccgacgugagcagcagcgugaucaccagccugggcgccaucgugagcugcuacggcaagaccaagugcaccgccagcaacaagaacagaggcaucaucaagaccuucagcaacggcugcgacuacgugagcaacaagggcguggacaccgugagcgugggcaacacccuguacugcgugaacaagcaggagggcaagagccuguacgugaagggcgagcccaucaucaacuucuacgacccccugguguuccccagcgacgaguucgacgccagcaucagccaggugaacgagaagaucaaccagagccuggccuucaucagaaagagcgacgagcugcugcacaacgugaacgugggcaagagcaccaccaacaucaugaucaccaccaucaucaucgugaucaucgugauccugcugcugcugaucgccgugggccuguuccuguacugcaaggccagaagcacccccgugacccugagcaaggaccagcugagcggcaucaacaacaucgccuucagcaacuga

SEQ ID NO: 16160 - RNA, 1608 nt, Artificial Sequence
  derived and/or modified CDS sequence (opt5) from HRSV(Memphis-37)__AIY60640.1__F_DSCav1_mut4
auggagcugcccauccucaagaccaacgccauuacaacgauccuggcugccgugacccuuugcuucgcgagcucccagaauauuacagaagaguuuuaccaaucuaccuguagcgcugucuccaaaggcuaucugucugcccucagaacagggugguacaccagcguuaucacaauugaacuguccaacaucaaggagaauaaaugcaacggaaccgacgccaaggugaaacuuaucaagcaggaacuggauaaguauaaaaaugcugugacggagcuccagcugcugaugcagucuaccccugccgcuggcagcggguccgccauuuguagcggaaucgcggucugcaaggugcuccaccuggagggcgaaguuaacaaaauuaagaaugcccuucugucuacaaacaaagcuguggucucccucagcaauggggugucuguucugaccuucaaggugcuugaccugaagaacuacaucgauaaacaacuccugccgauucugaauaagcaguccuguagcaucucuaacauugagacagucaucgaauuucagcagaaaaauaaccggcuccuggagaucacccgcgaguucuccgugaaugccggagugacgacacccgucagcaccuauaugcuuacaaacuccgaacugcucucucugauuaacgacaugccuaucaccaaugaucaaaagaaacuuaugagcaacaauguucagauugugagacagcaguccuacagcaucaugugcauuaucaaggaggaagugcuggcuuaugucgugcaacucccccuguacggcguuaucgacaccccuuguuggaaacugcauacaucuccccucugcacgaccaacacaaaggagggcuccaauauuugucugacccggacagaucgcgggugguacugcgacaacgccggaagcgugagcuuuuucccucaggcggaaaccuguaagguccagucuaauagaguguuuugcgauacgaugaacuccagaacacugccgucugagguuaaucucugcaacaucgacauuuucaaucccaaauaugauuguaagaucaugaccagcaaaaccgacguguccagcucugucauuacaucccugggcgccaucgugagcugcuacgggaagaccaaauguacagcuucuaacaagaaucggggaaucauuaagacguuuuccaacggcugcgauuaugucagcaauaaagggguggacaccguuuccgugggaaacacacuuuacugugucaacaagcaagagggcaaaucucuguaugugaagggcgaaccuaucauuaauuucuacgacccccucguuuuuccuagcgaugaguucgacgccuccaucucucaggugaacgaaaagauuaaucagagccuggcuuuuauccgcaaguccgaugagcugcuccacaacgucaauguggggaaaagcaccacaaacauuaugaucaccacgaucauuaucgugauuaucguuauucugcuucugcucaucgccgucggacuguuccuguauugcaaagccagaucuacccccgugacacuuuccaaggaccagcucagcggcaucaauaacauugcuuucucuaauuga

SEQ ID NO: 16161 - RNA, 1608 nt, Artificial Sequence
  derived and/or modified CDS sequence (opt6) from HRSV(Memphis-37)__AIY60640.1__F_DSCav1_mut4
auggaacucccaauccuaaaaacaaacgcaauaacaacaauauuagcagccguaacacucuguuucgccucaucccaaaacauaacagaagaauuuuaucaaucuacauguuccgccgucaguaaaggauaucuaucagccuuaagaacaggcugguacacaucaguaaucaccauagaauuauccaacauaaaagaaaacaaaugcaauggcacagaugccaaaguaaaacuaaucaaacaagaacuugauaaauauaaaaacgcaguaacagaauuacaauuauuaaugcaaagcacaccagccgcaggaucaggaucagcaauauguucaggaauagcagucuguaaaguacuacacuuagaaggagaaguaaacaaaauuaaaaacgcauuacuaagcaccaauaaagcaguaguaucacuaucaaacggcguauccguauuaacguucaaaguccucgaccugaaaaacuacauagauaaacaacuacuaccaauacuaaauaaacaaucaugcucaauaucaaacauagaaacuguuaucgaauuucaacagaaaaauaaccgacuacuagaaaucaccagagaauuuucaguaaacgcaggcgucacuacaccaguauccacauacaugcuaaccaacucggaauuacuuucccucauaaacgacaugccaauaacaaacgaccaaaagaaacuuaugucaaacaacguucaaauaguccgccaacaaucauacucaauaauguguaucauaaaagaagaaguccuagcauaugucguacaacuaccauuauacggaguaauugacacaccuugcuggaaacuacacacauccccacuauguacaacaaacacuaaagaaggaucaaacaucugccuaaccagaacagacagaggcugguauugcgacaacgcaggaucaguaucauucuucccacaagcagaaacaugcaaaguacaaucaaacagagucuucugcgacaccaugaacagcagaacccucccauccgaaguaaacuuaugcaacaucgauaucuucaacccaaaauacgacuguaaaauaaugacaucaaaaacagacguuucauccucaguaauaacaucauuaggugccauaguuucauguuacggaaaaaccaaauguaccgcaucaaacaaaaacagaggcauuauuaaaacauucucuaacggaugcgacuaugucaguaacaaaggaguagacacaguaucagucggaaacacauuauauugcguaaauaaacaagaaggaaaaagucuauacguaaaaggagaaccaauaauaaacuuuuacgacccucucguauucccaucagacgaauuugaugcauccauaucacaagucaacgaaaagauaaaccaaucccuagcauucauaagaaaaucagacgaacuacuccauaacguaaacguaggaaaaagcacaaccaauauaaugauaaccacaauaaucauaguaauaauagucauauuauuacuuuuaauugcaguaggacucuuucuauacugcaaagcaagaagcacaccaguaacacuaagcaaagaccaacuaucaggcaucaacaauaucgccuuuucaaauuaa

SEQ ID NO: 16162 - RNA, 1608 nt, Artificial Sequence
  derived and/or modified CDS sequence (opt11) from HRSV(Memphis-37)__AIY60640.1__F_DSCav1_mut4
auggagcugcccauccucaagaccaacgccaucaccacgauccuggccgcggugacccugugcuucgcgagcucccagaacaucaccgaggaguucuaccagagcacgugcuccgccgucagcaagggcuaccucuccgcccugcgcaccgggugguacaccagcgugaucaccaucgagcuguccaacaucaaggagaacaagugcaacggcaccgacgccaaggugaaacucaucaagcaggagcuggacaaguacaagaacgccgucaccgagcugcagcuccugaugcagagcaccccggccgccggguccggcagcgcuaucugcuccgggaucgcggugugcaaggugcugcaccucgagggcgaggucaacaagaucaagaaugcccugcugagcaccaacaaggccguggugucccucagcaacggagucagcgugcuuaccuucaaggugcuggaccucaagaacuacaucgacaagcagcugcugccuauccucaacaagcagagcugcuccaucagcaacaucgagacggucaucgaguuccagcagaagaacaaccggcugcuggagaucacccgcgaguucuccgugaacgccggggugaccacccccgucagcacguacaugcucaccaacagcgaacugcugucccucaucaacgacaugcccaucaccaacgaccagaagaagcugaugagcaacaacgugcagaucgugcggcagcaguccuacagcaucaugugcaucaucaaggaggaaguccuggccuacguggugcagcucccucuguacggcgucaucgacacccccugcuggaagcugcacacgagcccccucugcaccaccaacaccaaggagggguccaacaucugccugacgcgcaccgaccggggcugguacugcgacaacgcgggguccgugagcuucuucccccaggccgagaccugcaaggugcagagcaaccgcgucuucugcgacacuaugaacagcagaacgcucccguccgaggugaaccugugcaacauagacauauucaaccccaaguacgacugcaagaucaugaccagcaagaccgacgucuccagcuccgugauuaccagccugggcgcaaucguguccugcuacggcaagacgaagugcaccgccagcaacaagaaccgggggaucaucaagaccuucuccaacggcugcgacuaugucagcaacaaggggguggacaccgugagcgucggaaacacgcucuacugcgugaacaagcaagagggcaaguccuuauacgugaagggggagcccaucaucaacuucuacgacccccuggucuucccgagcgacgaguucgacgccagcauaagccaggugaacgagaagaucaaccagucccucgcguucauccgcaagagcgacgagcugcugcacaacgugaacgucggcaaguccaccaccaacaucaugaucaccaccaucaucaucgugaucaucgugauccuccugcugcucaucgccgucgggcuguuccuguacugcaaggcccggagcacgcccgugaccuuguccaaggaccagcucagcggcaucaacaacaucgccuucuccaacuga

SEQ ID NO: 16163 - RNA, 1884 nt, Artificial Sequence
  mRNA product Design a-1 comprising derived and/or modified sequence from HRSV(Memphis-37)__AIY60640.1__F_DSCav1_mut4 (opt1)
gggagagucccgcagucggcguccagcggcucugcuuguucgugugugugucguugcaggccuuauucaagcuuaccauggagcugcccauccucaagaccaacgccaucaccacgauccuggccgcggugacccugugcuucgccagcucccagaacaucaccgaggaguucuaccagagcacgugcuccgccgucagcaagggcuaccucuccgcccugcgcaccgggugguacaccagcgugaucaccaucgagcuguccaacaucaaggagaacaagugcaacggcaccgacgccaaggugaagcucaucaagcaggagcuggacaaguacaagaacgcggucacggagcugcagcuccugaugcagagcaccccggccgccggcuccgggagcgcgaucugcuccggcaucgccgucugcaaggugcugcaccucgagggcgaggugaacaagaucaagaacgcccugcuguccaccaacaaggccgucgugagccucuccaacggggugagcguccugaccuucaaggugcuggaccucaagaacuacaucgacaagcagcugcugcccauccugaacaagcagagcugcuccaucagcaacaucgagaccgucaucgaguuccagcagaagaacaaccgccuccuggagaucacgcgggaguucagcgugaacgcgggcgugaccacccccgucuccaccuacaugcugacgaacagcgagcuccugucccugaucaacgacaugccgaucaccaacgaccagaagaagcucaugagcaacaacgugcagaucgugcgccagcaguccuacagcaucaugugcaucaucaaggaggagguccuggccuacguggugcagcugccccucuacggggucaucgacacccccugcuggaagcugcacaccagcccccugugcacgaccaacaccaaggagggcuccaacaucugccucacccggacggaccgcgggugguacugcgacaacgccggcagcguguccuucuucccgcaggccgagaccugcaagguccagagcaaccggguguucugcgacaccaugaacucccggacccugcccagcgaggugaaccucugcaacaucgacaucuucaaccccaaguacgacugcaagaucaugacguccaagaccgacgucagcuccagcgugaucaccucccugggcgccaucgugagcugcuacgggaagaccaagugcacggcgagcaacaagaaccgcggcaucaucaagaccuucuccaacgggugcgacuacgucagcaacaagggcguggacaccguguccgucggcaacacccuguacugcgugaacaagcaggagggcaagagccucuacgugaagggggagcccaucaucaacuucuacgacccgcuggucuuccccuccgacgaguucgacgccagcaucucccaggugaacgagaagaucaaccagagccuggccuucauccggaaguccgacgagcuccugcacaacgugaacgucggcaagagcaccacgaacaucaugaucaccaccaucaucaucgugaucaucgugauccugcugcuccugaucgccgucgggcuguuccucuacugcaaggcccgcuccacccccgugacgcugagcaaggaccagcuguccgggaucaacaacaucgcguucagcaacugaggacuagucccuguucccagagcccacuuuuuuuucuuuuuuugaaauaaaauagccugucuuucagaucuaaaaaaaaaaaaaaaaaaaaaaaaaaaaaaaaaaaaaaaaaaaaaaaaaaaaaaaaaaaaaaaaugcaucccccccccccccccccccccccccccccccaaaggcucuuuucagagccaccagaauu

SEQ ID NO: 16164 - RNA, 1884 nt, Artificial Sequence
  mRNA product Design a-1 comprising derived and/or modified sequence from HRSV(Memphis-37)__AIY60640.1__F_DSCav1_mut4 (opt1)
gggagagucccgcagucggcguccagcggcucugcuuguucgugugugugucguugcaggccuuauucaagcuuaccauggagcugcccauccucaagaccaacgccaucaccacgauccuggccgcggugacccugugcuucgccagcucccagaacaucaccgaggaguucuaccagagcacgugcuccgccgucagcaagggcuaccucuccgcccugcgcaccgggugguacaccagcgugaucaccaucgagcuguccaacaucaaggagaacaagugcaacggcaccgacgccaaggugaagcucaucaagcaggagcuggacaaguacaagaacgcggucacggagcugcagcuccugaugcagagcaccccggccgccggguccggcagcgccaucugcuccgggaucgcggugugcaaggugcugcaccucgagggcgaggucaacaagaucaagaacgcccugcugagcaccaacaaggccguggugucccucagcaacggcgucuccgugcugaccuucaaggugcuggaccucaagaacuacaucgacaagcagcugcugcccauccucaacaagcagagcugcuccaucagcaacaucgagacggucaucgaguuccagcagaagaacaaccggcugcuggagaucacccgcgaguucuccgugaacgccggggugaccacccccgucagcacguacaugcucaccaacagcgagcugcugucccucaucaacgacaugcccaucaccaacgaccagaagaagcugaugagcaacaacgugcagaucgugcggcagcaguccuacagcaucaugugcaucaucaaggaggagguccuggccuacguggugcagcucccgcuguacggcgucaucgacacccccugcuggaagcugcacacgagcccccucugcaccaccaacaccaaggagggguccaacaucugccugacgcgcaccgaccggggcugguacugcgacaacgcgggguccgugagcuucuucccccaggccgagaccugcaaggugcaguccaaccgcgucuucugcgacaccaugaacagccggacgcucccguccgaggugaaccugugcaacaucgacaucuucaaccccaaguacgacugcaagaucaugaccagcaagaccgacgucuccagcuccgugaucaccagccugggcgccaucguguccugcuacggcaagacgaagugcaccgccagcaacaagaaccgggggaucaucaagaccuucuccaacggcugcgacuacgucagcaacaaggggguggacaccgugagcgucggcaacacgcucuacugcgugaacaagcaggagggcaagucccuguacgugaagggggagcccaucaucaacuucuacgacccccuggucuucccgagcgacgaguucgacgccuccaucagccaggugaacgagaagaucaaccagucccucgcguucauccgcaagagcgacgagcugcugcacaacgugaacgucggcaaguccaccaccaacaucaugaucaccaccaucaucaucgugaucaucgugauccuccugcugcucaucgccgucgggcuguuccuguacugcaaggcccggagcacgcccgugacccuguccaaggaccagcucagcggcaucaacaacaucgccuucuccaacugaggacuagucccuguucccagagcccacuuuuuuuucuuuuuuugaaauaaaauagccugucuuucagaucuaaaaaaaaaaaaaaaaaaaaaaaaaaaaaaaaaaaaaaaaaaaaaaaaaaaaaaaaaaaaaaaaugcaucccccccccccccccccccccccccccccccaaaggcucuuuucagagccaccagaauu

SEQ ID NO: 16165 - RNA, 1884 nt, Artificial Sequence
  mRNA product Design a-1 comprising derived and/or modified sequence from HRSV(Memphis-37)__AIY60640.1__F_DSCav1_mut4 (opt2)
gggagagucccgcagucggcguccagcggcucugcuuguucgugugugugucguugcaggccuuauucaagcuuaccauggagcuccccauccucaagaccaacgccaucaccaccauccucgccgccgucacccucugcuucgccuccucccagaacaucaccgaggaguucuaccaguccaccugcuccgccgucuccaagggcuaccucuccgcccuccgcaccggcugguacaccuccgucaucaccaucgagcucuccaacaucaaggagaacaagugcaacggcaccgacgccaaggucaagcucaucaagcaggagcucgacaaguacaagaacgccgucaccgagcuccagcuccucaugcaguccacccccgccgccggcuccggcuccgccaucugcuccggcaucgccgucugcaagguccuccaccucgagggcgaggucaacaagaucaagaacgcccuccucuccaccaacaaggccgucgucucccucuccaacggcgucuccguccucaccuucaagguccucgaccucaagaacuacaucgacaagcagcuccuccccauccucaacaagcaguccugcuccaucuccaacaucgagaccgucaucgaguuccagcagaagaacaaccgccuccucgagaucacccgcgaguucuccgucaacgccggcgucaccacccccgucuccaccuacaugcucaccaacuccgagcuccucucccucaucaacgacaugcccaucaccaacgaccagaagaagcucauguccaacaacguccagaucguccgccagcaguccuacuccaucaugugcaucaucaaggaggagguccucgccuacgucguccagcucccccucuacggcgucaucgacacccccugcuggaagcuccacaccuccccccucugcaccaccaacaccaaggagggcuccaacaucugccucacccgcaccgaccgcggcugguacugcgacaacgccggcuccgucuccuucuucccccaggccgagaccugcaagguccaguccaaccgcgucuucugcgacaccaugaacucccgcacccuccccuccgaggucaaccucugcaacaucgacaucuucaaccccaaguacgacugcaagaucaugaccuccaagaccgacgucuccuccuccgucaucaccucccucggcgccaucgucuccugcuacggcaagaccaagugcaccgccuccaacaagaaccgcggcaucaucaagaccuucuccaacggcugcgacuacgucuccaacaagggcgucgacaccgucuccgucggcaacacccucuacugcgucaacaagcaggagggcaagucccucuacgucaagggcgagcccaucaucaacuucuacgacccccucgucuuccccuccgacgaguucgacgccuccaucucccaggucaacgagaagaucaaccagucccucgccuucauccgcaaguccgacgagcuccuccacaacgucaacgucggcaaguccaccaccaacaucaugaucaccaccaucaucaucgucaucaucgucauccuccuccuccucaucgccgucggccucuuccucuacugcaaggcccgcuccacccccgucacccucuccaaggaccagcucuccggcaucaacaacaucgccuucuccaacugaggacuagucccuguucccagagcccacuuuuuuuucuuuuuuugaaauaaaauagccugucuuucagaucuaaaaaaaaaaaaaaaaaaaaaaaaaaaaaaaaaaaaaaaaaaaaaaaaaaaaaaaaaaaaaaaaugcaucccccccccccccccccccccccccccccccaaaggcucuuuucagagccaccagaauu

SEQ ID NO: 16166 - RNA, 1884 nt, Artificial Sequence
  mRNA product Design a-1 comprising derived and/or modified sequence from HRSV(Memphis-37)__AIY60640.1__F_DSCav1_mut4 (opt3)
gggagagucccgcagucggcguccagcggcucugcuuguucgugugugugucguugcaggccuuauucaagcuuaccauggagcugcccauccucaagaccaacgccauuacaacuauacuugcugcagugacgcugugcuucgccagcucccagaauaucaccgaagaguuuuaccaaucuacauguucagcggucaguaaaggcuauuugagcgcuuuaagaacugggugguacaccuccguuauuacaaucgaacugucuaacauuaaggagaauaaaugcaacggaaccgacgccaaggugaaacuaaucaagcaggaacucgauaaguauaaaaaugcaguaacugagcugcagcuucugaugcagucgaccccugccgcugguucaggcagcgcaauauguagugggaucgccgugugcaaggucuugcaccucgagggagaagugaacaaaauuaagaaugcucugcuguccacaaacaaagccguugugucucucagcaauggcgucuccguguuaacguucaagguacuggaccuuaagaacuacaucgauaaacaauugcugccaauucuaaauaagcagucauguaguaucagcaacauagagacuguuauugaauuucagcagaaaaauaacaggcuccuggagaucacccgggaguucucugugaaugcgggugucacaacuccgguguccaccuauaugcuuacaaacucagaacuguugagccucauuaacgacaugcccaucaccaaugaucaaaagaaacugaugaguaacaaugugcagaucguccgccagcagucuuacuccauuaugugcauaaucaaggaggaaguuuuagcauaugugguacaacugccucucuacggggugauugacacgccauguuggaaacuucauacuagcccccugugcacaaccaacacuaaggagggaucgaauaucuguuugacacgaaccgaucguggcugguacugcgacaacgccggcucugucuccuuuuucccucaggcugaaacguguaaggugcagucaaauagaguguuuugcgauaccaugaacaguagaacacugccaagcgaggugaaucucugcaacauagacauuuucaaucccaaauaugauuguaagaucaugacuuccaaaaccgacgucucuagcucagugaucacaagucugggggccauuguauccugcuacggaaagacuaaauguaccgcaagcaacaagaauagggguaucauuaagacauuuucuaacggcugcgauuauguuucaaauaaagggguggacaccgucagugugggaaacacucuuuacugugucaacaagcaagagggcaaaagccuguaugugaagggugaaccuauaaucaauuucuacgacccauugguuuuuccguccgaugaguucgacgcuucuauuucgcagguuaacgagaaaaucaaucagagccucgccuuuauccggaaguccgaugaacuguuacacaacguaaaugucgggaagucaacgacaaacauuaugauaaccacuaucauuaucgugauuaucguuauacugcuacuccugaucgcggugggacuuuucuuguauugcaaagcccgcaguacccccgucacacugucuaaggaccagcucagcggcauuaauaacaucgcauucuccaauugaggacuagucccuguucccagagcccacuuuuuuuucuuuuuuugaaauaaaauagccugucuuucagaucuaaaaaaaaaaaaaaaaaaaaaaaaaaaaaaaaaaaaaaaaaaaaaaaaaaaaaaaaaaaaaaaaugcaucccccccccccccccccccccccccccccccaaaggcucuuuucagagccaccagaauu

SEQ ID NO: 16167 - RNA, 1884 nt, Artificial Sequence
  mRNA product Design a-1 comprising derived and/or modified sequence from HRSV(Memphis-37)__AIY60640.1__F_DSCav1_mut4 (opt4)
gggagagucccgcagucggcguccagcggcucugcuuguucgugugugugucguugcaggccuuauucaagcuuaccauggagcugcccauccugaagaccaacgccaucaccaccauccuggccgccgugacccugugcuucgccagcagccagaacaucaccgaggaguucuaccagagcaccugcagcgccgugagcaagggcuaccugagcgcccugagaaccggcugguacaccagcgugaucaccaucgagcugagcaacaucaaggagaacaagugcaacggcaccgacgccaaggugaagcugaucaagcaggagcuggacaaguacaagaacgccgugaccgagcugcagcugcugaugcagagcacccccgccgccggcagcggcagcgccaucugcagcggcaucgccgugugcaaggugcugcaccuggagggcgaggugaacaagaucaagaacgcccugcugagcaccaacaaggccguggugagccugagcaacggcgugagcgugcugaccuucaaggugcuggaccugaagaacuacaucgacaagcagcugcugcccauccugaacaagcagagcugcagcaucagcaacaucgagaccgugaucgaguuccagcagaagaacaacagacugcuggagaucaccagagaguucagcgugaacgccggcgugaccacccccgugagcaccuacaugcugaccaacagcgagcugcugagccugaucaacgacaugcccaucaccaacgaccagaagaagcugaugagcaacaacgugcagaucgugagacagcagagcuacagcaucaugugcaucaucaaggaggaggugcuggccuacguggugcagcugccccuguacggcgugaucgacacccccugcuggaagcugcacaccagcccccugugcaccaccaacaccaaggagggcagcaacaucugccugaccagaaccgacagaggcugguacugcgacaacgccggcagcgugagcuucuucccccaggccgagaccugcaaggugcagagcaacagaguguucugcgacaccaugaacagcagaacccugcccagcgaggugaaccugugcaacaucgacaucuucaaccccaaguacgacugcaagaucaugaccagcaagaccgacgugagcagcagcgugaucaccagccugggcgccaucgugagcugcuacggcaagaccaagugcaccgccagcaacaagaacagaggcaucaucaagaccuucagcaacggcugcgacuacgugagcaacaagggcguggacaccgugagcgugggcaacacccuguacugcgugaacaagcaggagggcaagagccuguacgugaagggcgagcccaucaucaacuucuacgacccccugguguuccccagcgacgaguucgacgccagcaucagccaggugaacgagaagaucaaccagagccuggccuucaucagaaagagcgacgagcugcugcacaacgugaacgugggcaagagcaccaccaacaucaugaucaccaccaucaucaucgugaucaucgugauccugcugcugcugaucgccgugggccuguuccuguacugcaaggccagaagcacccccgugacccugagcaaggaccagcugagcggcaucaacaacaucgccuucagcaacugaggacuagucccuguucccagagcccacuuuuuuuucuuuuuuugaaauaaaauagccugucuuucagaucuaaaaaaaaaaaaaaaaaaaaaaaaaaaaaaaaaaaaaaaaaaaaaaaaaaaaaaaaaaaaaaaaugcaucccccccccccccccccccccccccccccccaaaggcucuuuucagagccaccagaauu

SEQ ID NO: 16168 - RNA, 1884 nt, Artificial Sequence
  mRNA product Design a-1 comprising derived and/or modified sequence from HRSV(Memphis-37)__AIY60640.1__F_DSCav1_mut4 (opt5)
gggagagucccgcagucggcguccagcggcucugcuuguucgugugugugucguugcaggccuuauucaagcuuaccauggagcugcccauccucaagaccaacgccauuacaacgauccuggcugccgugacccuuugcuucgcgagcucccagaauauuacagaagaguuuuaccaaucuaccuguagcgcugucuccaaaggcuaucugucugcccucagaacagggugguacaccagcguuaucacaauugaacuguccaacaucaaggagaauaaaugcaacggaaccgacgccaaggugaaacuuaucaagcaggaacuggauaaguauaaaaaugcugugacggagcuccagcugcugaugcagucuaccccugccgcuggcagcggguccgccauuuguagcggaaucgcggucugcaaggugcuccaccuggagggcgaaguuaacaaaauuaagaaugcccuucugucuacaaacaaagcuguggucucccucagcaauggggugucuguucugaccuucaaggugcuugaccugaagaacuacaucgauaaacaacuccugccgauucugaauaagcaguccuguagcaucucuaacauugagacagucaucgaauuucagcagaaaaauaaccggcuccuggagaucacccgcgaguucuccgugaaugccggagugacgacacccgucagcaccuauaugcuuacaaacuccgaacugcucucucugauuaacgacaugccuaucaccaaugaucaaaagaaacuuaugagcaacaauguucagauugugagacagcaguccuacagcaucaugugcauuaucaaggaggaagugcuggcuuaugucgugcaacucccccuguacggcguuaucgacaccccuuguuggaaacugcauacaucuccccucugcacgaccaacacaaaggagggcuccaauauuugucugacccggacagaucgcgggugguacugcgacaacgccggaagcgugagcuuuuucccucaggcggaaaccuguaagguccagucuaauagaguguuuugcgauacgaugaacuccagaacacugccgucugagguuaaucucugcaacaucgacauuuucaaucccaaauaugauuguaagaucaugaccagcaaaaccgacguguccagcucugucauuacaucccugggcgccaucgugagcugcuacgggaagaccaaauguacagcuucuaacaagaaucggggaaucauuaagacguuuuccaacggcugcgauuaugucagcaauaaagggguggacaccguuuccgugggaaacacacuuuacugugucaacaagcaagagggcaaaucucuguaugugaagggcgaaccuaucauuaauuucuacgacccccucguuuuuccuagcgaugaguucgacgccuccaucucucaggugaacgaaaagauuaaucagagccuggcuuuuauccgcaaguccgaugagcugcuccacaacgucaauguggggaaaagcaccacaaacauuaugaucaccacgaucauuaucgugauuaucguuauucugcuucugcucaucgccgucggacuguuccuguauugcaaagccagaucuacccccgugacacuuuccaaggaccagcucagcggcaucaauaacauugcuuucucuaauugaggacuagucccuguucccagagcccacuuuuuuuucuuuuuuugaaauaaaauagccugucuuucagaucuaaaaaaaaaaaaaaaaaaaaaaaaaaaaaaaaaaaaaaaaaaaaaaaaaaaaaaaaaaaaaaaaugcaucccccccccccccccccccccccccccccccaaaggcucuuuucagagccaccagaauu

SEQ ID NO: 16169 - RNA, 1884 nt, Artificial Sequence
  mRNA product Design a-1 comprising derived and/or modified sequence from HRSV(Memphis-37)__AIY60640.1__F_DSCav1_mut4 (opt6)
gggagagucccgcagucggcguccagcggcucugcuuguucgugugugugucguugcaggccuuauucaagcuuaccauggaacucccaauccuaaaaacaaacgcaauaacaacaauauuagcagccguaacacucuguuucgccucaucccaaaacauaacagaagaauuuuaucaaucuacauguuccgccgucaguaaaggauaucuaucagccuuaagaacaggcugguacacaucaguaaucaccauagaauuauccaacauaaaagaaaacaaaugcaauggcacagaugccaaaguaaaacuaaucaaacaagaacuugauaaauauaaaaacgcaguaacagaauuacaauuauuaaugcaaagcacaccagccgcaggaucaggaucagcaauauguucaggaauagcagucuguaaaguacuacacuuagaaggagaaguaaacaaaauuaaaaacgcauuacuaagcaccaauaaagcaguaguaucacuaucaaacggcguauccguauuaacguucaaaguccucgaccugaaaaacuacauagauaaacaacuacuaccaauacuaaauaaacaaucaugcucaauaucaaacauagaaacuguuaucgaauuucaacagaaaaauaaccgacuacuagaaaucaccagagaauuuucaguaaacgcaggcgucacuacaccaguauccacauacaugcuaaccaacucggaauuacuuucccucauaaacgacaugccaauaacaaacgaccaaaagaaacuuaugucaaacaacguucaaauaguccgccaacaaucauacucaauaauguguaucauaaaagaagaaguccuagcauaugucguacaacuaccauuauacggaguaauugacacaccuugcuggaaacuacacacauccccacuauguacaacaaacacuaaagaaggaucaaacaucugccuaaccagaacagacagaggcugguauugcgacaacgcaggaucaguaucauucuucccacaagcagaaacaugcaaaguacaaucaaacagagucuucugcgacaccaugaacagcagaacccucccauccgaaguaaacuuaugcaacaucgauaucuucaacccaaaauacgacuguaaaauaaugacaucaaaaacagacguuucauccucaguaauaacaucauuaggugccauaguuucauguuacggaaaaaccaaauguaccgcaucaaacaaaaacagaggcauuauuaaaacauucucuaacggaugcgacuaugucaguaacaaaggaguagacacaguaucagucggaaacacauuauauugcguaaauaaacaagaaggaaaaagucuauacguaaaaggagaaccaauaauaaacuuuuacgacccucucguauucccaucagacgaauuugaugcauccauaucacaagucaacgaaaagauaaaccaaucccuagcauucauaagaaaaucagacgaacuacuccauaacguaaacguaggaaaaagcacaaccaauauaaugauaaccacaauaaucauaguaauaauagucauauuauuacuuuuaauugcaguaggacucuuucuauacugcaaagcaagaagcacaccaguaacacuaagcaaagaccaacuaucaggcaucaacaauaucgccuuuucaaauuaaggacuagucccuguucccagagcccacuuuuuuuucuuuuuuugaaauaaaauagccugucuuucagaucuaaaaaaaaaaaaaaaaaaaaaaaaaaaaaaaaaaaaaaaaaaaaaaaaaaaaaaaaaaaaaaaaugcaucccccccccccccccccccccccccccccccaaaggcucuuuucagagccaccagaauu

SEQ ID NO: 16170 - RNA, 1884 nt, Artificial Sequence
  mRNA product Design a-1 comprising derived and/or modified sequence from HRSV(Memphis-37)__AIY60640.1__F_DSCav1_mut4 (opt11)
gggagagucccgcagucggcguccagcggcucugcuuguucgugugugugucguugcaggccuuauucaagcuuaccauggagcugcccauccucaagaccaacgccaucaccacgauccuggccgcggugacccugugcuucgcgagcucccagaacaucaccgaggaguucuaccagagcacgugcuccgccgucagcaagggcuaccucuccgcccugcgcaccgggugguacaccagcgugaucaccaucgagcuguccaacaucaaggagaacaagugcaacggcaccgacgccaaggugaaacucaucaagcaggagcuggacaaguacaagaacgccgucaccgagcugcagcuccugaugcagagcaccccggccgccggguccggcagcgcuaucugcuccgggaucgcggugugcaaggugcugcaccucgagggcgaggucaacaagaucaagaaugcccugcugagcaccaacaaggccguggugucccucagcaacggagucagcgugcuuaccuucaaggugcuggaccucaagaacuacaucgacaagcagcugcugccuauccucaacaagcagagcugcuccaucagcaacaucgagacggucaucgaguuccagcagaagaacaaccggcugcuggagaucacccgcgaguucuccgugaacgccggggugaccacccccgucagcacguacaugcucaccaacagcgaacugcugucccucaucaacgacaugcccaucaccaacgaccagaagaagcugaugagcaacaacgugcagaucgugcggcagcaguccuacagcaucaugugcaucaucaaggaggaaguccuggccuacguggugcagcucccucuguacggcgucaucgacacccccugcuggaagcugcacacgagcccccucugcaccaccaacaccaaggagggguccaacaucugccugacgcgcaccgaccggggcugguacugcgacaacgcgggguccgugagcuucuucccccaggccgagaccugcaaggugcagagcaaccgcgucuucugcgacacuaugaacagcagaacgcucccguccgaggugaaccugugcaacauagacauauucaaccccaaguacgacugcaagaucaugaccagcaagaccgacgucuccagcuccgugauuaccagccugggcgcaaucguguccugcuacggcaagacgaagugcaccgccagcaacaagaaccgggggaucaucaagaccuucuccaacggcugcgacuaugucagcaacaaggggguggacaccgugagcgucggaaacacgcucuacugcgugaacaagcaagagggcaaguccuuauacgugaagggggagcccaucaucaacuucuacgacccccuggucuucccgagcgacgaguucgacgccagcauaagccaggugaacgagaagaucaaccagucccucgcguucauccgcaagagcgacgagcugcugcacaacgugaacgucggcaaguccaccaccaacaucaugaucaccaccaucaucaucgugaucaucgugauccuccugcugcucaucgccgucgggcuguuccuguacugcaaggcccggagcacgcccgugaccuuguccaaggaccagcucagcggcaucaacaacaucgccuucuccaacugaggacuagucccuguucccagagcccacuuuuuuuucuuuuuuugaaauaaaauagccugucuuucagaucuaaaaaaaaaaaaaaaaaaaaaaaaaaaaaaaaaaaaaaaaaaaaaaaaaaaaaaaaaaaaaaaaugcaucccccccccccccccccccccccccccccccaaaggcucuuuucagagccaccagaauu

SEQ ID NO: 16171 - RNA, 1903 nt, Artificial Sequence
  mRNA product Design a-2 comprising derived and/or modified sequence from HRSV(Memphis-37)__AIY60640.1__F_DSCav1_mut4 (opt1)
gggagaguccgcucagccagguugcagaagcggcuuagcguguguccuaaucuucucucugcguguagguaggccugugccgcaaacaagcuuaccauggagcugcccauccucaagaccaacgccaucaccacgauccuggccgcggugacccugugcuucgccagcucccagaacaucaccgaggaguucuaccagagcacgugcuccgccgucagcaagggcuaccucuccgcccugcgcaccgggugguacaccagcgugaucaccaucgagcuguccaacaucaaggagaacaagugcaacggcaccgacgccaaggugaagcucaucaagcaggagcuggacaaguacaagaacgcggucacggagcugcagcuccugaugcagagcaccccggccgccggcuccgggagcgcgaucugcuccggcaucgccgucugcaaggugcugcaccucgagggcgaggugaacaagaucaagaacgcccugcuguccaccaacaaggccgucgugagccucuccaacggggugagcguccugaccuucaaggugcuggaccucaagaacuacaucgacaagcagcugcugcccauccugaacaagcagagcugcuccaucagcaacaucgagaccgucaucgaguuccagcagaagaacaaccgccuccuggagaucacgcgggaguucagcgugaacgcgggcgugaccacccccgucuccaccuacaugcugacgaacagcgagcuccugucccugaucaacgacaugccgaucaccaacgaccagaagaagcucaugagcaacaacgugcagaucgugcgccagcaguccuacagcaucaugugcaucaucaaggaggagguccuggccuacguggugcagcugccccucuacggggucaucgacacccccugcuggaagcugcacaccagcccccugugcacgaccaacaccaaggagggcuccaacaucugccucacccggacggaccgcgggugguacugcgacaacgccggcagcguguccuucuucccgcaggccgagaccugcaagguccagagcaaccggguguucugcgacaccaugaacucccggacccugcccagcgaggugaaccucugcaacaucgacaucuucaaccccaaguacgacugcaagaucaugacguccaagaccgacgucagcuccagcgugaucaccucccugggcgccaucgugagcugcuacgggaagaccaagugcacggcgagcaacaagaaccgcggcaucaucaagaccuucuccaacgggugcgacuacgucagcaacaagggcguggacaccguguccgucggcaacacccuguacugcgugaacaagcaggagggcaagagccucuacgugaagggggagcccaucaucaacuucuacgacccgcuggucuuccccuccgacgaguucgacgccagcaucucccaggugaacgagaagaucaaccagagccuggccuucauccggaaguccgacgagcuccugcacaacgugaacgucggcaagagcaccacgaacaucaugaucaccaccaucaucaucgugaucaucgugauccugcugcuccugaucgccgucgggcuguuccucuacugcaaggcccgcuccacccccgugacgcugagcaaggaccagcuguccgggaucaacaacaucgcguucagcaacugaggacuagucccuguucccagagcccacuuuuuuuucuuuuuuugaaauaaaauagccugucuuucagaucuaaaaaaaaaaaaaaaaaaaaaaaaaaaaaaaaaaaaaaaaaaaaaaaaaaaaaaaaaaaaaaaaugcaucccccccccccccccccccccccccccccccaaaggcucuuuucagagccaccagaauu

SEQ ID NO: 16172 - RNA, 1903 nt, Artificial Sequence
  mRNA product Design a-2 comprising derived and/or modified sequence from HRSV(Memphis-37)__AIY60640.1__F_DSCav1_mut4 (opt1)
gggagaguccgcucagccagguugcagaagcggcuuagcguguguccuaaucuucucucugcguguagguaggccugugccgcaaacaagcuuaccauggagcugcccauccucaagaccaacgccaucaccacgauccuggccgcggugacccugugcuucgccagcucccagaacaucaccgaggaguucuaccagagcacgugcuccgccgucagcaagggcuaccucuccgcccugcgcaccgggugguacaccagcgugaucaccaucgagcuguccaacaucaaggagaacaagugcaacggcaccgacgccaaggugaagcucaucaagcaggagcuggacaaguacaagaacgcggucacggagcugcagcuccugaugcagagcaccccggccgccggguccggcagcgccaucugcuccgggaucgcggugugcaaggugcugcaccucgagggcgaggucaacaagaucaagaacgcccugcugagcaccaacaaggccguggugucccucagcaacggcgucuccgugcugaccuucaaggugcuggaccucaagaacuacaucgacaagcagcugcugcccauccucaacaagcagagcugcuccaucagcaacaucgagacggucaucgaguuccagcagaagaacaaccggcugcuggagaucacccgcgaguucuccgugaacgccggggugaccacccccgucagcacguacaugcucaccaacagcgagcugcugucccucaucaacgacaugcccaucaccaacgaccagaagaagcugaugagcaacaacgugcagaucgugcggcagcaguccuacagcaucaugugcaucaucaaggaggagguccuggccuacguggugcagcucccgcuguacggcgucaucgacacccccugcuggaagcugcacacgagcccccucugcaccaccaacaccaaggagggguccaacaucugccugacgcgcaccgaccggggcugguacugcgacaacgcgggguccgugagcuucuucccccaggccgagaccugcaaggugcaguccaaccgcgucuucugcgacaccaugaacagccggacgcucccguccgaggugaaccugugcaacaucgacaucuucaaccccaaguacgacugcaagaucaugaccagcaagaccgacgucuccagcuccgugaucaccagccugggcgccaucguguccugcuacggcaagacgaagugcaccgccagcaacaagaaccgggggaucaucaagaccuucuccaacggcugcgacuacgucagcaacaaggggguggacaccgugagcgucggcaacacgcucuacugcgugaacaagcaggagggcaagucccuguacgugaagggggagcccaucaucaacuucuacgacccccuggucuucccgagcgacgaguucgacgccuccaucagccaggugaacgagaagaucaaccagucccucgcguucauccgcaagagcgacgagcugcugcacaacgugaacgucggcaaguccaccaccaacaucaugaucaccaccaucaucaucgugaucaucgugauccuccugcugcucaucgccgucgggcuguuccuguacugcaaggcccggagcacgcccgugacccuguccaaggaccagcucagcggcaucaacaacaucgccuucuccaacugaggacuagucccuguucccagagcccacuuuuuuuucuuuuuuugaaauaaaauagccugucuuucagaucuaaaaaaaaaaaaaaaaaaaaaaaaaaaaaaaaaaaaaaaaaaaaaaaaaaaaaaaaaaaaaaaaugcaucccccccccccccccccccccccccccccccaaaggcucuuuucagagccaccagaauu

SEQ ID NO: 16173 - RNA, 1903 nt, Artificial Sequence
  mRNA product Design a-2 comprising derived and/or modified sequence from HRSV(Memphis-37)__AIY60640.1__F_DSCav1_mut4 (opt2)
gggagaguccgcucagccagguugcagaagcggcuuagcguguguccuaaucuucucucugcguguagguaggccugugccgcaaacaagcuuaccauggagcuccccauccucaagaccaacgccaucaccaccauccucgccgccgucacccucugcuucgccuccucccagaacaucaccgaggaguucuaccaguccaccugcuccgccgucuccaagggcuaccucuccgcccuccgcaccggcugguacaccuccgucaucaccaucgagcucuccaacaucaaggagaacaagugcaacggcaccgacgccaaggucaagcucaucaagcaggagcucgacaaguacaagaacgccgucaccgagcuccagcuccucaugcaguccacccccgccgccggcuccggcuccgccaucugcuccggcaucgccgucugcaagguccuccaccucgagggcgaggucaacaagaucaagaacgcccuccucuccaccaacaaggccgucgucucccucuccaacggcgucuccguccucaccuucaagguccucgaccucaagaacuacaucgacaagcagcuccuccccauccucaacaagcaguccugcuccaucuccaacaucgagaccgucaucgaguuccagcagaagaacaaccgccuccucgagaucacccgcgaguucuccgucaacgccggcgucaccacccccgucuccaccuacaugcucaccaacuccgagcuccucucccucaucaacgacaugcccaucaccaacgaccagaagaagcucauguccaacaacguccagaucguccgccagcaguccuacuccaucaugugcaucaucaaggaggagguccucgccuacgucguccagcucccccucuacggcgucaucgacacccccugcuggaagcuccacaccuccccccucugcaccaccaacaccaaggagggcuccaacaucugccucacccgcaccgaccgcggcugguacugcgacaacgccggcuccgucuccuucuucccccaggccgagaccugcaagguccaguccaaccgcgucuucugcgacaccaugaacucccgcacccuccccuccgaggucaaccucugcaacaucgacaucuucaaccccaaguacgacugcaagaucaugaccuccaagaccgacgucuccuccuccgucaucaccucccucggcgccaucgucuccugcuacggcaagaccaagugcaccgccuccaacaagaaccgcggcaucaucaagaccuucuccaacggcugcgacuacgucuccaacaagggcgucgacaccgucuccgucggcaacacccucuacugcgucaacaagcaggagggcaagucccucuacgucaagggcgagcccaucaucaacuucuacgacccccucgucuuccccuccgacgaguucgacgccuccaucucccaggucaacgagaagaucaaccagucccucgccuucauccgcaaguccgacgagcuccuccacaacgucaacgucggcaaguccaccaccaacaucaugaucaccaccaucaucaucgucaucaucgucauccuccuccuccucaucgccgucggccucuuccucuacugcaaggcccgcuccacccccgucacccucuccaaggaccagcucuccggcaucaacaacaucgccuucuccaacugaggacuagucccuguucccagagcccacuuuuuuuucuuuuuuugaaauaaaauagccugucuuucagaucuaaaaaaaaaaaaaaaaaaaaaaaaaaaaaaaaaaaaaaaaaaaaaaaaaaaaaaaaaaaaaaaaugcaucccccccccccccccccccccccccccccccaaaggcucuuuucagagccaccagaauu

SEQ ID NO: 16174 - RNA, 1903 nt, Artificial Sequence
  mRNA product Design a-2 comprising derived and/or modified sequence from HRSV(Memphis-37)__AIY60640.1__F_DSCav1_mut4 (opt3)
gggagaguccgcucagccagguugcagaagcggcuuagcguguguccuaaucuucucucugcguguagguaggccugugccgcaaacaagcuuaccauggagcugcccauccucaagaccaacgccauuacaacuauacuugcugcagugacgcugugcuucgccagcucccagaauaucaccgaagaguuuuaccaaucuacauguucagcggucaguaaaggcuauuugagcgcuuuaagaacugggugguacaccuccguuauuacaaucgaacugucuaacauuaaggagaauaaaugcaacggaaccgacgccaaggugaaacuaaucaagcaggaacucgauaaguauaaaaaugcaguaacugagcugcagcuucugaugcagucgaccccugccgcugguucaggcagcgcaauauguagugggaucgccgugugcaaggucuugcaccucgagggagaagugaacaaaauuaagaaugcucugcuguccacaaacaaagccguugugucucucagcaauggcgucuccguguuaacguucaagguacuggaccuuaagaacuacaucgauaaacaauugcugccaauucuaaauaagcagucauguaguaucagcaacauagagacuguuauugaauuucagcagaaaaauaacaggcuccuggagaucacccgggaguucucugugaaugcgggugucacaacuccgguguccaccuauaugcuuacaaacucagaacuguugagccucauuaacgacaugcccaucaccaaugaucaaaagaaacugaugaguaacaaugugcagaucguccgccagcagucuuacuccauuaugugcauaaucaaggaggaaguuuuagcauaugugguacaacugccucucuacggggugauugacacgccauguuggaaacuucauacuagcccccugugcacaaccaacacuaaggagggaucgaauaucuguuugacacgaaccgaucguggcugguacugcgacaacgccggcucugucuccuuuuucccucaggcugaaacguguaaggugcagucaaauagaguguuuugcgauaccaugaacaguagaacacugccaagcgaggugaaucucugcaacauagacauuuucaaucccaaauaugauuguaagaucaugacuuccaaaaccgacgucucuagcucagugaucacaagucugggggccauuguauccugcuacggaaagacuaaauguaccgcaagcaacaagaauagggguaucauuaagacauuuucuaacggcugcgauuauguuucaaauaaagggguggacaccgucagugugggaaacacucuuuacugugucaacaagcaagagggcaaaagccuguaugugaagggugaaccuauaaucaauuucuacgacccauugguuuuuccguccgaugaguucgacgcuucuauuucgcagguuaacgagaaaaucaaucagagccucgccuuuauccggaaguccgaugaacuguuacacaacguaaaugucgggaagucaacgacaaacauuaugauaaccacuaucauuaucgugauuaucguuauacugcuacuccugaucgcggugggacuuuucuuguauugcaaagcccgcaguacccccgucacacugucuaaggaccagcucagcggcauuaauaacaucgcauucuccaauugaggacuagucccuguucccagagcccacuuuuuuuucuuuuuuugaaauaaaauagccugucuuucagaucuaaaaaaaaaaaaaaaaaaaaaaaaaaaaaaaaaaaaaaaaaaaaaaaaaaaaaaaaaaaaaaaaugcaucccccccccccccccccccccccccccccccaaaggcucuuuucagagccaccagaauu

SEQ ID NO: 16175 - RNA, 1903 nt, Artificial Sequence
  mRNA product Design a-2 comprising derived and/or modified sequence from HRSV(Memphis-37)__AIY60640.1__F_DSCav1_mut4 (opt4)
gggagaguccgcucagccagguugcagaagcggcuuagcguguguccuaaucuucucucugcguguagguaggccugugccgcaaacaagcuuaccauggagcugcccauccugaagaccaacgccaucaccaccauccuggccgccgugacccugugcuucgccagcagccagaacaucaccgaggaguucuaccagagcaccugcagcgccgugagcaagggcuaccugagcgcccugagaaccggcugguacaccagcgugaucaccaucgagcugagcaacaucaaggagaacaagugcaacggcaccgacgccaaggugaagcugaucaagcaggagcuggacaaguacaagaacgccgugaccgagcugcagcugcugaugcagagcacccccgccgccggcagcggcagcgccaucugcagcggcaucgccgugugcaaggugcugcaccuggagggcgaggugaacaagaucaagaacgcccugcugagcaccaacaaggccguggugagccugagcaacggcgugagcgugcugaccuucaaggugcuggaccugaagaacuacaucgacaagcagcugcugcccauccugaacaagcagagcugcagcaucagcaacaucgagaccgugaucgaguuccagcagaagaacaacagacugcuggagaucaccagagaguucagcgugaacgccggcgugaccacccccgugagcaccuacaugcugaccaacagcgagcugcugagccugaucaacgacaugcccaucaccaacgaccagaagaagcugaugagcaacaacgugcagaucgugagacagcagagcuacagcaucaugugcaucaucaaggaggaggugcuggccuacguggugcagcugccccuguacggcgugaucgacacccccugcuggaagcugcacaccagcccccugugcaccaccaacaccaaggagggcagcaacaucugccugaccagaaccgacagaggcugguacugcgacaacgccggcagcgugagcuucuucccccaggccgagaccugcaaggugcagagcaacagaguguucugcgacaccaugaacagcagaacccugcccagcgaggugaaccugugcaacaucgacaucuucaaccccaaguacgacugcaagaucaugaccagcaagaccgacgugagcagcagcgugaucaccagccugggcgccaucgugagcugcuacggcaagaccaagugcaccgccagcaacaagaacagaggcaucaucaagaccuucagcaacggcugcgacuacgugagcaacaagggcguggacaccgugagcgugggcaacacccuguacugcgugaacaagcaggagggcaagagccuguacgugaagggcgagcccaucaucaacuucuacgacccccugguguuccccagcgacgaguucgacgccagcaucagccaggugaacgagaagaucaaccagagccuggccuucaucagaaagagcgacgagcugcugcacaacgugaacgugggcaagagcaccaccaacaucaugaucaccaccaucaucaucgugaucaucgugauccugcugcugcugaucgccgugggccuguuccuguacugcaaggccagaagcacccccgugacccugagcaaggaccagcugagcggcaucaacaacaucgccuucagcaacugaggacuagucccuguucccagagcccacuuuuuuuucuuuuuuugaaauaaaauagccugucuuucagaucuaaaaaaaaaaaaaaaaaaaaaaaaaaaaaaaaaaaaaaaaaaaaaaaaaaaaaaaaaaaaaaaaugcaucccccccccccccccccccccccccccccccaaaggcucuuuucagagccaccagaauu

SEQ ID NO: 16176 - RNA, 1903 nt, Artificial Sequence
  mRNA product Design a-2 comprising derived and/or modified sequence from HRSV(Memphis-37)__AIY60640.1__F_DSCav1_mut4 (opt5)
gggagaguccgcucagccagguugcagaagcggcuuagcguguguccuaaucuucucucugcguguagguaggccugugccgcaaacaagcuuaccauggagcugcccauccucaagaccaacgccauuacaacgauccuggcugccgugacccuuugcuucgcgagcucccagaauauuacagaagaguuuuaccaaucuaccuguagcgcugucuccaaaggcuaucugucugcccucagaacagggugguacaccagcguuaucacaauugaacuguccaacaucaaggagaauaaaugcaacggaaccgacgccaaggugaaacuuaucaagcaggaacuggauaaguauaaaaaugcugugacggagcuccagcugcugaugcagucuaccccugccgcuggcagcggguccgccauuuguagcggaaucgcggucugcaaggugcuccaccuggagggcgaaguuaacaaaauuaagaaugcccuucugucuacaaacaaagcuguggucucccucagcaauggggugucuguucugaccuucaaggugcuugaccugaagaacuacaucgauaaacaacuccugccgauucugaauaagcaguccuguagcaucucuaacauugagacagucaucgaauuucagcagaaaaauaaccggcuccuggagaucacccgcgaguucuccgugaaugccggagugacgacacccgucagcaccuauaugcuuacaaacuccgaacugcucucucugauuaacgacaugccuaucaccaaugaucaaaagaaacuuaugagcaacaauguucagauugugagacagcaguccuacagcaucaugugcauuaucaaggaggaagugcuggcuuaugucgugcaacucccccuguacggcguuaucgacaccccuuguuggaaacugcauacaucuccccucugcacgaccaacacaaaggagggcuccaauauuugucugacccggacagaucgcgggugguacugcgacaacgccggaagcgugagcuuuuucccucaggcggaaaccuguaagguccagucuaauagaguguuuugcgauacgaugaacuccagaacacugccgucugagguuaaucucugcaacaucgacauuuucaaucccaaauaugauuguaagaucaugaccagcaaaaccgacguguccagcucugucauuacaucccugggcgccaucgugagcugcuacgggaagaccaaauguacagcuucuaacaagaaucggggaaucauuaagacguuuuccaacggcugcgauuaugucagcaauaaagggguggacaccguuuccgugggaaacacacuuuacugugucaacaagcaagagggcaaaucucuguaugugaagggcgaaccuaucauuaauuucuacgacccccucguuuuuccuagcgaugaguucgacgccuccaucucucaggugaacgaaaagauuaaucagagccuggcuuuuauccgcaaguccgaugagcugcuccacaacgucaauguggggaaaagcaccacaaacauuaugaucaccacgaucauuaucgugauuaucguuauucugcuucugcucaucgccgucggacuguuccuguauugcaaagccagaucuacccccgugacacuuuccaaggaccagcucagcggcaucaauaacauugcuuucucuaauugaggacuagucccuguucccagagcccacuuuuuuuucuuuuuuugaaauaaaauagccugucuuucagaucuaaaaaaaaaaaaaaaaaaaaaaaaaaaaaaaaaaaaaaaaaaaaaaaaaaaaaaaaaaaaaaaaugcaucccccccccccccccccccccccccccccccaaaggcucuuuucagagccaccagaauu

SEQ ID NO: 16177 - RNA, 1903 nt, Artificial Sequence
  mRNA product Design a-2 comprising derived and/or modified sequence from HRSV(Memphis-37)__AIY60640.1__F_DSCav1_mut4 (opt6)
gggagaguccgcucagccagguugcagaagcggcuuagcguguguccuaaucuucucucugcguguagguaggccugugccgcaaacaagcuuaccauggaacucccaauccuaaaaacaaacgcaauaacaacaauauuagcagccguaacacucuguuucgccucaucccaaaacauaacagaagaauuuuaucaaucuacauguuccgccgucaguaaaggauaucuaucagccuuaagaacaggcugguacacaucaguaaucaccauagaauuauccaacauaaaagaaaacaaaugcaauggcacagaugccaaaguaaaacuaaucaaacaagaacuugauaaauauaaaaacgcaguaacagaauuacaauuauuaaugcaaagcacaccagccgcaggaucaggaucagcaauauguucaggaauagcagucuguaaaguacuacacuuagaaggagaaguaaacaaaauuaaaaacgcauuacuaagcaccaauaaagcaguaguaucacuaucaaacggcguauccguauuaacguucaaaguccucgaccugaaaaacuacauagauaaacaacuacuaccaauacuaaauaaacaaucaugcucaauaucaaacauagaaacuguuaucgaauuucaacagaaaaauaaccgacuacuagaaaucaccagagaauuuucaguaaacgcaggcgucacuacaccaguauccacauacaugcuaaccaacucggaauuacuuucccucauaaacgacaugccaauaacaaacgaccaaaagaaacuuaugucaaacaacguucaaauaguccgccaacaaucauacucaauaauguguaucauaaaagaagaaguccuagcauaugucguacaacuaccauuauacggaguaauugacacaccuugcuggaaacuacacacauccccacuauguacaacaaacacuaaagaaggaucaaacaucugccuaaccagaacagacagaggcugguauugcgacaacgcaggaucaguaucauucuucccacaagcagaaacaugcaaaguacaaucaaacagagucuucugcgacaccaugaacagcagaacccucccauccgaaguaaacuuaugcaacaucgauaucuucaacccaaaauacgacuguaaaauaaugacaucaaaaacagacguuucauccucaguaauaacaucauuaggugccauaguuucauguuacggaaaaaccaaauguaccgcaucaaacaaaaacagaggcauuauuaaaacauucucuaacggaugcgacuaugucaguaacaaaggaguagacacaguaucagucggaaacacauuauauugcguaaauaaacaagaaggaaaaagucuauacguaaaaggagaaccaauaauaaacuuuuacgacccucucguauucccaucagacgaauuugaugcauccauaucacaagucaacgaaaagauaaaccaaucccuagcauucauaagaaaaucagacgaacuacuccauaacguaaacguaggaaaaagcacaaccaauauaaugauaaccacaauaaucauaguaauaauagucauauuauuacuuuuaauugcaguaggacucuuucuauacugcaaagcaagaagcacaccaguaacacuaagcaaagaccaacuaucaggcaucaacaauaucgccuuuucaaauuaaggacuagucccuguucccagagcccacuuuuuuuucuuuuuuugaaauaaaauagccugucuuucagaucuaaaaaaaaaaaaaaaaaaaaaaaaaaaaaaaaaaaaaaaaaaaaaaaaaaaaaaaaaaaaaaaaugcaucccccccccccccccccccccccccccccccaaaggcucuuuucagagccaccagaauu

SEQ ID NO: 16178 - RNA, 1903 nt, Artificial Sequence
  mRNA product Design a-2 comprising derived and/or modified sequence from HRSV(Memphis-37)__AIY60640.1__F_DSCav1_mut4 (opt11)
gggagaguccgcucagccagguugcagaagcggcuuagcguguguccuaaucuucucucugcguguagguaggccugugccgcaaacaagcuuaccauggagcugcccauccucaagaccaacgccaucaccacgauccuggccgcggugacccugugcuucgcgagcucccagaacaucaccgaggaguucuaccagagcacgugcuccgccgucagcaagggcuaccucuccgcccugcgcaccgggugguacaccagcgugaucaccaucgagcuguccaacaucaaggagaacaagugcaacggcaccgacgccaaggugaaacucaucaagcaggagcuggacaaguacaagaacgccgucaccgagcugcagcuccugaugcagagcaccccggccgccggguccggcagcgcuaucugcuccgggaucgcggugugcaaggugcugcaccucgagggcgaggucaacaagaucaagaaugcccugcugagcaccaacaaggccguggugucccucagcaacggagucagcgugcuuaccuucaaggugcuggaccucaagaacuacaucgacaagcagcugcugccuauccucaacaagcagagcugcuccaucagcaacaucgagacggucaucgaguuccagcagaagaacaaccggcugcuggagaucacccgcgaguucuccgugaacgccggggugaccacccccgucagcacguacaugcucaccaacagcgaacugcugucccucaucaacgacaugcccaucaccaacgaccagaagaagcugaugagcaacaacgugcagaucgugcggcagcaguccuacagcaucaugugcaucaucaaggaggaaguccuggccuacguggugcagcucccucuguacggcgucaucgacacccccugcuggaagcugcacacgagcccccucugcaccaccaacaccaaggagggguccaacaucugccugacgcgcaccgaccggggcugguacugcgacaacgcgggguccgugagcuucuucccccaggccgagaccugcaaggugcagagcaaccgcgucuucugcgacacuaugaacagcagaacgcucccguccgaggugaaccugugcaacauagacauauucaaccccaaguacgacugcaagaucaugaccagcaagaccgacgucuccagcuccgugauuaccagccugggcgcaaucguguccugcuacggcaagacgaagugcaccgccagcaacaagaaccgggggaucaucaagaccuucuccaacggcugcgacuaugucagcaacaaggggguggacaccgugagcgucggaaacacgcucuacugcgugaacaagcaagagggcaaguccuuauacgugaagggggagcccaucaucaacuucuacgacccccuggucuucccgagcgacgaguucgacgccagcauaagccaggugaacgagaagaucaaccagucccucgcguucauccgcaagagcgacgagcugcugcacaacgugaacgucggcaaguccaccaccaacaucaugaucaccaccaucaucaucgugaucaucgugauccuccugcugcucaucgccgucgggcuguuccuguacugcaaggcccggagcacgcccgugaccuuguccaaggaccagcucagcggcaucaacaacaucgccuucuccaacugaggacuagucccuguucccagagcccacuuuuuuuucuuuuuuugaaauaaaauagccugucuuucagaucuaaaaaaaaaaaaaaaaaaaaaaaaaaaaaaaaaaaaaaaaaaaaaaaaaaaaaaaaaaaaaaaaugcaucccccccccccccccccccccccccccccccaaaggcucuuuucagagccaccagaauu

SEQ ID NO: 16179 - RNA, 1981 nt, Artificial Sequence
  mRNA product Design a-3 comprising derived and/or modified sequence from HRSV(Memphis-37)__AIY60640.1__F_DSCav1_mut4 (opt1)
gggagagggcgcuuggcuugcaaggacccugagcugcggcauugaagcacacccaacccaacucgacugaagucagccucacugaaccggaucugagaaucuucucucucugggcuugccagggcucuccgaaccuagcuagcauccucuucaauuccaacuagaaagcuuaccauggagcugcccauccucaagaccaacgccaucaccacgauccuggccgcggugacccugugcuucgccagcucccagaacaucaccgaggaguucuaccagagcacgugcuccgccgucagcaagggcuaccucuccgcccugcgcaccgggugguacaccagcgugaucaccaucgagcuguccaacaucaaggagaacaagugcaacggcaccgacgccaaggugaagcucaucaagcaggagcuggacaaguacaagaacgcggucacggagcugcagcuccugaugcagagcaccccggccgccggcuccgggagcgcgaucugcuccggcaucgccgucugcaaggugcugcaccucgagggcgaggugaacaagaucaagaacgcccugcuguccaccaacaaggccgucgugagccucuccaacggggugagcguccugaccuucaaggugcuggaccucaagaacuacaucgacaagcagcugcugcccauccugaacaagcagagcugcuccaucagcaacaucgagaccgucaucgaguuccagcagaagaacaaccgccuccuggagaucacgcgggaguucagcgugaacgcgggcgugaccacccccgucuccaccuacaugcugacgaacagcgagcuccugucccugaucaacgacaugccgaucaccaacgaccagaagaagcucaugagcaacaacgugcagaucgugcgccagcaguccuacagcaucaugugcaucaucaaggaggagguccuggccuacguggugcagcugccccucuacggggucaucgacacccccugcuggaagcugcacaccagcccccugugcacgaccaacaccaaggagggcuccaacaucugccucacccggacggaccgcgggugguacugcgacaacgccggcagcguguccuucuucccgcaggccgagaccugcaagguccagagcaaccggguguucugcgacaccaugaacucccggacccugcccagcgaggugaaccucugcaacaucgacaucuucaaccccaaguacgacugcaagaucaugacguccaagaccgacgucagcuccagcgugaucaccucccugggcgccaucgugagcugcuacgggaagaccaagugcacggcgagcaacaagaaccgcggcaucaucaagaccuucuccaacgggugcgacuacgucagcaacaagggcguggacaccguguccgucggcaacacccuguacugcgugaacaagcaggagggcaagagccucuacgugaagggggagcccaucaucaacuucuacgacccgcuggucuuccccuccgacgaguucgacgccagcaucucccaggugaacgagaagaucaaccagagccuggccuucauccggaaguccgacgagcuccugcacaacgugaacgucggcaagagcaccacgaacaucaugaucaccaccaucaucaucgugaucaucgugauccugcugcuccugaucgccgucgggcuguuccucuacugcaaggcccgcuccacccccgugacgcugagcaaggaccagcuguccgggaucaacaacaucgcguucagcaacugaggacuagucccuguucccagagcccacuuuuuuuucuuuuuuugaaauaaaauagccugucuuucagaucuaaaaaaaaaaaaaaaaaaaaaaaaaaaaaaaaaaaaaaaaaaaaaaaaaaaaaaaaaaaaaaaaugcaucccccccccccccccccccccccccccccccaaaggcucuuuucagagccaccagaauu

SEQ ID NO: 16180 - RNA, 1981 nt, Artificial Sequence
  mRNA product Design a-3 comprising derived and/or modified sequence from HRSV(Memphis-37)__AIY60640.1__F_DSCav1_mut4 (opt1)
gggagagggcgcuuggcuugcaaggacccugagcugcggcauugaagcacacccaacccaacucgacugaagucagccucacugaaccggaucugagaaucuucucucucugggcuugccagggcucuccgaaccuagcuagcauccucuucaauuccaacuagaaagcuuaccauggagcugcccauccucaagaccaacgccaucaccacgauccuggccgcggugacccugugcuucgccagcucccagaacaucaccgaggaguucuaccagagcacgugcuccgccgucagcaagggcuaccucuccgcccugcgcaccgggugguacaccagcgugaucaccaucgagcuguccaacaucaaggagaacaagugcaacggcaccgacgccaaggugaagcucaucaagcaggagcuggacaaguacaagaacgcggucacggagcugcagcuccugaugcagagcaccccggccgccggguccggcagcgccaucugcuccgggaucgcggugugcaaggugcugcaccucgagggcgaggucaacaagaucaagaacgcccugcugagcaccaacaaggccguggugucccucagcaacggcgucuccgugcugaccuucaaggugcuggaccucaagaacuacaucgacaagcagcugcugcccauccucaacaagcagagcugcuccaucagcaacaucgagacggucaucgaguuccagcagaagaacaaccggcugcuggagaucacccgcgaguucuccgugaacgccggggugaccacccccgucagcacguacaugcucaccaacagcgagcugcugucccucaucaacgacaugcccaucaccaacgaccagaagaagcugaugagcaacaacgugcagaucgugcggcagcaguccuacagcaucaugugcaucaucaaggaggagguccuggccuacguggugcagcucccgcuguacggcgucaucgacacccccugcuggaagcugcacacgagcccccucugcaccaccaacaccaaggagggguccaacaucugccugacgcgcaccgaccggggcugguacugcgacaacgcgggguccgugagcuucuucccccaggccgagaccugcaaggugcaguccaaccgcgucuucugcgacaccaugaacagccggacgcucccguccgaggugaaccugugcaacaucgacaucuucaaccccaaguacgacugcaagaucaugaccagcaagaccgacgucuccagcuccgugaucaccagccugggcgccaucguguccugcuacggcaagacgaagugcaccgccagcaacaagaaccgggggaucaucaagaccuucuccaacggcugcgacuacgucagcaacaaggggguggacaccgugagcgucggcaacacgcucuacugcgugaacaagcaggagggcaagucccuguacgugaagggggagcccaucaucaacuucuacgacccccuggucuucccgagcgacgaguucgacgccuccaucagccaggugaacgagaagaucaaccagucccucgcguucauccgcaagagcgacgagcugcugcacaacgugaacgucggcaaguccaccaccaacaucaugaucaccaccaucaucaucgugaucaucgugauccuccugcugcucaucgccgucgggcuguuccuguacugcaaggcccggagcacgcccgugacccuguccaaggaccagcucagcggcaucaacaacaucgccuucuccaacugaggacuagucccuguucccagagcccacuuuuuuuucuuuuuuugaaauaaaauagccugucuuucagaucuaaaaaaaaaaaaaaaaaaaaaaaaaaaaaaaaaaaaaaaaaaaaaaaaaaaaaaaaaaaaaaaaugcaucccccccccccccccccccccccccccccccaaaggcucuuuucagagccaccagaauu

SEQ ID NO: 16181 - RNA, 1981 nt, Artificial Sequence
  mRNA product Design a-3 comprising derived and/or modified sequence from HRSV(Memphis-37)__AIY60640.1__F_DSCav1_mut4 (opt2)
gggagagggcgcuuggcuugcaaggacccugagcugcggcauugaagcacacccaacccaacucgacugaagucagccucacugaaccggaucugagaaucuucucucucugggcuugccagggcucuccgaaccuagcuagcauccucuucaauuccaacuagaaagcuuaccauggagcuccccauccucaagaccaacgccaucaccaccauccucgccgccgucacccucugcuucgccuccucccagaacaucaccgaggaguucuaccaguccaccugcuccgccgucuccaagggcuaccucuccgcccuccgcaccggcugguacaccuccgucaucaccaucgagcucuccaacaucaaggagaacaagugcaacggcaccgacgccaaggucaagcucaucaagcaggagcucgacaaguacaagaacgccgucaccgagcuccagcuccucaugcaguccacccccgccgccggcuccggcuccgccaucugcuccggcaucgccgucugcaagguccuccaccucgagggcgaggucaacaagaucaagaacgcccuccucuccaccaacaaggccgucgucucccucuccaacggcgucuccguccucaccuucaagguccucgaccucaagaacuacaucgacaagcagcuccuccccauccucaacaagcaguccugcuccaucuccaacaucgagaccgucaucgaguuccagcagaagaacaaccgccuccucgagaucacccgcgaguucuccgucaacgccggcgucaccacccccgucuccaccuacaugcucaccaacuccgagcuccucucccucaucaacgacaugcccaucaccaacgaccagaagaagcucauguccaacaacguccagaucguccgccagcaguccuacuccaucaugugcaucaucaaggaggagguccucgccuacgucguccagcucccccucuacggcgucaucgacacccccugcuggaagcuccacaccuccccccucugcaccaccaacaccaaggagggcuccaacaucugccucacccgcaccgaccgcggcugguacugcgacaacgccggcuccgucuccuucuucccccaggccgagaccugcaagguccaguccaaccgcgucuucugcgacaccaugaacucccgcacccuccccuccgaggucaaccucugcaacaucgacaucuucaaccccaaguacgacugcaagaucaugaccuccaagaccgacgucuccuccuccgucaucaccucccucggcgccaucgucuccugcuacggcaagaccaagugcaccgccuccaacaagaaccgcggcaucaucaagaccuucuccaacggcugcgacuacgucuccaacaagggcgucgacaccgucuccgucggcaacacccucuacugcgucaacaagcaggagggcaagucccucuacgucaagggcgagcccaucaucaacuucuacgacccccucgucuuccccuccgacgaguucgacgccuccaucucccaggucaacgagaagaucaaccagucccucgccuucauccgcaaguccgacgagcuccuccacaacgucaacgucggcaaguccaccaccaacaucaugaucaccaccaucaucaucgucaucaucgucauccuccuccuccucaucgccgucggccucuuccucuacugcaaggcccgcuccacccccgucacccucuccaaggaccagcucuccggcaucaacaacaucgccuucuccaacugaggacuagucccuguucccagagcccacuuuuuuuucuuuuuuugaaauaaaauagccugucuuucagaucuaaaaaaaaaaaaaaaaaaaaaaaaaaaaaaaaaaaaaaaaaaaaaaaaaaaaaaaaaaaaaaaaugcaucccccccccccccccccccccccccccccccaaaggcucuuuucagagccaccagaauu

SEQ ID NO: 16182 - RNA, 1981 nt, Artificial Sequence
  mRNA product Design a-3 comprising derived and/or modified sequence from HRSV(Memphis-37)__AIY60640.1__F_DSCav1_mut4 (opt3)
gggagagggcgcuuggcuugcaaggacccugagcugcggcauugaagcacacccaacccaacucgacugaagucagccucacugaaccggaucugagaaucuucucucucugggcuugccagggcucuccgaaccuagcuagcauccucuucaauuccaacuagaaagcuuaccauggagcugcccauccucaagaccaacgccauuacaacuauacuugcugcagugacgcugugcuucgccagcucccagaauaucaccgaagaguuuuaccaaucuacauguucagcggucaguaaaggcuauuugagcgcuuuaagaacugggugguacaccuccguuauuacaaucgaacugucuaacauuaaggagaauaaaugcaacggaaccgacgccaaggugaaacuaaucaagcaggaacucgauaaguauaaaaaugcaguaacugagcugcagcuucugaugcagucgaccccugccgcugguucaggcagcgcaauauguagugggaucgccgugugcaaggucuugcaccucgagggagaagugaacaaaauuaagaaugcucugcuguccacaaacaaagccguugugucucucagcaauggcgucuccguguuaacguucaagguacuggaccuuaagaacuacaucgauaaacaauugcugccaauucuaaauaagcagucauguaguaucagcaacauagagacuguuauugaauuucagcagaaaaauaacaggcuccuggagaucacccgggaguucucugugaaugcgggugucacaacuccgguguccaccuauaugcuuacaaacucagaacuguugagccucauuaacgacaugcccaucaccaaugaucaaaagaaacugaugaguaacaaugugcagaucguccgccagcagucuuacuccauuaugugcauaaucaaggaggaaguuuuagcauaugugguacaacugccucucuacggggugauugacacgccauguuggaaacuucauacuagcccccugugcacaaccaacacuaaggagggaucgaauaucuguuugacacgaaccgaucguggcugguacugcgacaacgccggcucugucuccuuuuucccucaggcugaaacguguaaggugcagucaaauagaguguuuugcgauaccaugaacaguagaacacugccaagcgaggugaaucucugcaacauagacauuuucaaucccaaauaugauuguaagaucaugacuuccaaaaccgacgucucuagcucagugaucacaagucugggggccauuguauccugcuacggaaagacuaaauguaccgcaagcaacaagaauagggguaucauuaagacauuuucuaacggcugcgauuauguuucaaauaaagggguggacaccgucagugugggaaacacucuuuacugugucaacaagcaagagggcaaaagccuguaugugaagggugaaccuauaaucaauuucuacgacccauugguuuuuccguccgaugaguucgacgcuucuauuucgcagguuaacgagaaaaucaaucagagccucgccuuuauccggaaguccgaugaacuguuacacaacguaaaugucgggaagucaacgacaaacauuaugauaaccacuaucauuaucgugauuaucguuauacugcuacuccugaucgcggugggacuuuucuuguauugcaaagcccgcaguacccccgucacacugucuaaggaccagcucagcggcauuaauaacaucgcauucuccaauugaggacuagucccuguucccagagcccacuuuuuuuucuuuuuuugaaauaaaauagccugucuuucagaucuaaaaaaaaaaaaaaaaaaaaaaaaaaaaaaaaaaaaaaaaaaaaaaaaaaaaaaaaaaaaaaaaugcaucccccccccccccccccccccccccccccccaaaggcucuuuucagagccaccagaauu

SEQ ID NO: 16183 - RNA, 1981 nt, Artificial Sequence
  mRNA product Design a-3 comprising derived and/or modified sequence from HRSV(Memphis-37)__AIY60640.1__F_DSCav1_mut4 (opt4)
gggagagggcgcuuggcuugcaaggacccugagcugcggcauugaagcacacccaacccaacucgacugaagucagccucacugaaccggaucugagaaucuucucucucugggcuugccagggcucuccgaaccuagcuagcauccucuucaauuccaacuagaaagcuuaccauggagcugcccauccugaagaccaacgccaucaccaccauccuggccgccgugacccugugcuucgccagcagccagaacaucaccgaggaguucuaccagagcaccugcagcgccgugagcaagggcuaccugagcgcccugagaaccggcugguacaccagcgugaucaccaucgagcugagcaacaucaaggagaacaagugcaacggcaccgacgccaaggugaagcugaucaagcaggagcuggacaaguacaagaacgccgugaccgagcugcagcugcugaugcagagcacccccgccgccggcagcggcagcgccaucugcagcggcaucgccgugugcaaggugcugcaccuggagggcgaggugaacaagaucaagaacgcccugcugagcaccaacaaggccguggugagccugagcaacggcgugagcgugcugaccuucaaggugcuggaccugaagaacuacaucgacaagcagcugcugcccauccugaacaagcagagcugcagcaucagcaacaucgagaccgugaucgaguuccagcagaagaacaacagacugcuggagaucaccagagaguucagcgugaacgccggcgugaccacccccgugagcaccuacaugcugaccaacagcgagcugcugagccugaucaacgacaugcccaucaccaacgaccagaagaagcugaugagcaacaacgugcagaucgugagacagcagagcuacagcaucaugugcaucaucaaggaggaggugcuggccuacguggugcagcugccccuguacggcgugaucgacacccccugcuggaagcugcacaccagcccccugugcaccaccaacaccaaggagggcagcaacaucugccugaccagaaccgacagaggcugguacugcgacaacgccggcagcgugagcuucuucccccaggccgagaccugcaaggugcagagcaacagaguguucugcgacaccaugaacagcagaacccugcccagcgaggugaaccugugcaacaucgacaucuucaaccccaaguacgacugcaagaucaugaccagcaagaccgacgugagcagcagcgugaucaccagccugggcgccaucgugagcugcuacggcaagaccaagugcaccgccagcaacaagaacagaggcaucaucaagaccuucagcaacggcugcgacuacgugagcaacaagggcguggacaccgugagcgugggcaacacccuguacugcgugaacaagcaggagggcaagagccuguacgugaagggcgagcccaucaucaacuucuacgacccccugguguuccccagcgacgaguucgacgccagcaucagccaggugaacgagaagaucaaccagagccuggccuucaucagaaagagcgacgagcugcugcacaacgugaacgugggcaagagcaccaccaacaucaugaucaccaccaucaucaucgugaucaucgugauccugcugcugcugaucgccgugggccuguuccuguacugcaaggccagaagcacccccgugacccugagcaaggaccagcugagcggcaucaacaacaucgccuucagcaacugaggacuagucccuguucccagagcccacuuuuuuuucuuuuuuugaaauaaaauagccugucuuucagaucuaaaaaaaaaaaaaaaaaaaaaaaaaaaaaaaaaaaaaaaaaaaaaaaaaaaaaaaaaaaaaaaaugcaucccccccccccccccccccccccccccccccaaaggcucuuuucagagccaccagaauu

SEQ ID NO: 16184 - RNA, 1981 nt, Artificial Sequence
  mRNA product Design a-3 comprising derived and/or modified sequence from HRSV(Memphis-37)__AIY60640.1__F_DSCav1_mut4 (opt5)
gggagagggcgcuuggcuugcaaggacccugagcugcggcauugaagcacacccaacccaacucgacugaagucagccucacugaaccggaucugagaaucuucucucucugggcuugccagggcucuccgaaccuagcuagcauccucuucaauuccaacuagaaagcuuaccauggagcugcccauccucaagaccaacgccauuacaacgauccuggcugccgugacccuuugcuucgcgagcucccagaauauuacagaagaguuuuaccaaucuaccuguagcgcugucuccaaaggcuaucugucugcccucagaacagggugguacaccagcguuaucacaauugaacuguccaacaucaaggagaauaaaugcaacggaaccgacgccaaggugaaacuuaucaagcaggaacuggauaaguauaaaaaugcugugacggagcuccagcugcugaugcagucuaccccugccgcuggcagcggguccgccauuuguagcggaaucgcggucugcaaggugcuccaccuggagggcgaaguuaacaaaauuaagaaugcccuucugucuacaaacaaagcuguggucucccucagcaauggggugucuguucugaccuucaaggugcuugaccugaagaacuacaucgauaaacaacuccugccgauucugaauaagcaguccuguagcaucucuaacauugagacagucaucgaauuucagcagaaaaauaaccggcuccuggagaucacccgcgaguucuccgugaaugccggagugacgacacccgucagcaccuauaugcuuacaaacuccgaacugcucucucugauuaacgacaugccuaucaccaaugaucaaaagaaacuuaugagcaacaauguucagauugugagacagcaguccuacagcaucaugugcauuaucaaggaggaagugcuggcuuaugucgugcaacucccccuguacggcguuaucgacaccccuuguuggaaacugcauacaucuccccucugcacgaccaacacaaaggagggcuccaauauuugucugacccggacagaucgcgggugguacugcgacaacgccggaagcgugagcuuuuucccucaggcggaaaccuguaagguccagucuaauagaguguuuugcgauacgaugaacuccagaacacugccgucugagguuaaucucugcaacaucgacauuuucaaucccaaauaugauuguaagaucaugaccagcaaaaccgacguguccagcucugucauuacaucccugggcgccaucgugagcugcuacgggaagaccaaauguacagcuucuaacaagaaucggggaaucauuaagacguuuuccaacggcugcgauuaugucagcaauaaagggguggacaccguuuccgugggaaacacacuuuacugugucaacaagcaagagggcaaaucucuguaugugaagggcgaaccuaucauuaauuucuacgacccccucguuuuuccuagcgaugaguucgacgccuccaucucucaggugaacgaaaagauuaaucagagccuggcuuuuauccgcaaguccgaugagcugcuccacaacgucaauguggggaaaagcaccacaaacauuaugaucaccacgaucauuaucgugauuaucguuauucugcuucugcucaucgccgucggacuguuccuguauugcaaagccagaucuacccccgugacacuuuccaaggaccagcucagcggcaucaauaacauugcuuucucuaauugaggacuagucccuguucccagagcccacuuuuuuuucuuuuuuugaaauaaaauagccugucuuucagaucuaaaaaaaaaaaaaaaaaaaaaaaaaaaaaaaaaaaaaaaaaaaaaaaaaaaaaaaaaaaaaaaaugcaucccccccccccccccccccccccccccccccaaaggcucuuuucagagccaccagaauu

SEQ ID NO: 16185 - RNA, 1981 nt, Artificial Sequence
  mRNA product Design a-3 comprising derived and/or modified sequence from HRSV(Memphis-37)__AIY60640.1__F_DSCav1_mut4 (opt6)
gggagagggcgcuuggcuugcaaggacccugagcugcggcauugaagcacacccaacccaacucgacugaagucagccucacugaaccggaucugagaaucuucucucucugggcuugccagggcucuccgaaccuagcuagcauccucuucaauuccaacuagaaagcuuaccauggaacucccaauccuaaaaacaaacgcaauaacaacaauauuagcagccguaacacucuguuucgccucaucccaaaacauaacagaagaauuuuaucaaucuacauguuccgccgucaguaaaggauaucuaucagccuuaagaacaggcugguacacaucaguaaucaccauagaauuauccaacauaaaagaaaacaaaugcaauggcacagaugccaaaguaaaacuaaucaaacaagaacuugauaaauauaaaaacgcaguaacagaauuacaauuauuaaugcaaagcacaccagccgcaggaucaggaucagcaauauguucaggaauagcagucuguaaaguacuacacuuagaaggagaaguaaacaaaauuaaaaacgcauuacuaagcaccaauaaagcaguaguaucacuaucaaacggcguauccguauuaacguucaaaguccucgaccugaaaaacuacauagauaaacaacuacuaccaauacuaaauaaacaaucaugcucaauaucaaacauagaaacuguuaucgaauuucaacagaaaaauaaccgacuacuagaaaucaccagagaauuuucaguaaacgcaggcgucacuacaccaguauccacauacaugcuaaccaacucggaauuacuuucccucauaaacgacaugccaauaacaaacgaccaaaagaaacuuaugucaaacaacguucaaauaguccgccaacaaucauacucaauaauguguaucauaaaagaagaaguccuagcauaugucguacaacuaccauuauacggaguaauugacacaccuugcuggaaacuacacacauccccacuauguacaacaaacacuaaagaaggaucaaacaucugccuaaccagaacagacagaggcugguauugcgacaacgcaggaucaguaucauucuucccacaagcagaaacaugcaaaguacaaucaaacagagucuucugcgacaccaugaacagcagaacccucccauccgaaguaaacuuaugcaacaucgauaucuucaacccaaaauacgacuguaaaauaaugacaucaaaaacagacguuucauccucaguaauaacaucauuaggugccauaguuucauguuacggaaaaaccaaauguaccgcaucaaacaaaaacagaggcauuauuaaaacauucucuaacggaugcgacuaugucaguaacaaaggaguagacacaguaucagucggaaacacauuauauugcguaaauaaacaagaaggaaaaagucuauacguaaaaggagaaccaauaauaaacuuuuacgacccucucguauucccaucagacgaauuugaugcauccauaucacaagucaacgaaaagauaaaccaaucccuagcauucauaagaaaaucagacgaacuacuccauaacguaaacguaggaaaaagcacaaccaauauaaugauaaccacaauaaucauaguaauaauagucauauuauuacuuuuaauugcaguaggacucuuucuauacugcaaagcaagaagcacaccaguaacacuaagcaaagaccaacuaucaggcaucaacaauaucgccuuuucaaauuaaggacuagucccuguucccagagcccacuuuuuuuucuuuuuuugaaauaaaauagccugucuuucagaucuaaaaaaaaaaaaaaaaaaaaaaaaaaaaaaaaaaaaaaaaaaaaaaaaaaaaaaaaaaaaaaaaugcaucccccccccccccccccccccccccccccccaaaggcucuuuucagagccaccagaauu

SEQ ID NO: 16186 - RNA, 1981 nt, Artificial Sequence
  mRNA product Design a-3 comprising derived and/or modified sequence from HRSV(Memphis-37)__AIY60640.1__F_DSCav1_mut4 (opt11)
gggagagggcgcuuggcuugcaaggacccugagcugcggcauugaagcacacccaacccaacucgacugaagucagccucacugaaccggaucugagaaucuucucucucugggcuugccagggcucuccgaaccuagcuagcauccucuucaauuccaacuagaaagcuuaccauggagcugcccauccucaagaccaacgccaucaccacgauccuggccgcggugacccugugcuucgcgagcucccagaacaucaccgaggaguucuaccagagcacgugcuccgccgucagcaagggcuaccucuccgcccugcgcaccgggugguacaccagcgugaucaccaucgagcuguccaacaucaaggagaacaagugcaacggcaccgacgccaaggugaaacucaucaagcaggagcuggacaaguacaagaacgccgucaccgagcugcagcuccugaugcagagcaccccggccgccggguccggcagcgcuaucugcuccgggaucgcggugugcaaggugcugcaccucgagggcgaggucaacaagaucaagaaugcccugcugagcaccaacaaggccguggugucccucagcaacggagucagcgugcuuaccuucaaggugcuggaccucaagaacuacaucgacaagcagcugcugccuauccucaacaagcagagcugcuccaucagcaacaucgagacggucaucgaguuccagcagaagaacaaccggcugcuggagaucacccgcgaguucuccgugaacgccggggugaccacccccgucagcacguacaugcucaccaacagcgaacugcugucccucaucaacgacaugcccaucaccaacgaccagaagaagcugaugagcaacaacgugcagaucgugcggcagcaguccuacagcaucaugugcaucaucaaggaggaaguccuggccuacguggugcagcucccucuguacggcgucaucgacacccccugcuggaagcugcacacgagcccccucugcaccaccaacaccaaggagggguccaacaucugccugacgcgcaccgaccggggcugguacugcgacaacgcgggguccgugagcuucuucccccaggccgagaccugcaaggugcagagcaaccgcgucuucugcgacacuaugaacagcagaacgcucccguccgaggugaaccugugcaacauagacauauucaaccccaaguacgacugcaagaucaugaccagcaagaccgacgucuccagcuccgugauuaccagccugggcgcaaucguguccugcuacggcaagacgaagugcaccgccagcaacaagaaccgggggaucaucaagaccuucuccaacggcugcgacuaugucagcaacaaggggguggacaccgugagcgucggaaacacgcucuacugcgugaacaagcaagagggcaaguccuuauacgugaagggggagcccaucaucaacuucuacgacccccuggucuucccgagcgacgaguucgacgccagcauaagccaggugaacgagaagaucaaccagucccucgcguucauccgcaagagcgacgagcugcugcacaacgugaacgucggcaaguccaccaccaacaucaugaucaccaccaucaucaucgugaucaucgugauccuccugcugcucaucgccgucgggcuguuccuguacugcaaggcccggagcacgcccgugaccuuguccaaggaccagcucagcggcaucaacaacaucgccuucuccaacugaggacuagucccuguucccagagcccacuuuuuuuucuuuuuuugaaauaaaauagccugucuuucagaucuaaaaaaaaaaaaaaaaaaaaaaaaaaaaaaaaaaaaaaaaaaaaaaaaaaaaaaaaaaaaaaaaugcaucccccccccccccccccccccccccccccccaaaggcucuuuucagagccaccagaauu

SEQ ID NO: 16187 - RNA, 1930 nt, Artificial Sequence
  mRNA product Design a-4 comprising derived and/or modified sequence from HRSV(Memphis-37)__AIY60640.1__F_DSCav1_mut4 (opt1)
gggagacuccugucgggcggaaguaggaggaguagaguuuaaaaacaguacucuuuuuccgguucgggacguaguugaagcaacgacaagccggauaaccgcucuugagacaggaagcuuaccauggagcugcccauccucaagaccaacgccaucaccacgauccuggccgcggugacccugugcuucgccagcucccagaacaucaccgaggaguucuaccagagcacgugcuccgccgucagcaagggcuaccucuccgcccugcgcaccgggugguacaccagcgugaucaccaucgagcuguccaacaucaaggagaacaagugcaacggcaccgacgccaaggugaagcucaucaagcaggagcuggacaaguacaagaacgcggucacggagcugcagcuccugaugcagagcaccccggccgccggcuccgggagcgcgaucugcuccggcaucgccgucugcaaggugcugcaccucgagggcgaggugaacaagaucaagaacgcccugcuguccaccaacaaggccgucgugagccucuccaacggggugagcguccugaccuucaaggugcuggaccucaagaacuacaucgacaagcagcugcugcccauccugaacaagcagagcugcuccaucagcaacaucgagaccgucaucgaguuccagcagaagaacaaccgccuccuggagaucacgcgggaguucagcgugaacgcgggcgugaccacccccgucuccaccuacaugcugacgaacagcgagcuccugucccugaucaacgacaugccgaucaccaacgaccagaagaagcucaugagcaacaacgugcagaucgugcgccagcaguccuacagcaucaugugcaucaucaaggaggagguccuggccuacguggugcagcugccccucuacggggucaucgacacccccugcuggaagcugcacaccagcccccugugcacgaccaacaccaaggagggcuccaacaucugccucacccggacggaccgcgggugguacugcgacaacgccggcagcguguccuucuucccgcaggccgagaccugcaagguccagagcaaccggguguucugcgacaccaugaacucccggacccugcccagcgaggugaaccucugcaacaucgacaucuucaaccccaaguacgacugcaagaucaugacguccaagaccgacgucagcuccagcgugaucaccucccugggcgccaucgugagcugcuacgggaagaccaagugcacggcgagcaacaagaaccgcggcaucaucaagaccuucuccaacgggugcgacuacgucagcaacaagggcguggacaccguguccgucggcaacacccuguacugcgugaacaagcaggagggcaagagccucuacgugaagggggagcccaucaucaacuucuacgacccgcuggucuuccccuccgacgaguucgacgccagcaucucccaggugaacgagaagaucaaccagagccuggccuucauccggaaguccgacgagcuccugcacaacgugaacgucggcaagagcaccacgaacaucaugaucaccaccaucaucaucgugaucaucgugauccugcugcuccugaucgccgucgggcuguuccucuacugcaaggcccgcuccacccccgugacgcugagcaaggaccagcuguccgggaucaacaacaucgcguucagcaacugaggacuagucccuguucccagagcccacuuuuuuuucuuuuuuugaaauaaaauagccugucuuucagaucuaaaaaaaaaaaaaaaaaaaaaaaaaaaaaaaaaaaaaaaaaaaaaaaaaaaaaaaaaaaaaaaaugcaucccccccccccccccccccccccccccccccaaaggcucuuuucagagccaccagaauu

SEQ ID NO: 16188 - RNA, 1930 nt, Artificial Sequence
  mRNA product Design a-4 comprising derived and/or modified sequence from HRSV(Memphis-37)__AIY60640.1__F_DSCav1_mut4 (opt1)
gggagacuccugucgggcggaaguaggaggaguagaguuuaaaaacaguacucuuuuuccgguucgggacguaguugaagcaacgacaagccggauaaccgcucuugagacaggaagcuuaccauggagcugcccauccucaagaccaacgccaucaccacgauccuggccgcggugacccugugcuucgccagcucccagaacaucaccgaggaguucuaccagagcacgugcuccgccgucagcaagggcuaccucuccgcccugcgcaccgggugguacaccagcgugaucaccaucgagcuguccaacaucaaggagaacaagugcaacggcaccgacgccaaggugaagcucaucaagcaggagcuggacaaguacaagaacgcggucacggagcugcagcuccugaugcagagcaccccggccgccggguccggcagcgccaucugcuccgggaucgcggugugcaaggugcugcaccucgagggcgaggucaacaagaucaagaacgcccugcugagcaccaacaaggccguggugucccucagcaacggcgucuccgugcugaccuucaaggugcuggaccucaagaacuacaucgacaagcagcugcugcccauccucaacaagcagagcugcuccaucagcaacaucgagacggucaucgaguuccagcagaagaacaaccggcugcuggagaucacccgcgaguucuccgugaacgccggggugaccacccccgucagcacguacaugcucaccaacagcgagcugcugucccucaucaacgacaugcccaucaccaacgaccagaagaagcugaugagcaacaacgugcagaucgugcggcagcaguccuacagcaucaugugcaucaucaaggaggagguccuggccuacguggugcagcucccgcuguacggcgucaucgacacccccugcuggaagcugcacacgagcccccucugcaccaccaacaccaaggagggguccaacaucugccugacgcgcaccgaccggggcugguacugcgacaacgcgggguccgugagcuucuucccccaggccgagaccugcaaggugcaguccaaccgcgucuucugcgacaccaugaacagccggacgcucccguccgaggugaaccugugcaacaucgacaucuucaaccccaaguacgacugcaagaucaugaccagcaagaccgacgucuccagcuccgugaucaccagccugggcgccaucguguccugcuacggcaagacgaagugcaccgccagcaacaagaaccgggggaucaucaagaccuucuccaacggcugcgacuacgucagcaacaaggggguggacaccgugagcgucggcaacacgcucuacugcgugaacaagcaggagggcaagucccuguacgugaagggggagcccaucaucaacuucuacgacccccuggucuucccgagcgacgaguucgacgccuccaucagccaggugaacgagaagaucaaccagucccucgcguucauccgcaagagcgacgagcugcugcacaacgugaacgucggcaaguccaccaccaacaucaugaucaccaccaucaucaucgugaucaucgugauccuccugcugcucaucgccgucgggcuguuccuguacugcaaggcccggagcacgcccgugacccuguccaaggaccagcucagcggcaucaacaacaucgccuucuccaacugaggacuagucccuguucccagagcccacuuuuuuuucuuuuuuugaaauaaaauagccugucuuucagaucuaaaaaaaaaaaaaaaaaaaaaaaaaaaaaaaaaaaaaaaaaaaaaaaaaaaaaaaaaaaaaaaaugcaucccccccccccccccccccccccccccccccaaaggcucuuuucagagccaccagaauu

SEQ ID NO: 16189 - RNA, 1930 nt, Artificial Sequence
  mRNA product Design a-4 comprising derived and/or modified sequence from HRSV(Memphis-37)__AIY60640.1__F_DSCav1_mut4 (opt2)
gggagacuccugucgggcggaaguaggaggaguagaguuuaaaaacaguacucuuuuuccgguucgggacguaguugaagcaacgacaagccggauaaccgcucuugagacaggaagcuuaccauggagcuccccauccucaagaccaacgccaucaccaccauccucgccgccgucacccucugcuucgccuccucccagaacaucaccgaggaguucuaccaguccaccugcuccgccgucuccaagggcuaccucuccgcccuccgcaccggcugguacaccuccgucaucaccaucgagcucuccaacaucaaggagaacaagugcaacggcaccgacgccaaggucaagcucaucaagcaggagcucgacaaguacaagaacgccgucaccgagcuccagcuccucaugcaguccacccccgccgccggcuccggcuccgccaucugcuccggcaucgccgucugcaagguccuccaccucgagggcgaggucaacaagaucaagaacgcccuccucuccaccaacaaggccgucgucucccucuccaacggcgucuccguccucaccuucaagguccucgaccucaagaacuacaucgacaagcagcuccuccccauccucaacaagcaguccugcuccaucuccaacaucgagaccgucaucgaguuccagcagaagaacaaccgccuccucgagaucacccgcgaguucuccgucaacgccggcgucaccacccccgucuccaccuacaugcucaccaacuccgagcuccucucccucaucaacgacaugcccaucaccaacgaccagaagaagcucauguccaacaacguccagaucguccgccagcaguccuacuccaucaugugcaucaucaaggaggagguccucgccuacgucguccagcucccccucuacggcgucaucgacacccccugcuggaagcuccacaccuccccccucugcaccaccaacaccaaggagggcuccaacaucugccucacccgcaccgaccgcggcugguacugcgacaacgccggcuccgucuccuucuucccccaggccgagaccugcaagguccaguccaaccgcgucuucugcgacaccaugaacucccgcacccuccccuccgaggucaaccucugcaacaucgacaucuucaaccccaaguacgacugcaagaucaugaccuccaagaccgacgucuccuccuccgucaucaccucccucggcgccaucgucuccugcuacggcaagaccaagugcaccgccuccaacaagaaccgcggcaucaucaagaccuucuccaacggcugcgacuacgucuccaacaagggcgucgacaccgucuccgucggcaacacccucuacugcgucaacaagcaggagggcaagucccucuacgucaagggcgagcccaucaucaacuucuacgacccccucgucuuccccuccgacgaguucgacgccuccaucucccaggucaacgagaagaucaaccagucccucgccuucauccgcaaguccgacgagcuccuccacaacgucaacgucggcaaguccaccaccaacaucaugaucaccaccaucaucaucgucaucaucgucauccuccuccuccucaucgccgucggccucuuccucuacugcaaggcccgcuccacccccgucacccucuccaaggaccagcucuccggcaucaacaacaucgccuucuccaacugaggacuagucccuguucccagagcccacuuuuuuuucuuuuuuugaaauaaaauagccugucuuucagaucuaaaaaaaaaaaaaaaaaaaaaaaaaaaaaaaaaaaaaaaaaaaaaaaaaaaaaaaaaaaaaaaaugcaucccccccccccccccccccccccccccccccaaaggcucuuuucagagccaccagaauu

SEQ ID NO: 16190 - RNA, 1930 nt, Artificial Sequence
  mRNA product Design a-4 comprising derived and/or modified sequence from HRSV(Memphis-37)__AIY60640.1__F_DSCav1_mut4 (opt3)
gggagacuccugucgggcggaaguaggaggaguagaguuuaaaaacaguacucuuuuuccgguucgggacguaguugaagcaacgacaagccggauaaccgcucuugagacaggaagcuuaccauggagcugcccauccucaagaccaacgccauuacaacuauacuugcugcagugacgcugugcuucgccagcucccagaauaucaccgaagaguuuuaccaaucuacauguucagcggucaguaaaggcuauuugagcgcuuuaagaacugggugguacaccuccguuauuacaaucgaacugucuaacauuaaggagaauaaaugcaacggaaccgacgccaaggugaaacuaaucaagcaggaacucgauaaguauaaaaaugcaguaacugagcugcagcuucugaugcagucgaccccugccgcugguucaggcagcgcaauauguagugggaucgccgugugcaaggucuugcaccucgagggagaagugaacaaaauuaagaaugcucugcuguccacaaacaaagccguugugucucucagcaauggcgucuccguguuaacguucaagguacuggaccuuaagaacuacaucgauaaacaauugcugccaauucuaaauaagcagucauguaguaucagcaacauagagacuguuauugaauuucagcagaaaaauaacaggcuccuggagaucacccgggaguucucugugaaugcgggugucacaacuccgguguccaccuauaugcuuacaaacucagaacuguugagccucauuaacgacaugcccaucaccaaugaucaaaagaaacugaugaguaacaaugugcagaucguccgccagcagucuuacuccauuaugugcauaaucaaggaggaaguuuuagcauaugugguacaacugccucucuacggggugauugacacgccauguuggaaacuucauacuagcccccugugcacaaccaacacuaaggagggaucgaauaucuguuugacacgaaccgaucguggcugguacugcgacaacgccggcucugucuccuuuuucccucaggcugaaacguguaaggugcagucaaauagaguguuuugcgauaccaugaacaguagaacacugccaagcgaggugaaucucugcaacauagacauuuucaaucccaaauaugauuguaagaucaugacuuccaaaaccgacgucucuagcucagugaucacaagucugggggccauuguauccugcuacggaaagacuaaauguaccgcaagcaacaagaauagggguaucauuaagacauuuucuaacggcugcgauuauguuucaaauaaagggguggacaccgucagugugggaaacacucuuuacugugucaacaagcaagagggcaaaagccuguaugugaagggugaaccuauaaucaauuucuacgacccauugguuuuuccguccgaugaguucgacgcuucuauuucgcagguuaacgagaaaaucaaucagagccucgccuuuauccggaaguccgaugaacuguuacacaacguaaaugucgggaagucaacgacaaacauuaugauaaccacuaucauuaucgugauuaucguuauacugcuacuccugaucgcggugggacuuuucuuguauugcaaagcccgcaguacccccgucacacugucuaaggaccagcucagcggcauuaauaacaucgcauucuccaauugaggacuagucccuguucccagagcccacuuuuuuuucuuuuuuugaaauaaaauagccugucuuucagaucuaaaaaaaaaaaaaaaaaaaaaaaaaaaaaaaaaaaaaaaaaaaaaaaaaaaaaaaaaaaaaaaaugcaucccccccccccccccccccccccccccccccaaaggcucuuuucagagccaccagaauu

SEQ ID NO: 16191 - RNA, 1930 nt, Artificial Sequence
  mRNA product Design a-4 comprising derived and/or modified sequence from HRSV(Memphis-37)__AIY60640.1__F_DSCav1_mut4 (opt4)
gggagacuccugucgggcggaaguaggaggaguagaguuuaaaaacaguacucuuuuuccgguucgggacguaguugaagcaacgacaagccggauaaccgcucuugagacaggaagcuuaccauggagcugcccauccugaagaccaacgccaucaccaccauccuggccgccgugacccugugcuucgccagcagccagaacaucaccgaggaguucuaccagagcaccugcagcgccgugagcaagggcuaccugagcgcccugagaaccggcugguacaccagcgugaucaccaucgagcugagcaacaucaaggagaacaagugcaacggcaccgacgccaaggugaagcugaucaagcaggagcuggacaaguacaagaacgccgugaccgagcugcagcugcugaugcagagcacccccgccgccggcagcggcagcgccaucugcagcggcaucgccgugugcaaggugcugcaccuggagggcgaggugaacaagaucaagaacgcccugcugagcaccaacaaggccguggugagccugagcaacggcgugagcgugcugaccuucaaggugcuggaccugaagaacuacaucgacaagcagcugcugcccauccugaacaagcagagcugcagcaucagcaacaucgagaccgugaucgaguuccagcagaagaacaacagacugcuggagaucaccagagaguucagcgugaacgccggcgugaccacccccgugagcaccuacaugcugaccaacagcgagcugcugagccugaucaacgacaugcccaucaccaacgaccagaagaagcugaugagcaacaacgugcagaucgugagacagcagagcuacagcaucaugugcaucaucaaggaggaggugcuggccuacguggugcagcugccccuguacggcgugaucgacacccccugcuggaagcugcacaccagcccccugugcaccaccaacaccaaggagggcagcaacaucugccugaccagaaccgacagaggcugguacugcgacaacgccggcagcgugagcuucuucccccaggccgagaccugcaaggugcagagcaacagaguguucugcgacaccaugaacagcagaacccugcccagcgaggugaaccugugcaacaucgacaucuucaaccccaaguacgacugcaagaucaugaccagcaagaccgacgugagcagcagcgugaucaccagccugggcgccaucgugagcugcuacggcaagaccaagugcaccgccagcaacaagaacagaggcaucaucaagaccuucagcaacggcugcgacuacgugagcaacaagggcguggacaccgugagcgugggcaacacccuguacugcgugaacaagcaggagggcaagagccuguacgugaagggcgagcccaucaucaacuucuacgacccccugguguuccccagcgacgaguucgacgccagcaucagccaggugaacgagaagaucaaccagagccuggccuucaucagaaagagcgacgagcugcugcacaacgugaacgugggcaagagcaccaccaacaucaugaucaccaccaucaucaucgugaucaucgugauccugcugcugcugaucgccgugggccuguuccuguacugcaaggccagaagcacccccgugacccugagcaaggaccagcugagcggcaucaacaacaucgccuucagcaacugaggacuagucccuguucccagagcccacuuuuuuuucuuuuuuugaaauaaaauagccugucuuucagaucuaaaaaaaaaaaaaaaaaaaaaaaaaaaaaaaaaaaaaaaaaaaaaaaaaaaaaaaaaaaaaaaaugcaucccccccccccccccccccccccccccccccaaaggcucuuuucagagccaccagaauu

SEQ ID NO: 16192 - RNA, 1930 nt, Artificial Sequence
  mRNA product Design a-4 comprising derived and/or modified sequence from HRSV(Memphis-37)__AIY60640.1__F_DSCav1_mut4 (opt5)
gggagacuccugucgggcggaaguaggaggaguagaguuuaaaaacaguacucuuuuuccgguucgggacguaguugaagcaacgacaagccggauaaccgcucuugagacaggaagcuuaccauggagcugcccauccucaagaccaacgccauuacaacgauccuggcugccgugacccuuugcuucgcgagcucccagaauauuacagaagaguuuuaccaaucuaccuguagcgcugucuccaaaggcuaucugucugcccucagaacagggugguacaccagcguuaucacaauugaacuguccaacaucaaggagaauaaaugcaacggaaccgacgccaaggugaaacuuaucaagcaggaacuggauaaguauaaaaaugcugugacggagcuccagcugcugaugcagucuaccccugccgcuggcagcggguccgccauuuguagcggaaucgcggucugcaaggugcuccaccuggagggcgaaguuaacaaaauuaagaaugcccuucugucuacaaacaaagcuguggucucccucagcaauggggugucuguucugaccuucaaggugcuugaccugaagaacuacaucgauaaacaacuccugccgauucugaauaagcaguccuguagcaucucuaacauugagacagucaucgaauuucagcagaaaaauaaccggcuccuggagaucacccgcgaguucuccgugaaugccggagugacgacacccgucagcaccuauaugcuuacaaacuccgaacugcucucucugauuaacgacaugccuaucaccaaugaucaaaagaaacuuaugagcaacaauguucagauugugagacagcaguccuacagcaucaugugcauuaucaaggaggaagugcuggcuuaugucgugcaacucccccuguacggcguuaucgacaccccuuguuggaaacugcauacaucuccccucugcacgaccaacacaaaggagggcuccaauauuugucugacccggacagaucgcgggugguacugcgacaacgccggaagcgugagcuuuuucccucaggcggaaaccuguaagguccagucuaauagaguguuuugcgauacgaugaacuccagaacacugccgucugagguuaaucucugcaacaucgacauuuucaaucccaaauaugauuguaagaucaugaccagcaaaaccgacguguccagcucugucauuacaucccugggcgccaucgugagcugcuacgggaagaccaaauguacagcuucuaacaagaaucggggaaucauuaagacguuuuccaacggcugcgauuaugucagcaauaaagggguggacaccguuuccgugggaaacacacuuuacugugucaacaagcaagagggcaaaucucuguaugugaagggcgaaccuaucauuaauuucuacgacccccucguuuuuccuagcgaugaguucgacgccuccaucucucaggugaacgaaaagauuaaucagagccuggcuuuuauccgcaaguccgaugagcugcuccacaacgucaauguggggaaaagcaccacaaacauuaugaucaccacgaucauuaucgugauuaucguuauucugcuucugcucaucgccgucggacuguuccuguauugcaaagccagaucuacccccgugacacuuuccaaggaccagcucagcggcaucaauaacauugcuuucucuaauugaggacuagucccuguucccagagcccacuuuuuuuucuuuuuuugaaauaaaauagccugucuuucagaucuaaaaaaaaaaaaaaaaaaaaaaaaaaaaaaaaaaaaaaaaaaaaaaaaaaaaaaaaaaaaaaaaugcaucccccccccccccccccccccccccccccccaaaggcucuuuucagagccaccagaauu

SEQ ID NO: 16193 - RNA, 1930 nt, Artificial Sequence
  mRNA product Design a-4 comprising derived and/or modified sequence from HRSV(Memphis-37)__AIY60640.1__F_DSCav1_mut4 (opt6)
gggagacuccugucgggcggaaguaggaggaguagaguuuaaaaacaguacucuuuuuccgguucgggacguaguugaagcaacgacaagccggauaaccgcucuugagacaggaagcuuaccauggaacucccaauccuaaaaacaaacgcaauaacaacaauauuagcagccguaacacucuguuucgccucaucccaaaacauaacagaagaauuuuaucaaucuacauguuccgccgucaguaaaggauaucuaucagccuuaagaacaggcugguacacaucaguaaucaccauagaauuauccaacauaaaagaaaacaaaugcaauggcacagaugccaaaguaaaacuaaucaaacaagaacuugauaaauauaaaaacgcaguaacagaauuacaauuauuaaugcaaagcacaccagccgcaggaucaggaucagcaauauguucaggaauagcagucuguaaaguacuacacuuagaaggagaaguaaacaaaauuaaaaacgcauuacuaagcaccaauaaagcaguaguaucacuaucaaacggcguauccguauuaacguucaaaguccucgaccugaaaaacuacauagauaaacaacuacuaccaauacuaaauaaacaaucaugcucaauaucaaacauagaaacuguuaucgaauuucaacagaaaaauaaccgacuacuagaaaucaccagagaauuuucaguaaacgcaggcgucacuacaccaguauccacauacaugcuaaccaacucggaauuacuuucccucauaaacgacaugccaauaacaaacgaccaaaagaaacuuaugucaaacaacguucaaauaguccgccaacaaucauacucaauaauguguaucauaaaagaagaaguccuagcauaugucguacaacuaccauuauacggaguaauugacacaccuugcuggaaacuacacacauccccacuauguacaacaaacacuaaagaaggaucaaacaucugccuaaccagaacagacagaggcugguauugcgacaacgcaggaucaguaucauucuucccacaagcagaaacaugcaaaguacaaucaaacagagucuucugcgacaccaugaacagcagaacccucccauccgaaguaaacuuaugcaacaucgauaucuucaacccaaaauacgacuguaaaauaaugacaucaaaaacagacguuucauccucaguaauaacaucauuaggugccauaguuucauguuacggaaaaaccaaauguaccgcaucaaacaaaaacagaggcauuauuaaaacauucucuaacggaugcgacuaugucaguaacaaaggaguagacacaguaucagucggaaacacauuauauugcguaaauaaacaagaaggaaaaagucuauacguaaaaggagaaccaauaauaaacuuuuacgacccucucguauucccaucagacgaauuugaugcauccauaucacaagucaacgaaaagauaaaccaaucccuagcauucauaagaaaaucagacgaacuacuccauaacguaaacguaggaaaaagcacaaccaauauaaugauaaccacaauaaucauaguaauaauagucauauuauuacuuuuaauugcaguaggacucuuucuauacugcaaagcaagaagcacaccaguaacacuaagcaaagaccaacuaucaggcaucaacaauaucgccuuuucaaauuaaggacuagucccuguucccagagcccacuuuuuuuucuuuuuuugaaauaaaauagccugucuuucagaucuaaaaaaaaaaaaaaaaaaaaaaaaaaaaaaaaaaaaaaaaaaaaaaaaaaaaaaaaaaaaaaaaugcaucccccccccccccccccccccccccccccccaaaggcucuuuucagagccaccagaauu

SEQ ID NO: 16194 - RNA, 1930 nt, Artificial Sequence
  mRNA product Design a-4 comprising derived and/or modified sequence from HRSV(Memphis-37)__AIY60640.1__F_DSCav1_mut4 (opt11)
gggagacuccugucgggcggaaguaggaggaguagaguuuaaaaacaguacucuuuuuccgguucgggacguaguugaagcaacgacaagccggauaaccgcucuugagacaggaagcuuaccauggagcugcccauccucaagaccaacgccaucaccacgauccuggccgcggugacccugugcuucgcgagcucccagaacaucaccgaggaguucuaccagagcacgugcuccgccgucagcaagggcuaccucuccgcccugcgcaccgggugguacaccagcgugaucaccaucgagcuguccaacaucaaggagaacaagugcaacggcaccgacgccaaggugaaacucaucaagcaggagcuggacaaguacaagaacgccgucaccgagcugcagcuccugaugcagagcaccccggccgccggguccggcagcgcuaucugcuccgggaucgcggugugcaaggugcugcaccucgagggcgaggucaacaagaucaagaaugcccugcugagcaccaacaaggccguggugucccucagcaacggagucagcgugcuuaccuucaaggugcuggaccucaagaacuacaucgacaagcagcugcugccuauccucaacaagcagagcugcuccaucagcaacaucgagacggucaucgaguuccagcagaagaacaaccggcugcuggagaucacccgcgaguucuccgugaacgccggggugaccacccccgucagcacguacaugcucaccaacagcgaacugcugucccucaucaacgacaugcccaucaccaacgaccagaagaagcugaugagcaacaacgugcagaucgugcggcagcaguccuacagcaucaugugcaucaucaaggaggaaguccuggccuacguggugcagcucccucuguacggcgucaucgacacccccugcuggaagcugcacacgagcccccucugcaccaccaacaccaaggagggguccaacaucugccugacgcgcaccgaccggggcugguacugcgacaacgcgggguccgugagcuucuucccccaggccgagaccugcaaggugcagagcaaccgcgucuucugcgacacuaugaacagcagaacgcucccguccgaggugaaccugugcaacauagacauauucaaccccaaguacgacugcaagaucaugaccagcaagaccgacgucuccagcuccgugauuaccagccugggcgcaaucguguccugcuacggcaagacgaagugcaccgccagcaacaagaaccgggggaucaucaagaccuucuccaacggcugcgacuaugucagcaacaaggggguggacaccgugagcgucggaaacacgcucuacugcgugaacaagcaagagggcaaguccuuauacgugaagggggagcccaucaucaacuucuacgacccccuggucuucccgagcgacgaguucgacgccagcauaagccaggugaacgagaagaucaaccagucccucgcguucauccgcaagagcgacgagcugcugcacaacgugaacgucggcaaguccaccaccaacaucaugaucaccaccaucaucaucgugaucaucgugauccuccugcugcucaucgccgucgggcuguuccuguacugcaaggcccggagcacgcccgugaccuuguccaaggaccagcucagcggcaucaacaacaucgccuucuccaacugaggacuagucccuguucccagagcccacuuuuuuuucuuuuuuugaaauaaaauagccugucuuucagaucuaaaaaaaaaaaaaaaaaaaaaaaaaaaaaaaaaaaaaaaaaaaaaaaaaaaaaaaaaaaaaaaaugcaucccccccccccccccccccccccccccccccaaaggcucuuuucagagccaccagaauu

SEQ ID NO: 16195 - RNA, 1876 nt, Artificial Sequence
  mRNA product Design a-5 comprising derived and/or modified sequence from HRSV(Memphis-37)__AIY60640.1__F_DSCav1_mut4 (opt1)
gggagacuuucccauucuguagcagaauuugguguugccuguggucuuggucccgcggagaagcuuaccauggagcugcccauccucaagaccaacgccaucaccacgauccuggccgcggugacccugugcuucgccagcucccagaacaucaccgaggaguucuaccagagcacgugcuccgccgucagcaagggcuaccucuccgcccugcgcaccgggugguacaccagcgugaucaccaucgagcuguccaacaucaaggagaacaagugcaacggcaccgacgccaaggugaagcucaucaagcaggagcuggacaaguacaagaacgcggucacggagcugcagcuccugaugcagagcaccccggccgccggcuccgggagcgcgaucugcuccggcaucgccgucugcaaggugcugcaccucgagggcgaggugaacaagaucaagaacgcccugcuguccaccaacaaggccgucgugagccucuccaacggggugagcguccugaccuucaaggugcuggaccucaagaacuacaucgacaagcagcugcugcccauccugaacaagcagagcugcuccaucagcaacaucgagaccgucaucgaguuccagcagaagaacaaccgccuccuggagaucacgcgggaguucagcgugaacgcgggcgugaccacccccgucuccaccuacaugcugacgaacagcgagcuccugucccugaucaacgacaugccgaucaccaacgaccagaagaagcucaugagcaacaacgugcagaucgugcgccagcaguccuacagcaucaugugcaucaucaaggaggagguccuggccuacguggugcagcugccccucuacggggucaucgacacccccugcuggaagcugcacaccagcccccugugcacgaccaacaccaaggagggcuccaacaucugccucacccggacggaccgcgggugguacugcgacaacgccggcagcguguccuucuucccgcaggccgagaccugcaagguccagagcaaccggguguucugcgacaccaugaacucccggacccugcccagcgaggugaaccucugcaacaucgacaucuucaaccccaaguacgacugcaagaucaugacguccaagaccgacgucagcuccagcgugaucaccucccugggcgccaucgugagcugcuacgggaagaccaagugcacggcgagcaacaagaaccgcggcaucaucaagaccuucuccaacgggugcgacuacgucagcaacaagggcguggacaccguguccgucggcaacacccuguacugcgugaacaagcaggagggcaagagccucuacgugaagggggagcccaucaucaacuucuacgacccgcuggucuuccccuccgacgaguucgacgccagcaucucccaggugaacgagaagaucaaccagagccuggccuucauccggaaguccgacgagcuccugcacaacgugaacgucggcaagagcaccacgaacaucaugaucaccaccaucaucaucgugaucaucgugauccugcugcuccugaucgccgucgggcuguuccucuacugcaaggcccgcuccacccccgugacgcugagcaaggaccagcuguccgggaucaacaacaucgcguucagcaacugaggacuagucccuguucccagagcccacuuuuuuuucuuuuuuugaaauaaaauagccugucuuucagaucuaaaaaaaaaaaaaaaaaaaaaaaaaaaaaaaaaaaaaaaaaaaaaaaaaaaaaaaaaaaaaaaaugcaucccccccccccccccccccccccccccccccaaaggcucuuuucagagccaccagaauu

SEQ ID NO: 16196 - RNA, 1876 nt, Artificial Sequence
  mRNA product Design a-5 comprising derived and/or modified sequence from HRSV(Memphis-37)__AIY60640.1__F_DSCav1_mut4 (opt1)
gggagacuuucccauucuguagcagaauuugguguugccuguggucuuggucccgcggagaagcuuaccauggagcugcccauccucaagaccaacgccaucaccacgauccuggccgcggugacccugugcuucgccagcucccagaacaucaccgaggaguucuaccagagcacgugcuccgccgucagcaagggcuaccucuccgcccugcgcaccgggugguacaccagcgugaucaccaucgagcuguccaacaucaaggagaacaagugcaacggcaccgacgccaaggugaagcucaucaagcaggagcuggacaaguacaagaacgcggucacggagcugcagcuccugaugcagagcaccccggccgccggguccggcagcgccaucugcuccgggaucgcggugugcaaggugcugcaccucgagggcgaggucaacaagaucaagaacgcccugcugagcaccaacaaggccguggugucccucagcaacggcgucuccgugcugaccuucaaggugcuggaccucaagaacuacaucgacaagcagcugcugcccauccucaacaagcagagcugcuccaucagcaacaucgagacggucaucgaguuccagcagaagaacaaccggcugcuggagaucacccgcgaguucuccgugaacgccggggugaccacccccgucagcacguacaugcucaccaacagcgagcugcugucccucaucaacgacaugcccaucaccaacgaccagaagaagcugaugagcaacaacgugcagaucgugcggcagcaguccuacagcaucaugugcaucaucaaggaggagguccuggccuacguggugcagcucccgcuguacggcgucaucgacacccccugcuggaagcugcacacgagcccccucugcaccaccaacaccaaggagggguccaacaucugccugacgcgcaccgaccggggcugguacugcgacaacgcgggguccgugagcuucuucccccaggccgagaccugcaaggugcaguccaaccgcgucuucugcgacaccaugaacagccggacgcucccguccgaggugaaccugugcaacaucgacaucuucaaccccaaguacgacugcaagaucaugaccagcaagaccgacgucuccagcuccgugaucaccagccugggcgccaucguguccugcuacggcaagacgaagugcaccgccagcaacaagaaccgggggaucaucaagaccuucuccaacggcugcgacuacgucagcaacaaggggguggacaccgugagcgucggcaacacgcucuacugcgugaacaagcaggagggcaagucccuguacgugaagggggagcccaucaucaacuucuacgacccccuggucuucccgagcgacgaguucgacgccuccaucagccaggugaacgagaagaucaaccagucccucgcguucauccgcaagagcgacgagcugcugcacaacgugaacgucggcaaguccaccaccaacaucaugaucaccaccaucaucaucgugaucaucgugauccuccugcugcucaucgccgucgggcuguuccuguacugcaaggcccggagcacgcccgugacccuguccaaggaccagcucagcggcaucaacaacaucgccuucuccaacugaggacuagucccuguucccagagcccacuuuuuuuucuuuuuuugaaauaaaauagccugucuuucagaucuaaaaaaaaaaaaaaaaaaaaaaaaaaaaaaaaaaaaaaaaaaaaaaaaaaaaaaaaaaaaaaaaugcaucccccccccccccccccccccccccccccccaaaggcucuuuucagagccaccagaauu

SEQ ID NO: 16197 - RNA, 1876 nt, Artificial Sequence
  mRNA product Design a-5 comprising derived and/or modified sequence from HRSV(Memphis-37)__AIY60640.1__F_DSCav1_mut4 (opt2)
gggagacuuucccauucuguagcagaauuugguguugccuguggucuuggucccgcggagaagcuuaccauggagcuccccauccucaagaccaacgccaucaccaccauccucgccgccgucacccucugcuucgccuccucccagaacaucaccgaggaguucuaccaguccaccugcuccgccgucuccaagggcuaccucuccgcccuccgcaccggcugguacaccuccgucaucaccaucgagcucuccaacaucaaggagaacaagugcaacggcaccgacgccaaggucaagcucaucaagcaggagcucgacaaguacaagaacgccgucaccgagcuccagcuccucaugcaguccacccccgccgccggcuccggcuccgccaucugcuccggcaucgccgucugcaagguccuccaccucgagggcgaggucaacaagaucaagaacgcccuccucuccaccaacaaggccgucgucucccucuccaacggcgucuccguccucaccuucaagguccucgaccucaagaacuacaucgacaagcagcuccuccccauccucaacaagcaguccugcuccaucuccaacaucgagaccgucaucgaguuccagcagaagaacaaccgccuccucgagaucacccgcgaguucuccgucaacgccggcgucaccacccccgucuccaccuacaugcucaccaacuccgagcuccucucccucaucaacgacaugcccaucaccaacgaccagaagaagcucauguccaacaacguccagaucguccgccagcaguccuacuccaucaugugcaucaucaaggaggagguccucgccuacgucguccagcucccccucuacggcgucaucgacacccccugcuggaagcuccacaccuccccccucugcaccaccaacaccaaggagggcuccaacaucugccucacccgcaccgaccgcggcugguacugcgacaacgccggcuccgucuccuucuucccccaggccgagaccugcaagguccaguccaaccgcgucuucugcgacaccaugaacucccgcacccuccccuccgaggucaaccucugcaacaucgacaucuucaaccccaaguacgacugcaagaucaugaccuccaagaccgacgucuccuccuccgucaucaccucccucggcgccaucgucuccugcuacggcaagaccaagugcaccgccuccaacaagaaccgcggcaucaucaagaccuucuccaacggcugcgacuacgucuccaacaagggcgucgacaccgucuccgucggcaacacccucuacugcgucaacaagcaggagggcaagucccucuacgucaagggcgagcccaucaucaacuucuacgacccccucgucuuccccuccgacgaguucgacgccuccaucucccaggucaacgagaagaucaaccagucccucgccuucauccgcaaguccgacgagcuccuccacaacgucaacgucggcaaguccaccaccaacaucaugaucaccaccaucaucaucgucaucaucgucauccuccuccuccucaucgccgucggccucuuccucuacugcaaggcccgcuccacccccgucacccucuccaaggaccagcucuccggcaucaacaacaucgccuucuccaacugaggacuagucccuguucccagagcccacuuuuuuuucuuuuuuugaaauaaaauagccugucuuucagaucuaaaaaaaaaaaaaaaaaaaaaaaaaaaaaaaaaaaaaaaaaaaaaaaaaaaaaaaaaaaaaaaaugcaucccccccccccccccccccccccccccccccaaaggcucuuuucagagccaccagaauu

SEQ ID NO: 16198 - RNA, 1876 nt, Artificial Sequence
  mRNA product Design a-5 comprising derived and/or modified sequence from HRSV(Memphis-37)__AIY60640.1__F_DSCav1_mut4 (opt3)
gggagacuuucccauucuguagcagaauuugguguugccuguggucuuggucccgcggagaagcuuaccauggagcugcccauccucaagaccaacgccauuacaacuauacuugcugcagugacgcugugcuucgccagcucccagaauaucaccgaagaguuuuaccaaucuacauguucagcggucaguaaaggcuauuugagcgcuuuaagaacugggugguacaccuccguuauuacaaucgaacugucuaacauuaaggagaauaaaugcaacggaaccgacgccaaggugaaacuaaucaagcaggaacucgauaaguauaaaaaugcaguaacugagcugcagcuucugaugcagucgaccccugccgcugguucaggcagcgcaauauguagugggaucgccgugugcaaggucuugcaccucgagggagaagugaacaaaauuaagaaugcucugcuguccacaaacaaagccguugugucucucagcaauggcgucuccguguuaacguucaagguacuggaccuuaagaacuacaucgauaaacaauugcugccaauucuaaauaagcagucauguaguaucagcaacauagagacuguuauugaauuucagcagaaaaauaacaggcuccuggagaucacccgggaguucucugugaaugcgggugucacaacuccgguguccaccuauaugcuuacaaacucagaacuguugagccucauuaacgacaugcccaucaccaaugaucaaaagaaacugaugaguaacaaugugcagaucguccgccagcagucuuacuccauuaugugcauaaucaaggaggaaguuuuagcauaugugguacaacugccucucuacggggugauugacacgccauguuggaaacuucauacuagcccccugugcacaaccaacacuaaggagggaucgaauaucuguuugacacgaaccgaucguggcugguacugcgacaacgccggcucugucuccuuuuucccucaggcugaaacguguaaggugcagucaaauagaguguuuugcgauaccaugaacaguagaacacugccaagcgaggugaaucucugcaacauagacauuuucaaucccaaauaugauuguaagaucaugacuuccaaaaccgacgucucuagcucagugaucacaagucugggggccauuguauccugcuacggaaagacuaaauguaccgcaagcaacaagaauagggguaucauuaagacauuuucuaacggcugcgauuauguuucaaauaaagggguggacaccgucagugugggaaacacucuuuacugugucaacaagcaagagggcaaaagccuguaugugaagggugaaccuauaaucaauuucuacgacccauugguuuuuccguccgaugaguucgacgcuucuauuucgcagguuaacgagaaaaucaaucagagccucgccuuuauccggaaguccgaugaacuguuacacaacguaaaugucgggaagucaacgacaaacauuaugauaaccacuaucauuaucgugauuaucguuauacugcuacuccugaucgcggugggacuuuucuuguauugcaaagcccgcaguacccccgucacacugucuaaggaccagcucagcggcauuaauaacaucgcauucuccaauugaggacuagucccuguucccagagcccacuuuuuuuucuuuuuuugaaauaaaauagccugucuuucagaucuaaaaaaaaaaaaaaaaaaaaaaaaaaaaaaaaaaaaaaaaaaaaaaaaaaaaaaaaaaaaaaaaugcaucccccccccccccccccccccccccccccccaaaggcucuuuucagagccaccagaauu

SEQ ID NO: 16199 - RNA, 1876 nt, Artificial Sequence
  mRNA product Design a-5 comprising derived and/or modified sequence from HRSV(Memphis-37)__AIY60640.1__F_DSCav1_mut4 (opt4)
gggagacuuucccauucuguagcagaauuugguguugccuguggucuuggucccgcggagaagcuuaccauggagcugcccauccugaagaccaacgccaucaccaccauccuggccgccgugacccugugcuucgccagcagccagaacaucaccgaggaguucuaccagagcaccugcagcgccgugagcaagggcuaccugagcgcccugagaaccggcugguacaccagcgugaucaccaucgagcugagcaacaucaaggagaacaagugcaacggcaccgacgccaaggugaagcugaucaagcaggagcuggacaaguacaagaacgccgugaccgagcugcagcugcugaugcagagcacccccgccgccggcagcggcagcgccaucugcagcggcaucgccgugugcaaggugcugcaccuggagggcgaggugaacaagaucaagaacgcccugcugagcaccaacaaggccguggugagccugagcaacggcgugagcgugcugaccuucaaggugcuggaccugaagaacuacaucgacaagcagcugcugcccauccugaacaagcagagcugcagcaucagcaacaucgagaccgugaucgaguuccagcagaagaacaacagacugcuggagaucaccagagaguucagcgugaacgccggcgugaccacccccgugagcaccuacaugcugaccaacagcgagcugcugagccugaucaacgacaugcccaucaccaacgaccagaagaagcugaugagcaacaacgugcagaucgugagacagcagagcuacagcaucaugugcaucaucaaggaggaggugcuggccuacguggugcagcugccccuguacggcgugaucgacacccccugcuggaagcugcacaccagcccccugugcaccaccaacaccaaggagggcagcaacaucugccugaccagaaccgacagaggcugguacugcgacaacgccggcagcgugagcuucuucccccaggccgagaccugcaaggugcagagcaacagaguguucugcgacaccaugaacagcagaacccugcccagcgaggugaaccugugcaacaucgacaucuucaaccccaaguacgacugcaagaucaugaccagcaagaccgacgugagcagcagcgugaucaccagccugggcgccaucgugagcugcuacggcaagaccaagugcaccgccagcaacaagaacagaggcaucaucaagaccuucagcaacggcugcgacuacgugagcaacaagggcguggacaccgugagcgugggcaacacccuguacugcgugaacaagcaggagggcaagagccuguacgugaagggcgagcccaucaucaacuucuacgacccccugguguuccccagcgacgaguucgacgccagcaucagccaggugaacgagaagaucaaccagagccuggccuucaucagaaagagcgacgagcugcugcacaacgugaacgugggcaagagcaccaccaacaucaugaucaccaccaucaucaucgugaucaucgugauccugcugcugcugaucgccgugggccuguuccuguacugcaaggccagaagcacccccgugacccugagcaaggaccagcugagcggcaucaacaacaucgccuucagcaacugaggacuagucccuguucccagagcccacuuuuuuuucuuuuuuugaaauaaaauagccugucuuucagaucuaaaaaaaaaaaaaaaaaaaaaaaaaaaaaaaaaaaaaaaaaaaaaaaaaaaaaaaaaaaaaaaaugcaucccccccccccccccccccccccccccccccaaaggcucuuuucagagccaccagaauu

SEQ ID NO: 16200 - RNA, 1876 nt, Artificial Sequence
  mRNA product Design a-5 comprising derived and/or modified sequence from HRSV(Memphis-37)__AIY60640.1__F_DSCav1_mut4 (opt5)
gggagacuuucccauucuguagcagaauuugguguugccuguggucuuggucccgcggagaagcuuaccauggagcugcccauccucaagaccaacgccauuacaacgauccuggcugccgugacccuuugcuucgcgagcucccagaauauuacagaagaguuuuaccaaucuaccuguagcgcugucuccaaaggcuaucugucugcccucagaacagggugguacaccagcguuaucacaauugaacuguccaacaucaaggagaauaaaugcaacggaaccgacgccaaggugaaacuuaucaagcaggaacuggauaaguauaaaaaugcugugacggagcuccagcugcugaugcagucuaccccugccgcuggcagcggguccgccauuuguagcggaaucgcggucugcaaggugcuccaccuggagggcgaaguuaacaaaauuaagaaugcccuucugucuacaaacaaagcuguggucucccucagcaauggggugucuguucugaccuucaaggugcuugaccugaagaacuacaucgauaaacaacuccugccgauucugaauaagcaguccuguagcaucucuaacauugagacagucaucgaauuucagcagaaaaauaaccggcuccuggagaucacccgcgaguucuccgugaaugccggagugacgacacccgucagcaccuauaugcuuacaaacuccgaacugcucucucugauuaacgacaugccuaucaccaaugaucaaaagaaacuuaugagcaacaauguucagauugugagacagcaguccuacagcaucaugugcauuaucaaggaggaagugcuggcuuaugucgugcaacucccccuguacggcguuaucgacaccccuuguuggaaacugcauacaucuccccucugcacgaccaacacaaaggagggcuccaauauuugucugacccggacagaucgcgggugguacugcgacaacgccggaagcgugagcuuuuucccucaggcggaaaccuguaagguccagucuaauagaguguuuugcgauacgaugaacuccagaacacugccgucugagguuaaucucugcaacaucgacauuuucaaucccaaauaugauuguaagaucaugaccagcaaaaccgacguguccagcucugucauuacaucccugggcgccaucgugagcugcuacgggaagaccaaauguacagcuucuaacaagaaucggggaaucauuaagacguuuuccaacggcugcgauuaugucagcaauaaagggguggacaccguuuccgugggaaacacacuuuacugugucaacaagcaagagggcaaaucucuguaugugaagggcgaaccuaucauuaauuucuacgacccccucguuuuuccuagcgaugaguucgacgccuccaucucucaggugaacgaaaagauuaaucagagccuggcuuuuauccgcaaguccgaugagcugcuccacaacgucaauguggggaaaagcaccacaaacauuaugaucaccacgaucauuaucgugauuaucguuauucugcuucugcucaucgccgucggacuguuccuguauugcaaagccagaucuacccccgugacacuuuccaaggaccagcucagcggcaucaauaacauugcuuucucuaauugaggacuagucccuguucccagagcccacuuuuuuuucuuuuuuugaaauaaaauagccugucuuucagaucuaaaaaaaaaaaaaaaaaaaaaaaaaaaaaaaaaaaaaaaaaaaaaaaaaaaaaaaaaaaaaaaaugcaucccccccccccccccccccccccccccccccaaaggcucuuuucagagccaccagaauu

SEQ ID NO: 16201 - RNA, 1876 nt, Artificial Sequence
  mRNA product Design a-5 comprising derived and/or modified sequence from HRSV(Memphis-37)__AIY60640.1__F_DSCav1_mut4 (opt6)
gggagacuuucccauucuguagcagaauuugguguugccuguggucuuggucccgcggagaagcuuaccauggaacucccaauccuaaaaacaaacgcaauaacaacaauauuagcagccguaacacucuguuucgccucaucccaaaacauaacagaagaauuuuaucaaucuacauguuccgccgucaguaaaggauaucuaucagccuuaagaacaggcugguacacaucaguaaucaccauagaauuauccaacauaaaagaaaacaaaugcaauggcacagaugccaaaguaaaacuaaucaaacaagaacuugauaaauauaaaaacgcaguaacagaauuacaauuauuaaugcaaagcacaccagccgcaggaucaggaucagcaauauguucaggaauagcagucuguaaaguacuacacuuagaaggagaaguaaacaaaauuaaaaacgcauuacuaagcaccaauaaagcaguaguaucacuaucaaacggcguauccguauuaacguucaaaguccucgaccugaaaaacuacauagauaaacaacuacuaccaauacuaaauaaacaaucaugcucaauaucaaacauagaaacuguuaucgaauuucaacagaaaaauaaccgacuacuagaaaucaccagagaauuuucaguaaacgcaggcgucacuacaccaguauccacauacaugcuaaccaacucggaauuacuuucccucauaaacgacaugccaauaacaaacgaccaaaagaaacuuaugucaaacaacguucaaauaguccgccaacaaucauacucaauaauguguaucauaaaagaagaaguccuagcauaugucguacaacuaccauuauacggaguaauugacacaccuugcuggaaacuacacacauccccacuauguacaacaaacacuaaagaaggaucaaacaucugccuaaccagaacagacagaggcugguauugcgacaacgcaggaucaguaucauucuucccacaagcagaaacaugcaaaguacaaucaaacagagucuucugcgacaccaugaacagcagaacccucccauccgaaguaaacuuaugcaacaucgauaucuucaacccaaaauacgacuguaaaauaaugacaucaaaaacagacguuucauccucaguaauaacaucauuaggugccauaguuucauguuacggaaaaaccaaauguaccgcaucaaacaaaaacagaggcauuauuaaaacauucucuaacggaugcgacuaugucaguaacaaaggaguagacacaguaucagucggaaacacauuauauugcguaaauaaacaagaaggaaaaagucuauacguaaaaggagaaccaauaauaaacuuuuacgacccucucguauucccaucagacgaauuugaugcauccauaucacaagucaacgaaaagauaaaccaaucccuagcauucauaagaaaaucagacgaacuacuccauaacguaaacguaggaaaaagcacaaccaauauaaugauaaccacaauaaucauaguaauaauagucauauuauuacuuuuaauugcaguaggacucuuucuauacugcaaagcaagaagcacaccaguaacacuaagcaaagaccaacuaucaggcaucaacaauaucgccuuuucaaauuaaggacuagucccuguucccagagcccacuuuuuuuucuuuuuuugaaauaaaauagccugucuuucagaucuaaaaaaaaaaaaaaaaaaaaaaaaaaaaaaaaaaaaaaaaaaaaaaaaaaaaaaaaaaaaaaaaugcaucccccccccccccccccccccccccccccccaaaggcucuuuucagagccaccagaauu

SEQ ID NO: 16202 - RNA, 1876 nt, Artificial Sequence
  mRNA product Design a-5 comprising derived and/or modified sequence from HRSV(Memphis-37)__AIY60640.1__F_DSCav1_mut4 (opt11)
gggagacuuucccauucuguagcagaauuugguguugccuguggucuuggucccgcggagaagcuuaccauggagcugcccauccucaagaccaacgccaucaccacgauccuggccgcggugacccugugcuucgcgagcucccagaacaucaccgaggaguucuaccagagcacgugcuccgccgucagcaagggcuaccucuccgcccugcgcaccgggugguacaccagcgugaucaccaucgagcuguccaacaucaaggagaacaagugcaacggcaccgacgccaaggugaaacucaucaagcaggagcuggacaaguacaagaacgccgucaccgagcugcagcuccugaugcagagcaccccggccgccggguccggcagcgcuaucugcuccgggaucgcggugugcaaggugcugcaccucgagggcgaggucaacaagaucaagaaugcccugcugagcaccaacaaggccguggugucccucagcaacggagucagcgugcuuaccuucaaggugcuggaccucaagaacuacaucgacaagcagcugcugccuauccucaacaagcagagcugcuccaucagcaacaucgagacggucaucgaguuccagcagaagaacaaccggcugcuggagaucacccgcgaguucuccgugaacgccggggugaccacccccgucagcacguacaugcucaccaacagcgaacugcugucccucaucaacgacaugcccaucaccaacgaccagaagaagcugaugagcaacaacgugcagaucgugcggcagcaguccuacagcaucaugugcaucaucaaggaggaaguccuggccuacguggugcagcucccucuguacggcgucaucgacacccccugcuggaagcugcacacgagcccccucugcaccaccaacaccaaggagggguccaacaucugccugacgcgcaccgaccggggcugguacugcgacaacgcgggguccgugagcuucuucccccaggccgagaccugcaaggugcagagcaaccgcgucuucugcgacacuaugaacagcagaacgcucccguccgaggugaaccugugcaacauagacauauucaaccccaaguacgacugcaagaucaugaccagcaagaccgacgucuccagcuccgugauuaccagccugggcgcaaucguguccugcuacggcaagacgaagugcaccgccagcaacaagaaccgggggaucaucaagaccuucuccaacggcugcgacuaugucagcaacaaggggguggacaccgugagcgucggaaacacgcucuacugcgugaacaagcaagagggcaaguccuuauacgugaagggggagcccaucaucaacuucuacgacccccuggucuucccgagcgacgaguucgacgccagcauaagccaggugaacgagaagaucaaccagucccucgcguucauccgcaagagcgacgagcugcugcacaacgugaacgucggcaaguccaccaccaacaucaugaucaccaccaucaucaucgugaucaucgugauccuccugcugcucaucgccgucgggcuguuccuguacugcaaggcccggagcacgcccgugaccuuguccaaggaccagcucagcggcaucaacaacaucgccuucuccaacugaggacuagucccuguucccagagcccacuuuuuuuucuuuuuuugaaauaaaauagccugucuuucagaucuaaaaaaaaaaaaaaaaaaaaaaaaaaaaaaaaaaaaaaaaaaaaaaaaaaaaaaaaaaaaaaaaugcaucccccccccccccccccccccccccccccccaaaggcucuuuucagagccaccagaauu

SEQ ID NO: 16203 - RNA, 2057 nt, Artificial Sequence
  mRNA product Design b-1 comprising derived and/or modified sequence from HRSV(Memphis-37)__AIY60640.1__F_DSCav1_mut4 (opt1)
gggagacggagacggccugcaggaccugcucucucagcccucagccgaggccuacgccgagccgagugcgcagccgacgaccgggaggagccgcagccuucaacucugagguacugugauccgcgcugcccgccgggccgccccaguccgcugcugcggcaccuccuucccucgcgcccucuucgcucgccagcgccuucccugugagccugcgucaccgcggccgccaagcuuaccauggagcugcccauccucaagaccaacgccaucaccacgauccuggccgcggugacccugugcuucgccagcucccagaacaucaccgaggaguucuaccagagcacgugcuccgccgucagcaagggcuaccucuccgcccugcgcaccgggugguacaccagcgugaucaccaucgagcuguccaacaucaaggagaacaagugcaacggcaccgacgccaaggugaagcucaucaagcaggagcuggacaaguacaagaacgcggucacggagcugcagcuccugaugcagagcaccccggccgccggcuccgggagcgcgaucugcuccggcaucgccgucugcaaggugcugcaccucgagggcgaggugaacaagaucaagaacgcccugcuguccaccaacaaggccgucgugagccucuccaacggggugagcguccugaccuucaaggugcuggaccucaagaacuacaucgacaagcagcugcugcccauccugaacaagcagagcugcuccaucagcaacaucgagaccgucaucgaguuccagcagaagaacaaccgccuccuggagaucacgcgggaguucagcgugaacgcgggcgugaccacccccgucuccaccuacaugcugacgaacagcgagcuccugucccugaucaacgacaugccgaucaccaacgaccagaagaagcucaugagcaacaacgugcagaucgugcgccagcaguccuacagcaucaugugcaucaucaaggaggagguccuggccuacguggugcagcugccccucuacggggucaucgacacccccugcuggaagcugcacaccagcccccugugcacgaccaacaccaaggagggcuccaacaucugccucacccggacggaccgcgggugguacugcgacaacgccggcagcguguccuucuucccgcaggccgagaccugcaagguccagagcaaccggguguucugcgacaccaugaacucccggacccugcccagcgaggugaaccucugcaacaucgacaucuucaaccccaaguacgacugcaagaucaugacguccaagaccgacgucagcuccagcgugaucaccucccugggcgccaucgugagcugcuacgggaagaccaagugcacggcgagcaacaagaaccgcggcaucaucaagaccuucuccaacgggugcgacuacgucagcaacaagggcguggacaccguguccgucggcaacacccuguacugcgugaacaagcaggagggcaagagccucuacgugaagggggagcccaucaucaacuucuacgacccgcuggucuuccccuccgacgaguucgacgccagcaucucccaggugaacgagaagaucaaccagagccuggccuucauccggaaguccgacgagcuccugcacaacgugaacgucggcaagagcaccacgaacaucaugaucaccaccaucaucaucgugaucaucgugauccugcugcuccugaucgccgucgggcuguuccucuacugcaaggcccgcuccacccccgugacgcugagcaaggaccagcuguccgggaucaacaacaucgcguucagcaacugaggacuaguguccaccugucccuccugggcugcuggauugucucguuuuccugccaaauaaacaggaucagcgcuuuacagaucuaaaaaaaaaaaaaaaaaaaaaaaaaaaaaaaaaaaaaaaaaaaaaaaaaaaaaaaaaaaaaaaaugcaucccccccccccccccccccccccccccccccaaaggcucuuuucagagccaccagaauu

SEQ ID NO: 16204 - RNA, 2057 nt, Artificial Sequence
  mRNA product Design b-1 comprising derived and/or modified sequence from HRSV(Memphis-37)__AIY60640.1__F_DSCav1_mut4 (opt1)
gggagacggagacggccugcaggaccugcucucucagcccucagccgaggccuacgccgagccgagugcgcagccgacgaccgggaggagccgcagccuucaacucugagguacugugauccgcgcugcccgccgggccgccccaguccgcugcugcggcaccuccuucccucgcgcccucuucgcucgccagcgccuucccugugagccugcgucaccgcggccgccaagcuuaccauggagcugcccauccucaagaccaacgccaucaccacgauccuggccgcggugacccugugcuucgccagcucccagaacaucaccgaggaguucuaccagagcacgugcuccgccgucagcaagggcuaccucuccgcccugcgcaccgggugguacaccagcgugaucaccaucgagcuguccaacaucaaggagaacaagugcaacggcaccgacgccaaggugaagcucaucaagcaggagcuggacaaguacaagaacgcggucacggagcugcagcuccugaugcagagcaccccggccgccggguccggcagcgccaucugcuccgggaucgcggugugcaaggugcugcaccucgagggcgaggucaacaagaucaagaacgcccugcugagcaccaacaaggccguggugucccucagcaacggcgucuccgugcugaccuucaaggugcuggaccucaagaacuacaucgacaagcagcugcugcccauccucaacaagcagagcugcuccaucagcaacaucgagacggucaucgaguuccagcagaagaacaaccggcugcuggagaucacccgcgaguucuccgugaacgccggggugaccacccccgucagcacguacaugcucaccaacagcgagcugcugucccucaucaacgacaugcccaucaccaacgaccagaagaagcugaugagcaacaacgugcagaucgugcggcagcaguccuacagcaucaugugcaucaucaaggaggagguccuggccuacguggugcagcucccgcuguacggcgucaucgacacccccugcuggaagcugcacacgagcccccucugcaccaccaacaccaaggagggguccaacaucugccugacgcgcaccgaccggggcugguacugcgacaacgcgggguccgugagcuucuucccccaggccgagaccugcaaggugcaguccaaccgcgucuucugcgacaccaugaacagccggacgcucccguccgaggugaaccugugcaacaucgacaucuucaaccccaaguacgacugcaagaucaugaccagcaagaccgacgucuccagcuccgugaucaccagccugggcgccaucguguccugcuacggcaagacgaagugcaccgccagcaacaagaaccgggggaucaucaagaccuucuccaacggcugcgacuacgucagcaacaaggggguggacaccgugagcgucggcaacacgcucuacugcgugaacaagcaggagggcaagucccuguacgugaagggggagcccaucaucaacuucuacgacccccuggucuucccgagcgacgaguucgacgccuccaucagccaggugaacgagaagaucaaccagucccucgcguucauccgcaagagcgacgagcugcugcacaacgugaacgucggcaaguccaccaccaacaucaugaucaccaccaucaucaucgugaucaucgugauccuccugcugcucaucgccgucgggcuguuccuguacugcaaggcccggagcacgcccgugacccuguccaaggaccagcucagcggcaucaacaacaucgccuucuccaacugaggacuaguguccaccugucccuccugggcugcuggauugucucguuuuccugccaaauaaacaggaucagcgcuuuacagaucuaaaaaaaaaaaaaaaaaaaaaaaaaaaaaaaaaaaaaaaaaaaaaaaaaaaaaaaaaaaaaaaaugcaucccccccccccccccccccccccccccccccaaaggcucuuuucagagccaccagaauu

SEQ ID NO: 16205 - RNA, 2057 nt, Artificial Sequence
  mRNA product Design b-1 comprising derived and/or modified sequence from HRSV(Memphis-37)__AIY60640.1__F_DSCav1_mut4 (opt2)
gggagacggagacggccugcaggaccugcucucucagcccucagccgaggccuacgccgagccgagugcgcagccgacgaccgggaggagccgcagccuucaacucugagguacugugauccgcgcugcccgccgggccgccccaguccgcugcugcggcaccuccuucccucgcgcccucuucgcucgccagcgccuucccugugagccugcgucaccgcggccgccaagcuuaccauggagcuccccauccucaagaccaacgccaucaccaccauccucgccgccgucacccucugcuucgccuccucccagaacaucaccgaggaguucuaccaguccaccugcuccgccgucuccaagggcuaccucuccgcccuccgcaccggcugguacaccuccgucaucaccaucgagcucuccaacaucaaggagaacaagugcaacggcaccgacgccaaggucaagcucaucaagcaggagcucgacaaguacaagaacgccgucaccgagcuccagcuccucaugcaguccacccccgccgccggcuccggcuccgccaucugcuccggcaucgccgucugcaagguccuccaccucgagggcgaggucaacaagaucaagaacgcccuccucuccaccaacaaggccgucgucucccucuccaacggcgucuccguccucaccuucaagguccucgaccucaagaacuacaucgacaagcagcuccuccccauccucaacaagcaguccugcuccaucuccaacaucgagaccgucaucgaguuccagcagaagaacaaccgccuccucgagaucacccgcgaguucuccgucaacgccggcgucaccacccccgucuccaccuacaugcucaccaacuccgagcuccucucccucaucaacgacaugcccaucaccaacgaccagaagaagcucauguccaacaacguccagaucguccgccagcaguccuacuccaucaugugcaucaucaaggaggagguccucgccuacgucguccagcucccccucuacggcgucaucgacacccccugcuggaagcuccacaccuccccccucugcaccaccaacaccaaggagggcuccaacaucugccucacccgcaccgaccgcggcugguacugcgacaacgccggcuccgucuccuucuucccccaggccgagaccugcaagguccaguccaaccgcgucuucugcgacaccaugaacucccgcacccuccccuccgaggucaaccucugcaacaucgacaucuucaaccccaaguacgacugcaagaucaugaccuccaagaccgacgucuccuccuccgucaucaccucccucggcgccaucgucuccugcuacggcaagaccaagugcaccgccuccaacaagaaccgcggcaucaucaagaccuucuccaacggcugcgacuacgucuccaacaagggcgucgacaccgucuccgucggcaacacccucuacugcgucaacaagcaggagggcaagucccucuacgucaagggcgagcccaucaucaacuucuacgacccccucgucuuccccuccgacgaguucgacgccuccaucucccaggucaacgagaagaucaaccagucccucgccuucauccgcaaguccgacgagcuccuccacaacgucaacgucggcaaguccaccaccaacaucaugaucaccaccaucaucaucgucaucaucgucauccuccuccuccucaucgccgucggccucuuccucuacugcaaggcccgcuccacccccgucacccucuccaaggaccagcucuccggcaucaacaacaucgccuucuccaacugaggacuaguguccaccugucccuccugggcugcuggauugucucguuuuccugccaaauaaacaggaucagcgcuuuacagaucuaaaaaaaaaaaaaaaaaaaaaaaaaaaaaaaaaaaaaaaaaaaaaaaaaaaaaaaaaaaaaaaaugcaucccccccccccccccccccccccccccccccaaaggcucuuuucagagccaccagaauu

SEQ ID NO: 16206 - RNA, 2057 nt, Artificial Sequence
  mRNA product Design b-1 comprising derived and/or modified sequence from HRSV(Memphis-37)__AIY60640.1__F_DSCav1_mut4 (opt3)
gggagacggagacggccugcaggaccugcucucucagcccucagccgaggccuacgccgagccgagugcgcagccgacgaccgggaggagccgcagccuucaacucugagguacugugauccgcgcugcccgccgggccgccccaguccgcugcugcggcaccuccuucccucgcgcccucuucgcucgccagcgccuucccugugagccugcgucaccgcggccgccaagcuuaccauggagcugcccauccucaagaccaacgccauuacaacuauacuugcugcagugacgcugugcuucgccagcucccagaauaucaccgaagaguuuuaccaaucuacauguucagcggucaguaaaggcuauuugagcgcuuuaagaacugggugguacaccuccguuauuacaaucgaacugucuaacauuaaggagaauaaaugcaacggaaccgacgccaaggugaaacuaaucaagcaggaacucgauaaguauaaaaaugcaguaacugagcugcagcuucugaugcagucgaccccugccgcugguucaggcagcgcaauauguagugggaucgccgugugcaaggucuugcaccucgagggagaagugaacaaaauuaagaaugcucugcuguccacaaacaaagccguugugucucucagcaauggcgucuccguguuaacguucaagguacuggaccuuaagaacuacaucgauaaacaauugcugccaauucuaaauaagcagucauguaguaucagcaacauagagacuguuauugaauuucagcagaaaaauaacaggcuccuggagaucacccgggaguucucugugaaugcgggugucacaacuccgguguccaccuauaugcuuacaaacucagaacuguugagccucauuaacgacaugcccaucaccaaugaucaaaagaaacugaugaguaacaaugugcagaucguccgccagcagucuuacuccauuaugugcauaaucaaggaggaaguuuuagcauaugugguacaacugccucucuacggggugauugacacgccauguuggaaacuucauacuagcccccugugcacaaccaacacuaaggagggaucgaauaucuguuugacacgaaccgaucguggcugguacugcgacaacgccggcucugucuccuuuuucccucaggcugaaacguguaaggugcagucaaauagaguguuuugcgauaccaugaacaguagaacacugccaagcgaggugaaucucugcaacauagacauuuucaaucccaaauaugauuguaagaucaugacuuccaaaaccgacgucucuagcucagugaucacaagucugggggccauuguauccugcuacggaaagacuaaauguaccgcaagcaacaagaauagggguaucauuaagacauuuucuaacggcugcgauuauguuucaaauaaagggguggacaccgucagugugggaaacacucuuuacugugucaacaagcaagagggcaaaagccuguaugugaagggugaaccuauaaucaauuucuacgacccauugguuuuuccguccgaugaguucgacgcuucuauuucgcagguuaacgagaaaaucaaucagagccucgccuuuauccggaaguccgaugaacuguuacacaacguaaaugucgggaagucaacgacaaacauuaugauaaccacuaucauuaucgugauuaucguuauacugcuacuccugaucgcggugggacuuuucuuguauugcaaagcccgcaguacccccgucacacugucuaaggaccagcucagcggcauuaauaacaucgcauucuccaauugaggacuaguguccaccugucccuccugggcugcuggauugucucguuuuccugccaaauaaacaggaucagcgcuuuacagaucuaaaaaaaaaaaaaaaaaaaaaaaaaaaaaaaaaaaaaaaaaaaaaaaaaaaaaaaaaaaaaaaaugcaucccccccccccccccccccccccccccccccaaaggcucuuuucagagccaccagaauu

SEQ ID NO: 16207 - RNA, 2057 nt, Artificial Sequence
  mRNA product Design b-1 comprising derived and/or modified sequence from HRSV(Memphis-37)__AIY60640.1__F_DSCav1_mut4 (opt4)
gggagacggagacggccugcaggaccugcucucucagcccucagccgaggccuacgccgagccgagugcgcagccgacgaccgggaggagccgcagccuucaacucugagguacugugauccgcgcugcccgccgggccgccccaguccgcugcugcggcaccuccuucccucgcgcccucuucgcucgccagcgccuucccugugagccugcgucaccgcggccgccaagcuuaccauggagcugcccauccugaagaccaacgccaucaccaccauccuggccgccgugacccugugcuucgccagcagccagaacaucaccgaggaguucuaccagagcaccugcagcgccgugagcaagggcuaccugagcgcccugagaaccggcugguacaccagcgugaucaccaucgagcugagcaacaucaaggagaacaagugcaacggcaccgacgccaaggugaagcugaucaagcaggagcuggacaaguacaagaacgccgugaccgagcugcagcugcugaugcagagcacccccgccgccggcagcggcagcgccaucugcagcggcaucgccgugugcaaggugcugcaccuggagggcgaggugaacaagaucaagaacgcccugcugagcaccaacaaggccguggugagccugagcaacggcgugagcgugcugaccuucaaggugcuggaccugaagaacuacaucgacaagcagcugcugcccauccugaacaagcagagcugcagcaucagcaacaucgagaccgugaucgaguuccagcagaagaacaacagacugcuggagaucaccagagaguucagcgugaacgccggcgugaccacccccgugagcaccuacaugcugaccaacagcgagcugcugagccugaucaacgacaugcccaucaccaacgaccagaagaagcugaugagcaacaacgugcagaucgugagacagcagagcuacagcaucaugugcaucaucaaggaggaggugcuggccuacguggugcagcugccccuguacggcgugaucgacacccccugcuggaagcugcacaccagcccccugugcaccaccaacaccaaggagggcagcaacaucugccugaccagaaccgacagaggcugguacugcgacaacgccggcagcgugagcuucuucccccaggccgagaccugcaaggugcagagcaacagaguguucugcgacaccaugaacagcagaacccugcccagcgaggugaaccugugcaacaucgacaucuucaaccccaaguacgacugcaagaucaugaccagcaagaccgacgugagcagcagcgugaucaccagccugggcgccaucgugagcugcuacggcaagaccaagugcaccgccagcaacaagaacagaggcaucaucaagaccuucagcaacggcugcgacuacgugagcaacaagggcguggacaccgugagcgugggcaacacccuguacugcgugaacaagcaggagggcaagagccuguacgugaagggcgagcccaucaucaacuucuacgacccccugguguuccccagcgacgaguucgacgccagcaucagccaggugaacgagaagaucaaccagagccuggccuucaucagaaagagcgacgagcugcugcacaacgugaacgugggcaagagcaccaccaacaucaugaucaccaccaucaucaucgugaucaucgugauccugcugcugcugaucgccgugggccuguuccuguacugcaaggccagaagcacccccgugacccugagcaaggaccagcugagcggcaucaacaacaucgccuucagcaacugaggacuaguguccaccugucccuccugggcugcuggauugucucguuuuccugccaaauaaacaggaucagcgcuuuacagaucuaaaaaaaaaaaaaaaaaaaaaaaaaaaaaaaaaaaaaaaaaaaaaaaaaaaaaaaaaaaaaaaaugcaucccccccccccccccccccccccccccccccaaaggcucuuuucagagccaccagaauu

SEQ ID NO: 16208 - RNA, 2057 nt, Artificial Sequence
  mRNA product Design b-1 comprising derived and/or modified sequence from HRSV(Memphis-37)__AIY60640.1__F_DSCav1_mut4 (opt5)
gggagacggagacggccugcaggaccugcucucucagcccucagccgaggccuacgccgagccgagugcgcagccgacgaccgggaggagccgcagccuucaacucugagguacugugauccgcgcugcccgccgggccgccccaguccgcugcugcggcaccuccuucccucgcgcccucuucgcucgccagcgccuucccugugagccugcgucaccgcggccgccaagcuuaccauggagcugcccauccucaagaccaacgccauuacaacgauccuggcugccgugacccuuugcuucgcgagcucccagaauauuacagaagaguuuuaccaaucuaccuguagcgcugucuccaaaggcuaucugucugcccucagaacagggugguacaccagcguuaucacaauugaacuguccaacaucaaggagaauaaaugcaacggaaccgacgccaaggugaaacuuaucaagcaggaacuggauaaguauaaaaaugcugugacggagcuccagcugcugaugcagucuaccccugccgcuggcagcggguccgccauuuguagcggaaucgcggucugcaaggugcuccaccuggagggcgaaguuaacaaaauuaagaaugcccuucugucuacaaacaaagcuguggucucccucagcaauggggugucuguucugaccuucaaggugcuugaccugaagaacuacaucgauaaacaacuccugccgauucugaauaagcaguccuguagcaucucuaacauugagacagucaucgaauuucagcagaaaaauaaccggcuccuggagaucacccgcgaguucuccgugaaugccggagugacgacacccgucagcaccuauaugcuuacaaacuccgaacugcucucucugauuaacgacaugccuaucaccaaugaucaaaagaaacuuaugagcaacaauguucagauugugagacagcaguccuacagcaucaugugcauuaucaaggaggaagugcuggcuuaugucgugcaacucccccuguacggcguuaucgacaccccuuguuggaaacugcauacaucuccccucugcacgaccaacacaaaggagggcuccaauauuugucugacccggacagaucgcgggugguacugcgacaacgccggaagcgugagcuuuuucccucaggcggaaaccuguaagguccagucuaauagaguguuuugcgauacgaugaacuccagaacacugccgucugagguuaaucucugcaacaucgacauuuucaaucccaaauaugauuguaagaucaugaccagcaaaaccgacguguccagcucugucauuacaucccugggcgccaucgugagcugcuacgggaagaccaaauguacagcuucuaacaagaaucggggaaucauuaagacguuuuccaacggcugcgauuaugucagcaauaaagggguggacaccguuuccgugggaaacacacuuuacugugucaacaagcaagagggcaaaucucuguaugugaagggcgaaccuaucauuaauuucuacgacccccucguuuuuccuagcgaugaguucgacgccuccaucucucaggugaacgaaaagauuaaucagagccuggcuuuuauccgcaaguccgaugagcugcuccacaacgucaauguggggaaaagcaccacaaacauuaugaucaccacgaucauuaucgugauuaucguuauucugcuucugcucaucgccgucggacuguuccuguauugcaaagccagaucuacccccgugacacuuuccaaggaccagcucagcggcaucaauaacauugcuuucucuaauugaggacuaguguccaccugucccuccugggcugcuggauugucucguuuuccugccaaauaaacaggaucagcgcuuuacagaucuaaaaaaaaaaaaaaaaaaaaaaaaaaaaaaaaaaaaaaaaaaaaaaaaaaaaaaaaaaaaaaaaugcaucccccccccccccccccccccccccccccccaaaggcucuuuucagagccaccagaauu

SEQ ID NO: 16209 - RNA, 2057 nt, Artificial Sequence
  mRNA product Design b-1 comprising derived and/or modified sequence from HRSV(Memphis-37)__AIY60640.1__F_DSCav1_mut4 (opt6)
gggagacggagacggccugcaggaccugcucucucagcccucagccgaggccuacgccgagccgagugcgcagccgacgaccgggaggagccgcagccuucaacucugagguacugugauccgcgcugcccgccgggccgccccaguccgcugcugcggcaccuccuucccucgcgcccucuucgcucgccagcgccuucccugugagccugcgucaccgcggccgccaagcuuaccauggaacucccaauccuaaaaacaaacgcaauaacaacaauauuagcagccguaacacucuguuucgccucaucccaaaacauaacagaagaauuuuaucaaucuacauguuccgccgucaguaaaggauaucuaucagccuuaagaacaggcugguacacaucaguaaucaccauagaauuauccaacauaaaagaaaacaaaugcaauggcacagaugccaaaguaaaacuaaucaaacaagaacuugauaaauauaaaaacgcaguaacagaauuacaauuauuaaugcaaagcacaccagccgcaggaucaggaucagcaauauguucaggaauagcagucuguaaaguacuacacuuagaaggagaaguaaacaaaauuaaaaacgcauuacuaagcaccaauaaagcaguaguaucacuaucaaacggcguauccguauuaacguucaaaguccucgaccugaaaaacuacauagauaaacaacuacuaccaauacuaaauaaacaaucaugcucaauaucaaacauagaaacuguuaucgaauuucaacagaaaaauaaccgacuacuagaaaucaccagagaauuuucaguaaacgcaggcgucacuacaccaguauccacauacaugcuaaccaacucggaauuacuuucccucauaaacgacaugccaauaacaaacgaccaaaagaaacuuaugucaaacaacguucaaauaguccgccaacaaucauacucaauaauguguaucauaaaagaagaaguccuagcauaugucguacaacuaccauuauacggaguaauugacacaccuugcuggaaacuacacacauccccacuauguacaacaaacacuaaagaaggaucaaacaucugccuaaccagaacagacagaggcugguauugcgacaacgcaggaucaguaucauucuucccacaagcagaaacaugcaaaguacaaucaaacagagucuucugcgacaccaugaacagcagaacccucccauccgaaguaaacuuaugcaacaucgauaucuucaacccaaaauacgacuguaaaauaaugacaucaaaaacagacguuucauccucaguaauaacaucauuaggugccauaguuucauguuacggaaaaaccaaauguaccgcaucaaacaaaaacagaggcauuauuaaaacauucucuaacggaugcgacuaugucaguaacaaaggaguagacacaguaucagucggaaacacauuauauugcguaaauaaacaagaaggaaaaagucuauacguaaaaggagaaccaauaauaaacuuuuacgacccucucguauucccaucagacgaauuugaugcauccauaucacaagucaacgaaaagauaaaccaaucccuagcauucauaagaaaaucagacgaacuacuccauaacguaaacguaggaaaaagcacaaccaauauaaugauaaccacaauaaucauaguaauaauagucauauuauuacuuuuaauugcaguaggacucuuucuauacugcaaagcaagaagcacaccaguaacacuaagcaaagaccaacuaucaggcaucaacaauaucgccuuuucaaauuaaggacuaguguccaccugucccuccugggcugcuggauugucucguuuuccugccaaauaaacaggaucagcgcuuuacagaucuaaaaaaaaaaaaaaaaaaaaaaaaaaaaaaaaaaaaaaaaaaaaaaaaaaaaaaaaaaaaaaaaugcaucccccccccccccccccccccccccccccccaaaggcucuuuucagagccaccagaauu

SEQ ID NO: 16210 - RNA, 2057 nt, Artificial Sequence
  mRNA product Design b-1 comprising derived and/or modified sequence from HRSV(Memphis-37)__AIY60640.1__F_DSCav1_mut4 (opt11)
gggagacggagacggccugcaggaccugcucucucagcccucagccgaggccuacgccgagccgagugcgcagccgacgaccgggaggagccgcagccuucaacucugagguacugugauccgcgcugcccgccgggccgccccaguccgcugcugcggcaccuccuucccucgcgcccucuucgcucgccagcgccuucccugugagccugcgucaccgcggccgccaagcuuaccauggagcugcccauccucaagaccaacgccaucaccacgauccuggccgcggugacccugugcuucgcgagcucccagaacaucaccgaggaguucuaccagagcacgugcuccgccgucagcaagggcuaccucuccgcccugcgcaccgggugguacaccagcgugaucaccaucgagcuguccaacaucaaggagaacaagugcaacggcaccgacgccaaggugaaacucaucaagcaggagcuggacaaguacaagaacgccgucaccgagcugcagcuccugaugcagagcaccccggccgccggguccggcagcgcuaucugcuccgggaucgcggugugcaaggugcugcaccucgagggcgaggucaacaagaucaagaaugcccugcugagcaccaacaaggccguggugucccucagcaacggagucagcgugcuuaccuucaaggugcuggaccucaagaacuacaucgacaagcagcugcugccuauccucaacaagcagagcugcuccaucagcaacaucgagacggucaucgaguuccagcagaagaacaaccggcugcuggagaucacccgcgaguucuccgugaacgccggggugaccacccccgucagcacguacaugcucaccaacagcgaacugcugucccucaucaacgacaugcccaucaccaacgaccagaagaagcugaugagcaacaacgugcagaucgugcggcagcaguccuacagcaucaugugcaucaucaaggaggaaguccuggccuacguggugcagcucccucuguacggcgucaucgacacccccugcuggaagcugcacacgagcccccucugcaccaccaacaccaaggagggguccaacaucugccugacgcgcaccgaccggggcugguacugcgacaacgcgggguccgugagcuucuucccccaggccgagaccugcaaggugcagagcaaccgcgucuucugcgacacuaugaacagcagaacgcucccguccgaggugaaccugugcaacauagacauauucaaccccaaguacgacugcaagaucaugaccagcaagaccgacgucuccagcuccgugauuaccagccugggcgcaaucguguccugcuacggcaagacgaagugcaccgccagcaacaagaaccgggggaucaucaagaccuucuccaacggcugcgacuaugucagcaacaaggggguggacaccgugagcgucggaaacacgcucuacugcgugaacaagcaagagggcaaguccuuauacgugaagggggagcccaucaucaacuucuacgacccccuggucuucccgagcgacgaguucgacgccagcauaagccaggugaacgagaagaucaaccagucccucgcguucauccgcaagagcgacgagcugcugcacaacgugaacgucggcaaguccaccaccaacaucaugaucaccaccaucaucaucgugaucaucgugauccuccugcugcucaucgccgucgggcuguuccuguacugcaaggcccggagcacgcccgugaccuuguccaaggaccagcucagcggcaucaacaacaucgccuucuccaacugaggacuaguguccaccugucccuccugggcugcuggauugucucguuuuccugccaaauaaacaggaucagcgcuuuacagaucuaaaaaaaaaaaaaaaaaaaaaaaaaaaaaaaaaaaaaaaaaaaaaaaaaaaaaaaaaaaaaaaaugcaucccccccccccccccccccccccccccccccaaaggcucuuuucagagccaccagaauu

SEQ ID NO: 16211 - RNA, 1877 nt, Artificial Sequence
  mRNA product Design b-2 comprising derived and/or modified sequence from HRSV(Memphis-37)__AIY60640.1__F_DSCav1_mut4 (opt1)
gggagagccucugcuggaguccggggaguggcguuggcugcuagagcgaagcuuaccauggagcugcccauccucaagaccaacgccaucaccacgauccuggccgcggugacccugugcuucgccagcucccagaacaucaccgaggaguucuaccagagcacgugcuccgccgucagcaagggcuaccucuccgcccugcgcaccgggugguacaccagcgugaucaccaucgagcuguccaacaucaaggagaacaagugcaacggcaccgacgccaaggugaagcucaucaagcaggagcuggacaaguacaagaacgcggucacggagcugcagcuccugaugcagagcaccccggccgccggcuccgggagcgcgaucugcuccggcaucgccgucugcaaggugcugcaccucgagggcgaggugaacaagaucaagaacgcccugcuguccaccaacaaggccgucgugagccucuccaacggggugagcguccugaccuucaaggugcuggaccucaagaacuacaucgacaagcagcugcugcccauccugaacaagcagagcugcuccaucagcaacaucgagaccgucaucgaguuccagcagaagaacaaccgccuccuggagaucacgcgggaguucagcgugaacgcgggcgugaccacccccgucuccaccuacaugcugacgaacagcgagcuccugucccugaucaacgacaugccgaucaccaacgaccagaagaagcucaugagcaacaacgugcagaucgugcgccagcaguccuacagcaucaugugcaucaucaaggaggagguccuggccuacguggugcagcugccccucuacggggucaucgacacccccugcuggaagcugcacaccagcccccugugcacgaccaacaccaaggagggcuccaacaucugccucacccggacggaccgcgggugguacugcgacaacgccggcagcguguccuucuucccgcaggccgagaccugcaagguccagagcaaccggguguucugcgacaccaugaacucccggacccugcccagcgaggugaaccucugcaacaucgacaucuucaaccccaaguacgacugcaagaucaugacguccaagaccgacgucagcuccagcgugaucaccucccugggcgccaucgugagcugcuacgggaagaccaagugcacggcgagcaacaagaaccgcggcaucaucaagaccuucuccaacgggugcgacuacgucagcaacaagggcguggacaccguguccgucggcaacacccuguacugcgugaacaagcaggagggcaagagccucuacgugaagggggagcccaucaucaacuucuacgacccgcuggucuuccccuccgacgaguucgacgccagcaucucccaggugaacgagaagaucaaccagagccuggccuucauccggaaguccgacgagcuccugcacaacgugaacgucggcaagagcaccacgaacaucaugaucaccaccaucaucaucgugaucaucgugauccugcugcuccugaucgccgucgggcuguuccucuacugcaaggcccgcuccacccccgugacgcugagcaaggaccagcuguccgggaucaacaacaucgcguucagcaacugaggacuaguguccaccugucccuccugggcugcuggauugucucguuuuccugccaaauaaacaggaucagcgcuuuacagaucuaaaaaaaaaaaaaaaaaaaaaaaaaaaaaaaaaaaaaaaaaaaaaaaaaaaaaaaaaaaaaaaaugcaucccccccccccccccccccccccccccccccaaaggcucuuuucagagccaccagaauu

SEQ ID NO: 16212 - RNA, 1877 nt, Artificial Sequence
  mRNA product Design b-2 comprising derived and/or modified sequence from HRSV(Memphis-37)__AIY60640.1__F_DSCav1_mut4 (opt1)
gggagagccucugcuggaguccggggaguggcguuggcugcuagagcgaagcuuaccauggagcugcccauccucaagaccaacgccaucaccacgauccuggccgcggugacccugugcuucgccagcucccagaacaucaccgaggaguucuaccagagcacgugcuccgccgucagcaagggcuaccucuccgcccugcgcaccgggugguacaccagcgugaucaccaucgagcuguccaacaucaaggagaacaagugcaacggcaccgacgccaaggugaagcucaucaagcaggagcuggacaaguacaagaacgcggucacggagcugcagcuccugaugcagagcaccccggccgccggguccggcagcgccaucugcuccgggaucgcggugugcaaggugcugcaccucgagggcgaggucaacaagaucaagaacgcccugcugagcaccaacaaggccguggugucccucagcaacggcgucuccgugcugaccuucaaggugcuggaccucaagaacuacaucgacaagcagcugcugcccauccucaacaagcagagcugcuccaucagcaacaucgagacggucaucgaguuccagcagaagaacaaccggcugcuggagaucacccgcgaguucuccgugaacgccggggugaccacccccgucagcacguacaugcucaccaacagcgagcugcugucccucaucaacgacaugcccaucaccaacgaccagaagaagcugaugagcaacaacgugcagaucgugcggcagcaguccuacagcaucaugugcaucaucaaggaggagguccuggccuacguggugcagcucccgcuguacggcgucaucgacacccccugcuggaagcugcacacgagcccccucugcaccaccaacaccaaggagggguccaacaucugccugacgcgcaccgaccggggcugguacugcgacaacgcgggguccgugagcuucuucccccaggccgagaccugcaaggugcaguccaaccgcgucuucugcgacaccaugaacagccggacgcucccguccgaggugaaccugugcaacaucgacaucuucaaccccaaguacgacugcaagaucaugaccagcaagaccgacgucuccagcuccgugaucaccagccugggcgccaucguguccugcuacggcaagacgaagugcaccgccagcaacaagaaccgggggaucaucaagaccuucuccaacggcugcgacuacgucagcaacaaggggguggacaccgugagcgucggcaacacgcucuacugcgugaacaagcaggagggcaagucccuguacgugaagggggagcccaucaucaacuucuacgacccccuggucuucccgagcgacgaguucgacgccuccaucagccaggugaacgagaagaucaaccagucccucgcguucauccgcaagagcgacgagcugcugcacaacgugaacgucggcaaguccaccaccaacaucaugaucaccaccaucaucaucgugaucaucgugauccuccugcugcucaucgccgucgggcuguuccuguacugcaaggcccggagcacgcccgugacccuguccaaggaccagcucagcggcaucaacaacaucgccuucuccaacugaggacuaguguccaccugucccuccugggcugcuggauugucucguuuuccugccaaauaaacaggaucagcgcuuuacagaucuaaaaaaaaaaaaaaaaaaaaaaaaaaaaaaaaaaaaaaaaaaaaaaaaaaaaaaaaaaaaaaaaugcaucccccccccccccccccccccccccccccccaaaggcucuuuucagagccaccagaauu

SEQ ID NO: 16213 - RNA, 1877 nt, Artificial Sequence
  mRNA product Design b-2 comprising derived and/or modified sequence from HRSV(Memphis-37)__AIY60640.1__F_DSCav1_mut4 (opt2)
gggagagccucugcuggaguccggggaguggcguuggcugcuagagcgaagcuuaccauggagcuccccauccucaagaccaacgccaucaccaccauccucgccgccgucacccucugcuucgccuccucccagaacaucaccgaggaguucuaccaguccaccugcuccgccgucuccaagggcuaccucuccgcccuccgcaccggcugguacaccuccgucaucaccaucgagcucuccaacaucaaggagaacaagugcaacggcaccgacgccaaggucaagcucaucaagcaggagcucgacaaguacaagaacgccgucaccgagcuccagcuccucaugcaguccacccccgccgccggcuccggcuccgccaucugcuccggcaucgccgucugcaagguccuccaccucgagggcgaggucaacaagaucaagaacgcccuccucuccaccaacaaggccgucgucucccucuccaacggcgucuccguccucaccuucaagguccucgaccucaagaacuacaucgacaagcagcuccuccccauccucaacaagcaguccugcuccaucuccaacaucgagaccgucaucgaguuccagcagaagaacaaccgccuccucgagaucacccgcgaguucuccgucaacgccggcgucaccacccccgucuccaccuacaugcucaccaacuccgagcuccucucccucaucaacgacaugcccaucaccaacgaccagaagaagcucauguccaacaacguccagaucguccgccagcaguccuacuccaucaugugcaucaucaaggaggagguccucgccuacgucguccagcucccccucuacggcgucaucgacacccccugcuggaagcuccacaccuccccccucugcaccaccaacaccaaggagggcuccaacaucugccucacccgcaccgaccgcggcugguacugcgacaacgccggcuccgucuccuucuucccccaggccgagaccugcaagguccaguccaaccgcgucuucugcgacaccaugaacucccgcacccuccccuccgaggucaaccucugcaacaucgacaucuucaaccccaaguacgacugcaagaucaugaccuccaagaccgacgucuccuccuccgucaucaccucccucggcgccaucgucuccugcuacggcaagaccaagugcaccgccuccaacaagaaccgcggcaucaucaagaccuucuccaacggcugcgacuacgucuccaacaagggcgucgacaccgucuccgucggcaacacccucuacugcgucaacaagcaggagggcaagucccucuacgucaagggcgagcccaucaucaacuucuacgacccccucgucuuccccuccgacgaguucgacgccuccaucucccaggucaacgagaagaucaaccagucccucgccuucauccgcaaguccgacgagcuccuccacaacgucaacgucggcaaguccaccaccaacaucaugaucaccaccaucaucaucgucaucaucgucauccuccuccuccucaucgccgucggccucuuccucuacugcaaggcccgcuccacccccgucacccucuccaaggaccagcucuccggcaucaacaacaucgccuucuccaacugaggacuaguguccaccugucccuccugggcugcuggauugucucguuuuccugccaaauaaacaggaucagcgcuuuacagaucuaaaaaaaaaaaaaaaaaaaaaaaaaaaaaaaaaaaaaaaaaaaaaaaaaaaaaaaaaaaaaaaaugcaucccccccccccccccccccccccccccccccaaaggcucuuuucagagccaccagaauu

SEQ ID NO: 16214 - RNA, 1877 nt, Artificial Sequence
  mRNA product Design b-2 comprising derived and/or modified sequence from HRSV(Memphis-37)__AIY60640.1__F_DSCav1_mut4 (opt3)
gggagagccucugcuggaguccggggaguggcguuggcugcuagagcgaagcuuaccauggagcugcccauccucaagaccaacgccauuacaacuauacuugcugcagugacgcugugcuucgccagcucccagaauaucaccgaagaguuuuaccaaucuacauguucagcggucaguaaaggcuauuugagcgcuuuaagaacugggugguacaccuccguuauuacaaucgaacugucuaacauuaaggagaauaaaugcaacggaaccgacgccaaggugaaacuaaucaagcaggaacucgauaaguauaaaaaugcaguaacugagcugcagcuucugaugcagucgaccccugccgcugguucaggcagcgcaauauguagugggaucgccgugugcaaggucuugcaccucgagggagaagugaacaaaauuaagaaugcucugcuguccacaaacaaagccguugugucucucagcaauggcgucuccguguuaacguucaagguacuggaccuuaagaacuacaucgauaaacaauugcugccaauucuaaauaagcagucauguaguaucagcaacauagagacuguuauugaauuucagcagaaaaauaacaggcuccuggagaucacccgggaguucucugugaaugcgggugucacaacuccgguguccaccuauaugcuuacaaacucagaacuguugagccucauuaacgacaugcccaucaccaaugaucaaaagaaacugaugaguaacaaugugcagaucguccgccagcagucuuacuccauuaugugcauaaucaaggaggaaguuuuagcauaugugguacaacugccucucuacggggugauugacacgccauguuggaaacuucauacuagcccccugugcacaaccaacacuaaggagggaucgaauaucuguuugacacgaaccgaucguggcugguacugcgacaacgccggcucugucuccuuuuucccucaggcugaaacguguaaggugcagucaaauagaguguuuugcgauaccaugaacaguagaacacugccaagcgaggugaaucucugcaacauagacauuuucaaucccaaauaugauuguaagaucaugacuuccaaaaccgacgucucuagcucagugaucacaagucugggggccauuguauccugcuacggaaagacuaaauguaccgcaagcaacaagaauagggguaucauuaagacauuuucuaacggcugcgauuauguuucaaauaaagggguggacaccgucagugugggaaacacucuuuacugugucaacaagcaagagggcaaaagccuguaugugaagggugaaccuauaaucaauuucuacgacccauugguuuuuccguccgaugaguucgacgcuucuauuucgcagguuaacgagaaaaucaaucagagccucgccuuuauccggaaguccgaugaacuguuacacaacguaaaugucgggaagucaacgacaaacauuaugauaaccacuaucauuaucgugauuaucguuauacugcuacuccugaucgcggugggacuuuucuuguauugcaaagcccgcaguacccccgucacacugucuaaggaccagcucagcggcauuaauaacaucgcauucuccaauugaggacuaguguccaccugucccuccugggcugcuggauugucucguuuuccugccaaauaaacaggaucagcgcuuuacagaucuaaaaaaaaaaaaaaaaaaaaaaaaaaaaaaaaaaaaaaaaaaaaaaaaaaaaaaaaaaaaaaaaugcaucccccccccccccccccccccccccccccccaaaggcucuuuucagagccaccagaauu

SEQ ID NO: 16215 - RNA, 1877 nt, Artificial Sequence
  mRNA product Design b-2 comprising derived and/or modified sequence from HRSV(Memphis-37)__AIY60640.1__F_DSCav1_mut4 (opt4)
gggagagccucugcuggaguccggggaguggcguuggcugcuagagcgaagcuuaccauggagcugcccauccugaagaccaacgccaucaccaccauccuggccgccgugacccugugcuucgccagcagccagaacaucaccgaggaguucuaccagagcaccugcagcgccgugagcaagggcuaccugagcgcccugagaaccggcugguacaccagcgugaucaccaucgagcugagcaacaucaaggagaacaagugcaacggcaccgacgccaaggugaagcugaucaagcaggagcuggacaaguacaagaacgccgugaccgagcugcagcugcugaugcagagcacccccgccgccggcagcggcagcgccaucugcagcggcaucgccgugugcaaggugcugcaccuggagggcgaggugaacaagaucaagaacgcccugcugagcaccaacaaggccguggugagccugagcaacggcgugagcgugcugaccuucaaggugcuggaccugaagaacuacaucgacaagcagcugcugcccauccugaacaagcagagcugcagcaucagcaacaucgagaccgugaucgaguuccagcagaagaacaacagacugcuggagaucaccagagaguucagcgugaacgccggcgugaccacccccgugagcaccuacaugcugaccaacagcgagcugcugagccugaucaacgacaugcccaucaccaacgaccagaagaagcugaugagcaacaacgugcagaucgugagacagcagagcuacagcaucaugugcaucaucaaggaggaggugcuggccuacguggugcagcugccccuguacggcgugaucgacacccccugcuggaagcugcacaccagcccccugugcaccaccaacaccaaggagggcagcaacaucugccugaccagaaccgacagaggcugguacugcgacaacgccggcagcgugagcuucuucccccaggccgagaccugcaaggugcagagcaacagaguguucugcgacaccaugaacagcagaacccugcccagcgaggugaaccugugcaacaucgacaucuucaaccccaaguacgacugcaagaucaugaccagcaagaccgacgugagcagcagcgugaucaccagccugggcgccaucgugagcugcuacggcaagaccaagugcaccgccagcaacaagaacagaggcaucaucaagaccuucagcaacggcugcgacuacgugagcaacaagggcguggacaccgugagcgugggcaacacccuguacugcgugaacaagcaggagggcaagagccuguacgugaagggcgagcccaucaucaacuucuacgacccccugguguuccccagcgacgaguucgacgccagcaucagccaggugaacgagaagaucaaccagagccuggccuucaucagaaagagcgacgagcugcugcacaacgugaacgugggcaagagcaccaccaacaucaugaucaccaccaucaucaucgugaucaucgugauccugcugcugcugaucgccgugggccuguuccuguacugcaaggccagaagcacccccgugacccugagcaaggaccagcugagcggcaucaacaacaucgccuucagcaacugaggacuaguguccaccugucccuccugggcugcuggauugucucguuuuccugccaaauaaacaggaucagcgcuuuacagaucuaaaaaaaaaaaaaaaaaaaaaaaaaaaaaaaaaaaaaaaaaaaaaaaaaaaaaaaaaaaaaaaaugcaucccccccccccccccccccccccccccccccaaaggcucuuuucagagccaccagaauu

SEQ ID NO: 16216 - RNA, 1877 nt, Artificial Sequence
  mRNA product Design b-2 comprising derived and/or modified sequence from HRSV(Memphis-37)__AIY60640.1__F_DSCav1_mut4 (opt5)
gggagagccucugcuggaguccggggaguggcguuggcugcuagagcgaagcuuaccauggagcugcccauccucaagaccaacgccauuacaacgauccuggcugccgugacccuuugcuucgcgagcucccagaauauuacagaagaguuuuaccaaucuaccuguagcgcugucuccaaaggcuaucugucugcccucagaacagggugguacaccagcguuaucacaauugaacuguccaacaucaaggagaauaaaugcaacggaaccgacgccaaggugaaacuuaucaagcaggaacuggauaaguauaaaaaugcugugacggagcuccagcugcugaugcagucuaccccugccgcuggcagcggguccgccauuuguagcggaaucgcggucugcaaggugcuccaccuggagggcgaaguuaacaaaauuaagaaugcccuucugucuacaaacaaagcuguggucucccucagcaauggggugucuguucugaccuucaaggugcuugaccugaagaacuacaucgauaaacaacuccugccgauucugaauaagcaguccuguagcaucucuaacauugagacagucaucgaauuucagcagaaaaauaaccggcuccuggagaucacccgcgaguucuccgugaaugccggagugacgacacccgucagcaccuauaugcuuacaaacuccgaacugcucucucugauuaacgacaugccuaucaccaaugaucaaaagaaacuuaugagcaacaauguucagauugugagacagcaguccuacagcaucaugugcauuaucaaggaggaagugcuggcuuaugucgugcaacucccccuguacggcguuaucgacaccccuuguuggaaacugcauacaucuccccucugcacgaccaacacaaaggagggcuccaauauuugucugacccggacagaucgcgggugguacugcgacaacgccggaagcgugagcuuuuucccucaggcggaaaccuguaagguccagucuaauagaguguuuugcgauacgaugaacuccagaacacugccgucugagguuaaucucugcaacaucgacauuuucaaucccaaauaugauuguaagaucaugaccagcaaaaccgacguguccagcucugucauuacaucccugggcgccaucgugagcugcuacgggaagaccaaauguacagcuucuaacaagaaucggggaaucauuaagacguuuuccaacggcugcgauuaugucagcaauaaagggguggacaccguuuccgugggaaacacacuuuacugugucaacaagcaagagggcaaaucucuguaugugaagggcgaaccuaucauuaauuucuacgacccccucguuuuuccuagcgaugaguucgacgccuccaucucucaggugaacgaaaagauuaaucagagccuggcuuuuauccgcaaguccgaugagcugcuccacaacgucaauguggggaaaagcaccacaaacauuaugaucaccacgaucauuaucgugauuaucguuauucugcuucugcucaucgccgucggacuguuccuguauugcaaagccagaucuacccccgugacacuuuccaaggaccagcucagcggcaucaauaacauugcuuucucuaauugaggacuaguguccaccugucccuccugggcugcuggauugucucguuuuccugccaaauaaacaggaucagcgcuuuacagaucuaaaaaaaaaaaaaaaaaaaaaaaaaaaaaaaaaaaaaaaaaaaaaaaaaaaaaaaaaaaaaaaaugcaucccccccccccccccccccccccccccccccaaaggcucuuuucagagccaccagaauu

SEQ ID NO: 16217 - RNA, 1877 nt, Artificial Sequence
  mRNA product Design b-2 comprising derived and/or modified sequence from HRSV(Memphis-37)__AIY60640.1__F_DSCav1_mut4 (opt6)
gggagagccucugcuggaguccggggaguggcguuggcugcuagagcgaagcuuaccauggaacucccaauccuaaaaacaaacgcaauaacaacaauauuagcagccguaacacucuguuucgccucaucccaaaacauaacagaagaauuuuaucaaucuacauguuccgccgucaguaaaggauaucuaucagccuuaagaacaggcugguacacaucaguaaucaccauagaauuauccaacauaaaagaaaacaaaugcaauggcacagaugccaaaguaaaacuaaucaaacaagaacuugauaaauauaaaaacgcaguaacagaauuacaauuauuaaugcaaagcacaccagccgcaggaucaggaucagcaauauguucaggaauagcagucuguaaaguacuacacuuagaaggagaaguaaacaaaauuaaaaacgcauuacuaagcaccaauaaagcaguaguaucacuaucaaacggcguauccguauuaacguucaaaguccucgaccugaaaaacuacauagauaaacaacuacuaccaauacuaaauaaacaaucaugcucaauaucaaacauagaaacuguuaucgaauuucaacagaaaaauaaccgacuacuagaaaucaccagagaauuuucaguaaacgcaggcgucacuacaccaguauccacauacaugcuaaccaacucggaauuacuuucccucauaaacgacaugccaauaacaaacgaccaaaagaaacuuaugucaaacaacguucaaauaguccgccaacaaucauacucaauaauguguaucauaaaagaagaaguccuagcauaugucguacaacuaccauuauacggaguaauugacacaccuugcuggaaacuacacacauccccacuauguacaacaaacacuaaagaaggaucaaacaucugccuaaccagaacagacagaggcugguauugcgacaacgcaggaucaguaucauucuucccacaagcagaaacaugcaaaguacaaucaaacagagucuucugcgacaccaugaacagcagaacccucccauccgaaguaaacuuaugcaacaucgauaucuucaacccaaaauacgacuguaaaauaaugacaucaaaaacagacguuucauccucaguaauaacaucauuaggugccauaguuucauguuacggaaaaaccaaauguaccgcaucaaacaaaaacagaggcauuauuaaaacauucucuaacggaugcgacuaugucaguaacaaaggaguagacacaguaucagucggaaacacauuauauugcguaaauaaacaagaaggaaaaagucuauacguaaaaggagaaccaauaauaaacuuuuacgacccucucguauucccaucagacgaauuugaugcauccauaucacaagucaacgaaaagauaaaccaaucccuagcauucauaagaaaaucagacgaacuacuccauaacguaaacguaggaaaaagcacaaccaauauaaugauaaccacaauaaucauaguaauaauagucauauuauuacuuuuaauugcaguaggacucuuucuauacugcaaagcaagaagcacaccaguaacacuaagcaaagaccaacuaucaggcaucaacaauaucgccuuuucaaauuaaggacuaguguccaccugucccuccugggcugcuggauugucucguuuuccugccaaauaaacaggaucagcgcuuuacagaucuaaaaaaaaaaaaaaaaaaaaaaaaaaaaaaaaaaaaaaaaaaaaaaaaaaaaaaaaaaaaaaaaugcaucccccccccccccccccccccccccccccccaaaggcucuuuucagagccaccagaauu

SEQ ID NO: 16218 - RNA, 1877 nt, Artificial Sequence
  mRNA product Design b-2 comprising derived and/or modified sequence from HRSV(Memphis-37)__AIY60640.1__F_DSCav1_mut4 (opt11)
gggagagccucugcuggaguccggggaguggcguuggcugcuagagcgaagcuuaccauggagcugcccauccucaagaccaacgccaucaccacgauccuggccgcggugacccugugcuucgcgagcucccagaacaucaccgaggaguucuaccagagcacgugcuccgccgucagcaagggcuaccucuccgcccugcgcaccgggugguacaccagcgugaucaccaucgagcuguccaacaucaaggagaacaagugcaacggcaccgacgccaaggugaaacucaucaagcaggagcuggacaaguacaagaacgccgucaccgagcugcagcuccugaugcagagcaccccggccgccggguccggcagcgcuaucugcuccgggaucgcggugugcaaggugcugcaccucgagggcgaggucaacaagaucaagaaugcccugcugagcaccaacaaggccguggugucccucagcaacggagucagcgugcuuaccuucaaggugcuggaccucaagaacuacaucgacaagcagcugcugccuauccucaacaagcagagcugcuccaucagcaacaucgagacggucaucgaguuccagcagaagaacaaccggcugcuggagaucacccgcgaguucuccgugaacgccggggugaccacccccgucagcacguacaugcucaccaacagcgaacugcugucccucaucaacgacaugcccaucaccaacgaccagaagaagcugaugagcaacaacgugcagaucgugcggcagcaguccuacagcaucaugugcaucaucaaggaggaaguccuggccuacguggugcagcucccucuguacggcgucaucgacacccccugcuggaagcugcacacgagcccccucugcaccaccaacaccaaggagggguccaacaucugccugacgcgcaccgaccggggcugguacugcgacaacgcgggguccgugagcuucuucccccaggccgagaccugcaaggugcagagcaaccgcgucuucugcgacacuaugaacagcagaacgcucccguccgaggugaaccugugcaacauagacauauucaaccccaaguacgacugcaagaucaugaccagcaagaccgacgucuccagcuccgugauuaccagccugggcgcaaucguguccugcuacggcaagacgaagugcaccgccagcaacaagaaccgggggaucaucaagaccuucuccaacggcugcgacuaugucagcaacaaggggguggacaccgugagcgucggaaacacgcucuacugcgugaacaagcaagagggcaaguccuuauacgugaagggggagcccaucaucaacuucuacgacccccuggucuucccgagcgacgaguucgacgccagcauaagccaggugaacgagaagaucaaccagucccucgcguucauccgcaagagcgacgagcugcugcacaacgugaacgucggcaaguccaccaccaacaucaugaucaccaccaucaucaucgugaucaucgugauccuccugcugcucaucgccgucgggcuguuccuguacugcaaggcccggagcacgcccgugaccuuguccaaggaccagcucagcggcaucaacaacaucgccuucuccaacugaggacuaguguccaccugucccuccugggcugcuggauugucucguuuuccugccaaauaaacaggaucagcgcuuuacagaucuaaaaaaaaaaaaaaaaaaaaaaaaaaaaaaaaaaaaaaaaaaaaaaaaaaaaaaaaaaaaaaaaugcaucccccccccccccccccccccccccccccccaaaggcucuuuucagagccaccagaauu

SEQ ID NO: 16219 - RNA, 1897 nt, Artificial Sequence
  mRNA product Design b-3 comprising derived and/or modified sequence from HRSV(Memphis-37)__AIY60640.1__F_DSCav1_mut4 (opt1)
gggagagucccgcagucggcguccagcggcucugcuuguucgugugugugucguugcaggccuuauucaagcuuaccauggagcugcccauccucaagaccaacgccaucaccacgauccuggccgcggugacccugugcuucgccagcucccagaacaucaccgaggaguucuaccagagcacgugcuccgccgucagcaagggcuaccucuccgcccugcgcaccgggugguacaccagcgugaucaccaucgagcuguccaacaucaaggagaacaagugcaacggcaccgacgccaaggugaagcucaucaagcaggagcuggacaaguacaagaacgcggucacggagcugcagcuccugaugcagagcaccccggccgccggcuccgggagcgcgaucugcuccggcaucgccgucugcaaggugcugcaccucgagggcgaggugaacaagaucaagaacgcccugcuguccaccaacaaggccgucgugagccucuccaacggggugagcguccugaccuucaaggugcuggaccucaagaacuacaucgacaagcagcugcugcccauccugaacaagcagagcugcuccaucagcaacaucgagaccgucaucgaguuccagcagaagaacaaccgccuccuggagaucacgcgggaguucagcgugaacgcgggcgugaccacccccgucuccaccuacaugcugacgaacagcgagcuccugucccugaucaacgacaugccgaucaccaacgaccagaagaagcucaugagcaacaacgugcagaucgugcgccagcaguccuacagcaucaugugcaucaucaaggaggagguccuggccuacguggugcagcugccccucuacggggucaucgacacccccugcuggaagcugcacaccagcccccugugcacgaccaacaccaaggagggcuccaacaucugccucacccggacggaccgcgggugguacugcgacaacgccggcagcguguccuucuucccgcaggccgagaccugcaagguccagagcaaccggguguucugcgacaccaugaacucccggacccugcccagcgaggugaaccucugcaacaucgacaucuucaaccccaaguacgacugcaagaucaugacguccaagaccgacgucagcuccagcgugaucaccucccugggcgccaucgugagcugcuacgggaagaccaagugcacggcgagcaacaagaaccgcggcaucaucaagaccuucuccaacgggugcgacuacgucagcaacaagggcguggacaccguguccgucggcaacacccuguacugcgugaacaagcaggagggcaagagccucuacgugaagggggagcccaucaucaacuucuacgacccgcuggucuuccccuccgacgaguucgacgccagcaucucccaggugaacgagaagaucaaccagagccuggccuucauccggaaguccgacgagcuccugcacaacgugaacgucggcaagagcaccacgaacaucaugaucaccaccaucaucaucgugaucaucgugauccugcugcuccugaucgccgucgggcuguuccucuacugcaaggcccgcuccacccccgugacgcugagcaaggaccagcuguccgggaucaacaacaucgcguucagcaacugaggacuaguguccaccugucccuccugggcugcuggauugucucguuuuccugccaaauaaacaggaucagcgcuuuacagaucuaaaaaaaaaaaaaaaaaaaaaaaaaaaaaaaaaaaaaaaaaaaaaaaaaaaaaaaaaaaaaaaaugcaucccccccccccccccccccccccccccccccaaaggcucuuuucagagccaccagaauu

SEQ ID NO: 16220 - RNA, 1897 nt, Artificial Sequence
  mRNA product Design b-3 comprising derived and/or modified sequence from HRSV(Memphis-37)__AIY60640.1__F_DSCav1_mut4 (opt1)
gggagagucccgcagucggcguccagcggcucugcuuguucgugugugugucguugcaggccuuauucaagcuuaccauggagcugcccauccucaagaccaacgccaucaccacgauccuggccgcggugacccugugcuucgccagcucccagaacaucaccgaggaguucuaccagagcacgugcuccgccgucagcaagggcuaccucuccgcccugcgcaccgggugguacaccagcgugaucaccaucgagcuguccaacaucaaggagaacaagugcaacggcaccgacgccaaggugaagcucaucaagcaggagcuggacaaguacaagaacgcggucacggagcugcagcuccugaugcagagcaccccggccgccggguccggcagcgccaucugcuccgggaucgcggugugcaaggugcugcaccucgagggcgaggucaacaagaucaagaacgcccugcugagcaccaacaaggccguggugucccucagcaacggcgucuccgugcugaccuucaaggugcuggaccucaagaacuacaucgacaagcagcugcugcccauccucaacaagcagagcugcuccaucagcaacaucgagacggucaucgaguuccagcagaagaacaaccggcugcuggagaucacccgcgaguucuccgugaacgccggggugaccacccccgucagcacguacaugcucaccaacagcgagcugcugucccucaucaacgacaugcccaucaccaacgaccagaagaagcugaugagcaacaacgugcagaucgugcggcagcaguccuacagcaucaugugcaucaucaaggaggagguccuggccuacguggugcagcucccgcuguacggcgucaucgacacccccugcuggaagcugcacacgagcccccucugcaccaccaacaccaaggagggguccaacaucugccugacgcgcaccgaccggggcugguacugcgacaacgcgggguccgugagcuucuucccccaggccgagaccugcaaggugcaguccaaccgcgucuucugcgacaccaugaacagccggacgcucccguccgaggugaaccugugcaacaucgacaucuucaaccccaaguacgacugcaagaucaugaccagcaagaccgacgucuccagcuccgugaucaccagccugggcgccaucguguccugcuacggcaagacgaagugcaccgccagcaacaagaaccgggggaucaucaagaccuucuccaacggcugcgacuacgucagcaacaaggggguggacaccgugagcgucggcaacacgcucuacugcgugaacaagcaggagggcaagucccuguacgugaagggggagcccaucaucaacuucuacgacccccuggucuucccgagcgacgaguucgacgccuccaucagccaggugaacgagaagaucaaccagucccucgcguucauccgcaagagcgacgagcugcugcacaacgugaacgucggcaaguccaccaccaacaucaugaucaccaccaucaucaucgugaucaucgugauccuccugcugcucaucgccgucgggcuguuccuguacugcaaggcccggagcacgcccgugacccuguccaaggaccagcucagcggcaucaacaacaucgccuucuccaacugaggacuaguguccaccugucccuccugggcugcuggauugucucguuuuccugccaaauaaacaggaucagcgcuuuacagaucuaaaaaaaaaaaaaaaaaaaaaaaaaaaaaaaaaaaaaaaaaaaaaaaaaaaaaaaaaaaaaaaaugcaucccccccccccccccccccccccccccccccaaaggcucuuuucagagccaccagaauu

SEQ ID NO: 16221 - RNA, 1897 nt, Artificial Sequence
  mRNA product Design b-3 comprising derived and/or modified sequence from HRSV(Memphis-37)__AIY60640.1__F_DSCav1_mut4 (opt2)
gggagagucccgcagucggcguccagcggcucugcuuguucgugugugugucguugcaggccuuauucaagcuuaccauggagcuccccauccucaagaccaacgccaucaccaccauccucgccgccgucacccucugcuucgccuccucccagaacaucaccgaggaguucuaccaguccaccugcuccgccgucuccaagggcuaccucuccgcccuccgcaccggcugguacaccuccgucaucaccaucgagcucuccaacaucaaggagaacaagugcaacggcaccgacgccaaggucaagcucaucaagcaggagcucgacaaguacaagaacgccgucaccgagcuccagcuccucaugcaguccacccccgccgccggcuccggcuccgccaucugcuccggcaucgccgucugcaagguccuccaccucgagggcgaggucaacaagaucaagaacgcccuccucuccaccaacaaggccgucgucucccucuccaacggcgucuccguccucaccuucaagguccucgaccucaagaacuacaucgacaagcagcuccuccccauccucaacaagcaguccugcuccaucuccaacaucgagaccgucaucgaguuccagcagaagaacaaccgccuccucgagaucacccgcgaguucuccgucaacgccggcgucaccacccccgucuccaccuacaugcucaccaacuccgagcuccucucccucaucaacgacaugcccaucaccaacgaccagaagaagcucauguccaacaacguccagaucguccgccagcaguccuacuccaucaugugcaucaucaaggaggagguccucgccuacgucguccagcucccccucuacggcgucaucgacacccccugcuggaagcuccacaccuccccccucugcaccaccaacaccaaggagggcuccaacaucugccucacccgcaccgaccgcggcugguacugcgacaacgccggcuccgucuccuucuucccccaggccgagaccugcaagguccaguccaaccgcgucuucugcgacaccaugaacucccgcacccuccccuccgaggucaaccucugcaacaucgacaucuucaaccccaaguacgacugcaagaucaugaccuccaagaccgacgucuccuccuccgucaucaccucccucggcgccaucgucuccugcuacggcaagaccaagugcaccgccuccaacaagaaccgcggcaucaucaagaccuucuccaacggcugcgacuacgucuccaacaagggcgucgacaccgucuccgucggcaacacccucuacugcgucaacaagcaggagggcaagucccucuacgucaagggcgagcccaucaucaacuucuacgacccccucgucuuccccuccgacgaguucgacgccuccaucucccaggucaacgagaagaucaaccagucccucgccuucauccgcaaguccgacgagcuccuccacaacgucaacgucggcaaguccaccaccaacaucaugaucaccaccaucaucaucgucaucaucgucauccuccuccuccucaucgccgucggccucuuccucuacugcaaggcccgcuccacccccgucacccucuccaaggaccagcucuccggcaucaacaacaucgccuucuccaacugaggacuaguguccaccugucccuccugggcugcuggauugucucguuuuccugccaaauaaacaggaucagcgcuuuacagaucuaaaaaaaaaaaaaaaaaaaaaaaaaaaaaaaaaaaaaaaaaaaaaaaaaaaaaaaaaaaaaaaaugcaucccccccccccccccccccccccccccccccaaaggcucuuuucagagccaccagaauu

SEQ ID NO: 16222 - RNA, 1897 nt, Artificial Sequence
  mRNA product Design b-3 comprising derived and/or modified sequence from HRSV(Memphis-37)__AIY60640.1__F_DSCav1_mut4 (opt3)
gggagagucccgcagucggcguccagcggcucugcuuguucgugugugugucguugcaggccuuauucaagcuuaccauggagcugcccauccucaagaccaacgccauuacaacuauacuugcugcagugacgcugugcuucgccagcucccagaauaucaccgaagaguuuuaccaaucuacauguucagcggucaguaaaggcuauuugagcgcuuuaagaacugggugguacaccuccguuauuacaaucgaacugucuaacauuaaggagaauaaaugcaacggaaccgacgccaaggugaaacuaaucaagcaggaacucgauaaguauaaaaaugcaguaacugagcugcagcuucugaugcagucgaccccugccgcugguucaggcagcgcaauauguagugggaucgccgugugcaaggucuugcaccucgagggagaagugaacaaaauuaagaaugcucugcuguccacaaacaaagccguugugucucucagcaauggcgucuccguguuaacguucaagguacuggaccuuaagaacuacaucgauaaacaauugcugccaauucuaaauaagcagucauguaguaucagcaacauagagacuguuauugaauuucagcagaaaaauaacaggcuccuggagaucacccgggaguucucugugaaugcgggugucacaacuccgguguccaccuauaugcuuacaaacucagaacuguugagccucauuaacgacaugcccaucaccaaugaucaaaagaaacugaugaguaacaaugugcagaucguccgccagcagucuuacuccauuaugugcauaaucaaggaggaaguuuuagcauaugugguacaacugccucucuacggggugauugacacgccauguuggaaacuucauacuagcccccugugcacaaccaacacuaaggagggaucgaauaucuguuugacacgaaccgaucguggcugguacugcgacaacgccggcucugucuccuuuuucccucaggcugaaacguguaaggugcagucaaauagaguguuuugcgauaccaugaacaguagaacacugccaagcgaggugaaucucugcaacauagacauuuucaaucccaaauaugauuguaagaucaugacuuccaaaaccgacgucucuagcucagugaucacaagucugggggccauuguauccugcuacggaaagacuaaauguaccgcaagcaacaagaauagggguaucauuaagacauuuucuaacggcugcgauuauguuucaaauaaagggguggacaccgucagugugggaaacacucuuuacugugucaacaagcaagagggcaaaagccuguaugugaagggugaaccuauaaucaauuucuacgacccauugguuuuuccguccgaugaguucgacgcuucuauuucgcagguuaacgagaaaaucaaucagagccucgccuuuauccggaaguccgaugaacuguuacacaacguaaaugucgggaagucaacgacaaacauuaugauaaccacuaucauuaucgugauuaucguuauacugcuacuccugaucgcggugggacuuuucuuguauugcaaagcccgcaguacccccgucacacugucuaaggaccagcucagcggcauuaauaacaucgcauucuccaauugaggacuaguguccaccugucccuccugggcugcuggauugucucguuuuccugccaaauaaacaggaucagcgcuuuacagaucuaaaaaaaaaaaaaaaaaaaaaaaaaaaaaaaaaaaaaaaaaaaaaaaaaaaaaaaaaaaaaaaaugcaucccccccccccccccccccccccccccccccaaaggcucuuuucagagccaccagaauu

SEQ ID NO: 16223 - RNA, 1897 nt, Artificial Sequence
  mRNA product Design b-3 comprising derived and/or modified sequence from HRSV(Memphis-37)__AIY60640.1__F_DSCav1_mut4 (opt4)
gggagagucccgcagucggcguccagcggcucugcuuguucgugugugugucguugcaggccuuauucaagcuuaccauggagcugcccauccugaagaccaacgccaucaccaccauccuggccgccgugacccugugcuucgccagcagccagaacaucaccgaggaguucuaccagagcaccugcagcgccgugagcaagggcuaccugagcgcccugagaaccggcugguacaccagcgugaucaccaucgagcugagcaacaucaaggagaacaagugcaacggcaccgacgccaaggugaagcugaucaagcaggagcuggacaaguacaagaacgccgugaccgagcugcagcugcugaugcagagcacccccgccgccggcagcggcagcgccaucugcagcggcaucgccgugugcaaggugcugcaccuggagggcgaggugaacaagaucaagaacgcccugcugagcaccaacaaggccguggugagccugagcaacggcgugagcgugcugaccuucaaggugcuggaccugaagaacuacaucgacaagcagcugcugcccauccugaacaagcagagcugcagcaucagcaacaucgagaccgugaucgaguuccagcagaagaacaacagacugcuggagaucaccagagaguucagcgugaacgccggcgugaccacccccgugagcaccuacaugcugaccaacagcgagcugcugagccugaucaacgacaugcccaucaccaacgaccagaagaagcugaugagcaacaacgugcagaucgugagacagcagagcuacagcaucaugugcaucaucaaggaggaggugcuggccuacguggugcagcugccccuguacggcgugaucgacacccccugcuggaagcugcacaccagcccccugugcaccaccaacaccaaggagggcagcaacaucugccugaccagaaccgacagaggcugguacugcgacaacgccggcagcgugagcuucuucccccaggccgagaccugcaaggugcagagcaacagaguguucugcgacaccaugaacagcagaacccugcccagcgaggugaaccugugcaacaucgacaucuucaaccccaaguacgacugcaagaucaugaccagcaagaccgacgugagcagcagcgugaucaccagccugggcgccaucgugagcugcuacggcaagaccaagugcaccgccagcaacaagaacagaggcaucaucaagaccuucagcaacggcugcgacuacgugagcaacaagggcguggacaccgugagcgugggcaacacccuguacugcgugaacaagcaggagggcaagagccuguacgugaagggcgagcccaucaucaacuucuacgacccccugguguuccccagcgacgaguucgacgccagcaucagccaggugaacgagaagaucaaccagagccuggccuucaucagaaagagcgacgagcugcugcacaacgugaacgugggcaagagcaccaccaacaucaugaucaccaccaucaucaucgugaucaucgugauccugcugcugcugaucgccgugggccuguuccuguacugcaaggccagaagcacccccgugacccugagcaaggaccagcugagcggcaucaacaacaucgccuucagcaacugaggacuaguguccaccugucccuccugggcugcuggauugucucguuuuccugccaaauaaacaggaucagcgcuuuacagaucuaaaaaaaaaaaaaaaaaaaaaaaaaaaaaaaaaaaaaaaaaaaaaaaaaaaaaaaaaaaaaaaaugcaucccccccccccccccccccccccccccccccaaaggcucuuuucagagccaccagaauu

SEQ ID NO: 16224 - RNA, 1897 nt, Artificial Sequence
  mRNA product Design b-3 comprising derived and/or modified sequence from HRSV(Memphis-37)__AIY60640.1__F_DSCav1_mut4 (opt5)
gggagagucccgcagucggcguccagcggcucugcuuguucgugugugugucguugcaggccuuauucaagcuuaccauggagcugcccauccucaagaccaacgccauuacaacgauccuggcugccgugacccuuugcuucgcgagcucccagaauauuacagaagaguuuuaccaaucuaccuguagcgcugucuccaaaggcuaucugucugcccucagaacagggugguacaccagcguuaucacaauugaacuguccaacaucaaggagaauaaaugcaacggaaccgacgccaaggugaaacuuaucaagcaggaacuggauaaguauaaaaaugcugugacggagcuccagcugcugaugcagucuaccccugccgcuggcagcggguccgccauuuguagcggaaucgcggucugcaaggugcuccaccuggagggcgaaguuaacaaaauuaagaaugcccuucugucuacaaacaaagcuguggucucccucagcaauggggugucuguucugaccuucaaggugcuugaccugaagaacuacaucgauaaacaacuccugccgauucugaauaagcaguccuguagcaucucuaacauugagacagucaucgaauuucagcagaaaaauaaccggcuccuggagaucacccgcgaguucuccgugaaugccggagugacgacacccgucagcaccuauaugcuuacaaacuccgaacugcucucucugauuaacgacaugccuaucaccaaugaucaaaagaaacuuaugagcaacaauguucagauugugagacagcaguccuacagcaucaugugcauuaucaaggaggaagugcuggcuuaugucgugcaacucccccuguacggcguuaucgacaccccuuguuggaaacugcauacaucuccccucugcacgaccaacacaaaggagggcuccaauauuugucugacccggacagaucgcgggugguacugcgacaacgccggaagcgugagcuuuuucccucaggcggaaaccuguaagguccagucuaauagaguguuuugcgauacgaugaacuccagaacacugccgucugagguuaaucucugcaacaucgacauuuucaaucccaaauaugauuguaagaucaugaccagcaaaaccgacguguccagcucugucauuacaucccugggcgccaucgugagcugcuacgggaagaccaaauguacagcuucuaacaagaaucggggaaucauuaagacguuuuccaacggcugcgauuaugucagcaauaaagggguggacaccguuuccgugggaaacacacuuuacugugucaacaagcaagagggcaaaucucuguaugugaagggcgaaccuaucauuaauuucuacgacccccucguuuuuccuagcgaugaguucgacgccuccaucucucaggugaacgaaaagauuaaucagagccuggcuuuuauccgcaaguccgaugagcugcuccacaacgucaauguggggaaaagcaccacaaacauuaugaucaccacgaucauuaucgugauuaucguuauucugcuucugcucaucgccgucggacuguuccuguauugcaaagccagaucuacccccgugacacuuuccaaggaccagcucagcggcaucaauaacauugcuuucucuaauugaggacuaguguccaccugucccuccugggcugcuggauugucucguuuuccugccaaauaaacaggaucagcgcuuuacagaucuaaaaaaaaaaaaaaaaaaaaaaaaaaaaaaaaaaaaaaaaaaaaaaaaaaaaaaaaaaaaaaaaugcaucccccccccccccccccccccccccccccccaaaggcucuuuucagagccaccagaauu

SEQ ID NO: 16225 - RNA, 1897 nt, Artificial Sequence
  mRNA product Design b-3 comprising derived and/or modified sequence from HRSV(Memphis-37)__AIY60640.1__F_DSCav1_mut4 (opt6)
gggagagucccgcagucggcguccagcggcucugcuuguucgugugugugucguugcaggccuuauucaagcuuaccauggaacucccaauccuaaaaacaaacgcaauaacaacaauauuagcagccguaacacucuguuucgccucaucccaaaacauaacagaagaauuuuaucaaucuacauguuccgccgucaguaaaggauaucuaucagccuuaagaacaggcugguacacaucaguaaucaccauagaauuauccaacauaaaagaaaacaaaugcaauggcacagaugccaaaguaaaacuaaucaaacaagaacuugauaaauauaaaaacgcaguaacagaauuacaauuauuaaugcaaagcacaccagccgcaggaucaggaucagcaauauguucaggaauagcagucuguaaaguacuacacuuagaaggagaaguaaacaaaauuaaaaacgcauuacuaagcaccaauaaagcaguaguaucacuaucaaacggcguauccguauuaacguucaaaguccucgaccugaaaaacuacauagauaaacaacuacuaccaauacuaaauaaacaaucaugcucaauaucaaacauagaaacuguuaucgaauuucaacagaaaaauaaccgacuacuagaaaucaccagagaauuuucaguaaacgcaggcgucacuacaccaguauccacauacaugcuaaccaacucggaauuacuuucccucauaaacgacaugccaauaacaaacgaccaaaagaaacuuaugucaaacaacguucaaauaguccgccaacaaucauacucaauaauguguaucauaaaagaagaaguccuagcauaugucguacaacuaccauuauacggaguaauugacacaccuugcuggaaacuacacacauccccacuauguacaacaaacacuaaagaaggaucaaacaucugccuaaccagaacagacagaggcugguauugcgacaacgcaggaucaguaucauucuucccacaagcagaaacaugcaaaguacaaucaaacagagucuucugcgacaccaugaacagcagaacccucccauccgaaguaaacuuaugcaacaucgauaucuucaacccaaaauacgacuguaaaauaaugacaucaaaaacagacguuucauccucaguaauaacaucauuaggugccauaguuucauguuacggaaaaaccaaauguaccgcaucaaacaaaaacagaggcauuauuaaaacauucucuaacggaugcgacuaugucaguaacaaaggaguagacacaguaucagucggaaacacauuauauugcguaaauaaacaagaaggaaaaagucuauacguaaaaggagaaccaauaauaaacuuuuacgacccucucguauucccaucagacgaauuugaugcauccauaucacaagucaacgaaaagauaaaccaaucccuagcauucauaagaaaaucagacgaacuacuccauaacguaaacguaggaaaaagcacaaccaauauaaugauaaccacaauaaucauaguaauaauagucauauuauuacuuuuaauugcaguaggacucuuucuauacugcaaagcaagaagcacaccaguaacacuaagcaaagaccaacuaucaggcaucaacaauaucgccuuuucaaauuaaggacuaguguccaccugucccuccugggcugcuggauugucucguuuuccugccaaauaaacaggaucagcgcuuuacagaucuaaaaaaaaaaaaaaaaaaaaaaaaaaaaaaaaaaaaaaaaaaaaaaaaaaaaaaaaaaaaaaaaugcaucccccccccccccccccccccccccccccccaaaggcucuuuucagagccaccagaauu

SEQ ID NO: 16226 - RNA, 1897 nt, Artificial Sequence
  mRNA product Design b-3 comprising derived and/or modified sequence from HRSV(Memphis-37)__AIY60640.1__F_DSCav1_mut4 (opt11)
gggagagucccgcagucggcguccagcggcucugcuuguucgugugugugucguugcaggccuuauucaagcuuaccauggagcugcccauccucaagaccaacgccaucaccacgauccuggccgcggugacccugugcuucgcgagcucccagaacaucaccgaggaguucuaccagagcacgugcuccgccgucagcaagggcuaccucuccgcccugcgcaccgggugguacaccagcgugaucaccaucgagcuguccaacaucaaggagaacaagugcaacggcaccgacgccaaggugaaacucaucaagcaggagcuggacaaguacaagaacgccgucaccgagcugcagcuccugaugcagagcaccccggccgccggguccggcagcgcuaucugcuccgggaucgcggugugcaaggugcugcaccucgagggcgaggucaacaagaucaagaaugcccugcugagcaccaacaaggccguggugucccucagcaacggagucagcgugcuuaccuucaaggugcuggaccucaagaacuacaucgacaagcagcugcugccuauccucaacaagcagagcugcuccaucagcaacaucgagacggucaucgaguuccagcagaagaacaaccggcugcuggagaucacccgcgaguucuccgugaacgccggggugaccacccccgucagcacguacaugcucaccaacagcgaacugcugucccucaucaacgacaugcccaucaccaacgaccagaagaagcugaugagcaacaacgugcagaucgugcggcagcaguccuacagcaucaugugcaucaucaaggaggaaguccuggccuacguggugcagcucccucuguacggcgucaucgacacccccugcuggaagcugcacacgagcccccucugcaccaccaacaccaaggagggguccaacaucugccugacgcgcaccgaccggggcugguacugcgacaacgcgggguccgugagcuucuucccccaggccgagaccugcaaggugcagagcaaccgcgucuucugcgacacuaugaacagcagaacgcucccguccgaggugaaccugugcaacauagacauauucaaccccaaguacgacugcaagaucaugaccagcaagaccgacgucuccagcuccgugauuaccagccugggcgcaaucguguccugcuacggcaagacgaagugcaccgccagcaacaagaaccgggggaucaucaagaccuucuccaacggcugcgacuaugucagcaacaaggggguggacaccgugagcgucggaaacacgcucuacugcgugaacaagcaagagggcaaguccuuauacgugaagggggagcccaucaucaacuucuacgacccccuggucuucccgagcgacgaguucgacgccagcauaagccaggugaacgagaagaucaaccagucccucgcguucauccgcaagagcgacgagcugcugcacaacgugaacgucggcaaguccaccaccaacaucaugaucaccaccaucaucaucgugaucaucgugauccuccugcugcucaucgccgucgggcuguuccuguacugcaaggcccggagcacgcccgugaccuuguccaaggaccagcucagcggcaucaacaacaucgccuucuccaacugaggacuaguguccaccugucccuccugggcugcuggauugucucguuuuccugccaaauaaacaggaucagcgcuuuacagaucuaaaaaaaaaaaaaaaaaaaaaaaaaaaaaaaaaaaaaaaaaaaaaaaaaaaaaaaaaaaaaaaaugcaucccccccccccccccccccccccccccccccaaaggcucuuuucagagccaccagaauu

SEQ ID NO: 16227 - RNA, 1948 nt, Artificial Sequence
  mRNA product Design b-4 comprising derived and/or modified sequence from HRSV(Memphis-37)__AIY60640.1__F_DSCav1_mut4 (opt1)
gggagagucccgcagucggcguccagcggcucugcuuguucgugugugugucguugcaggccuuauucaagcuuaccauggagcugcccauccucaagaccaacgccaucaccacgauccuggccgcggugacccugugcuucgccagcucccagaacaucaccgaggaguucuaccagagcacgugcuccgccgucagcaagggcuaccucuccgcccugcgcaccgggugguacaccagcgugaucaccaucgagcuguccaacaucaaggagaacaagugcaacggcaccgacgccaaggugaagcucaucaagcaggagcuggacaaguacaagaacgcggucacggagcugcagcuccugaugcagagcaccccggccgccggcuccgggagcgcgaucugcuccggcaucgccgucugcaaggugcugcaccucgagggcgaggugaacaagaucaagaacgcccugcuguccaccaacaaggccgucgugagccucuccaacggggugagcguccugaccuucaaggugcuggaccucaagaacuacaucgacaagcagcugcugcccauccugaacaagcagagcugcuccaucagcaacaucgagaccgucaucgaguuccagcagaagaacaaccgccuccuggagaucacgcgggaguucagcgugaacgcgggcgugaccacccccgucuccaccuacaugcugacgaacagcgagcuccugucccugaucaacgacaugccgaucaccaacgaccagaagaagcucaugagcaacaacgugcagaucgugcgccagcaguccuacagcaucaugugcaucaucaaggaggagguccuggccuacguggugcagcugccccucuacggggucaucgacacccccugcuggaagcugcacaccagcccccugugcacgaccaacaccaaggagggcuccaacaucugccucacccggacggaccgcgggugguacugcgacaacgccggcagcguguccuucuucccgcaggccgagaccugcaagguccagagcaaccggguguucugcgacaccaugaacucccggacccugcccagcgaggugaaccucugcaacaucgacaucuucaaccccaaguacgacugcaagaucaugacguccaagaccgacgucagcuccagcgugaucaccucccugggcgccaucgugagcugcuacgggaagaccaagugcacggcgagcaacaagaaccgcggcaucaucaagaccuucuccaacgggugcgacuacgucagcaacaagggcguggacaccguguccgucggcaacacccuguacugcgugaacaagcaggagggcaagagccucuacgugaagggggagcccaucaucaacuucuacgacccgcuggucuuccccuccgacgaguucgacgccagcaucucccaggugaacgagaagaucaaccagagccuggccuucauccggaaguccgacgagcuccugcacaacgugaacgucggcaagagcaccacgaacaucaugaucaccaccaucaucaucgugaucaucgugauccugcugcuccugaucgccgucgggcuguuccucuacugcaaggcccgcuccacccccgugacgcugagcaaggaccagcuguccgggaucaacaacaucgcguucagcaacugaggacuaguaauaaggaaacuguaugaaugucugugggcaggaagugaagagauccuucuguaaagguuuuuggaauuaugucugcugaauaauaaacuuuuuugaaauaauaaaucugguagaaaaaugagaucuaaaaaaaaaaaaaaaaaaaaaaaaaaaaaaaaaaaaaaaaaaaaaaaaaaaaaaaaaaaaaaaaugcaucccccccccccccccccccccccccccccccaaaggcucuuuucagagccaccagaauu

SEQ ID NO: 16228 - RNA, 1948 nt, Artificial Sequence
  mRNA product Design b-4 comprising derived and/or modified sequence from HRSV(Memphis-37)__AIY60640.1__F_DSCav1_mut4 (opt1)
gggagagucccgcagucggcguccagcggcucugcuuguucgugugugugucguugcaggccuuauucaagcuuaccauggagcugcccauccucaagaccaacgccaucaccacgauccuggccgcggugacccugugcuucgccagcucccagaacaucaccgaggaguucuaccagagcacgugcuccgccgucagcaagggcuaccucuccgcccugcgcaccgggugguacaccagcgugaucaccaucgagcuguccaacaucaaggagaacaagugcaacggcaccgacgccaaggugaagcucaucaagcaggagcuggacaaguacaagaacgcggucacggagcugcagcuccugaugcagagcaccccggccgccggguccggcagcgccaucugcuccgggaucgcggugugcaaggugcugcaccucgagggcgaggucaacaagaucaagaacgcccugcugagcaccaacaaggccguggugucccucagcaacggcgucuccgugcugaccuucaaggugcuggaccucaagaacuacaucgacaagcagcugcugcccauccucaacaagcagagcugcuccaucagcaacaucgagacggucaucgaguuccagcagaagaacaaccggcugcuggagaucacccgcgaguucuccgugaacgccggggugaccacccccgucagcacguacaugcucaccaacagcgagcugcugucccucaucaacgacaugcccaucaccaacgaccagaagaagcugaugagcaacaacgugcagaucgugcggcagcaguccuacagcaucaugugcaucaucaaggaggagguccuggccuacguggugcagcucccgcuguacggcgucaucgacacccccugcuggaagcugcacacgagcccccucugcaccaccaacaccaaggagggguccaacaucugccugacgcgcaccgaccggggcugguacugcgacaacgcgggguccgugagcuucuucccccaggccgagaccugcaaggugcaguccaaccgcgucuucugcgacaccaugaacagccggacgcucccguccgaggugaaccugugcaacaucgacaucuucaaccccaaguacgacugcaagaucaugaccagcaagaccgacgucuccagcuccgugaucaccagccugggcgccaucguguccugcuacggcaagacgaagugcaccgccagcaacaagaaccgggggaucaucaagaccuucuccaacggcugcgacuacgucagcaacaaggggguggacaccgugagcgucggcaacacgcucuacugcgugaacaagcaggagggcaagucccuguacgugaagggggagcccaucaucaacuucuacgacccccuggucuucccgagcgacgaguucgacgccuccaucagccaggugaacgagaagaucaaccagucccucgcguucauccgcaagagcgacgagcugcugcacaacgugaacgucggcaaguccaccaccaacaucaugaucaccaccaucaucaucgugaucaucgugauccuccugcugcucaucgccgucgggcuguuccuguacugcaaggcccggagcacgcccgugacccuguccaaggaccagcucagcggcaucaacaacaucgccuucuccaacugaggacuaguaauaaggaaacuguaugaaugucugugggcaggaagugaagagauccuucuguaaagguuuuuggaauuaugucugcugaauaauaaacuuuuuugaaauaauaaaucugguagaaaaaugagaucuaaaaaaaaaaaaaaaaaaaaaaaaaaaaaaaaaaaaaaaaaaaaaaaaaaaaaaaaaaaaaaaaugcaucccccccccccccccccccccccccccccccaaaggcucuuuucagagccaccagaauu

SEQ ID NO: 16229 - RNA, 1948 nt, Artificial Sequence
  mRNA product Design b-4 comprising derived and/or modified sequence from HRSV(Memphis-37)__AIY60640.1__F_DSCav1_mut4 (opt2)
gggagagucccgcagucggcguccagcggcucugcuuguucgugugugugucguugcaggccuuauucaagcuuaccauggagcuccccauccucaagaccaacgccaucaccaccauccucgccgccgucacccucugcuucgccuccucccagaacaucaccgaggaguucuaccaguccaccugcuccgccgucuccaagggcuaccucuccgcccuccgcaccggcugguacaccuccgucaucaccaucgagcucuccaacaucaaggagaacaagugcaacggcaccgacgccaaggucaagcucaucaagcaggagcucgacaaguacaagaacgccgucaccgagcuccagcuccucaugcaguccacccccgccgccggcuccggcuccgccaucugcuccggcaucgccgucugcaagguccuccaccucgagggcgaggucaacaagaucaagaacgcccuccucuccaccaacaaggccgucgucucccucuccaacggcgucuccguccucaccuucaagguccucgaccucaagaacuacaucgacaagcagcuccuccccauccucaacaagcaguccugcuccaucuccaacaucgagaccgucaucgaguuccagcagaagaacaaccgccuccucgagaucacccgcgaguucuccgucaacgccggcgucaccacccccgucuccaccuacaugcucaccaacuccgagcuccucucccucaucaacgacaugcccaucaccaacgaccagaagaagcucauguccaacaacguccagaucguccgccagcaguccuacuccaucaugugcaucaucaaggaggagguccucgccuacgucguccagcucccccucuacggcgucaucgacacccccugcuggaagcuccacaccuccccccucugcaccaccaacaccaaggagggcuccaacaucugccucacccgcaccgaccgcggcugguacugcgacaacgccggcuccgucuccuucuucccccaggccgagaccugcaagguccaguccaaccgcgucuucugcgacaccaugaacucccgcacccuccccuccgaggucaaccucugcaacaucgacaucuucaaccccaaguacgacugcaagaucaugaccuccaagaccgacgucuccuccuccgucaucaccucccucggcgccaucgucuccugcuacggcaagaccaagugcaccgccuccaacaagaaccgcggcaucaucaagaccuucuccaacggcugcgacuacgucuccaacaagggcgucgacaccgucuccgucggcaacacccucuacugcgucaacaagcaggagggcaagucccucuacgucaagggcgagcccaucaucaacuucuacgacccccucgucuuccccuccgacgaguucgacgccuccaucucccaggucaacgagaagaucaaccagucccucgccuucauccgcaaguccgacgagcuccuccacaacgucaacgucggcaaguccaccaccaacaucaugaucaccaccaucaucaucgucaucaucgucauccuccuccuccucaucgccgucggccucuuccucuacugcaaggcccgcuccacccccgucacccucuccaaggaccagcucuccggcaucaacaacaucgccuucuccaacugaggacuaguaauaaggaaacuguaugaaugucugugggcaggaagugaagagauccuucuguaaagguuuuuggaauuaugucugcugaauaauaaacuuuuuugaaauaauaaaucugguagaaaaaugagaucuaaaaaaaaaaaaaaaaaaaaaaaaaaaaaaaaaaaaaaaaaaaaaaaaaaaaaaaaaaaaaaaaugcaucccccccccccccccccccccccccccccccaaaggcucuuuucagagccaccagaauu

SEQ ID NO: 16230 - RNA, 1948 nt, Artificial Sequence
  mRNA product Design b-4 comprising derived and/or modified sequence from HRSV(Memphis-37)__AIY60640.1__F_DSCav1_mut4 (opt3)
gggagagucccgcagucggcguccagcggcucugcuuguucgugugugugucguugcaggccuuauucaagcuuaccauggagcugcccauccucaagaccaacgccauuacaacuauacuugcugcagugacgcugugcuucgccagcucccagaauaucaccgaagaguuuuaccaaucuacauguucagcggucaguaaaggcuauuugagcgcuuuaagaacugggugguacaccuccguuauuacaaucgaacugucuaacauuaaggagaauaaaugcaacggaaccgacgccaaggugaaacuaaucaagcaggaacucgauaaguauaaaaaugcaguaacugagcugcagcuucugaugcagucgaccccugccgcugguucaggcagcgcaauauguagugggaucgccgugugcaaggucuugcaccucgagggagaagugaacaaaauuaagaaugcucugcuguccacaaacaaagccguugugucucucagcaauggcgucuccguguuaacguucaagguacuggaccuuaagaacuacaucgauaaacaauugcugccaauucuaaauaagcagucauguaguaucagcaacauagagacuguuauugaauuucagcagaaaaauaacaggcuccuggagaucacccgggaguucucugugaaugcgggugucacaacuccgguguccaccuauaugcuuacaaacucagaacuguugagccucauuaacgacaugcccaucaccaaugaucaaaagaaacugaugaguaacaaugugcagaucguccgccagcagucuuacuccauuaugugcauaaucaaggaggaaguuuuagcauaugugguacaacugccucucuacggggugauugacacgccauguuggaaacuucauacuagcccccugugcacaaccaacacuaaggagggaucgaauaucuguuugacacgaaccgaucguggcugguacugcgacaacgccggcucugucuccuuuuucccucaggcugaaacguguaaggugcagucaaauagaguguuuugcgauaccaugaacaguagaacacugccaagcgaggugaaucucugcaacauagacauuuucaaucccaaauaugauuguaagaucaugacuuccaaaaccgacgucucuagcucagugaucacaagucugggggccauuguauccugcuacggaaagacuaaauguaccgcaagcaacaagaauagggguaucauuaagacauuuucuaacggcugcgauuauguuucaaauaaagggguggacaccgucagugugggaaacacucuuuacugugucaacaagcaagagggcaaaagccuguaugugaagggugaaccuauaaucaauuucuacgacccauugguuuuuccguccgaugaguucgacgcuucuauuucgcagguuaacgagaaaaucaaucagagccucgccuuuauccggaaguccgaugaacuguuacacaacguaaaugucgggaagucaacgacaaacauuaugauaaccacuaucauuaucgugauuaucguuauacugcuacuccugaucgcggugggacuuuucuuguauugcaaagcccgcaguacccccgucacacugucuaaggaccagcucagcggcauuaauaacaucgcauucuccaauugaggacuaguaauaaggaaacuguaugaaugucugugggcaggaagugaagagauccuucuguaaagguuuuuggaauuaugucugcugaauaauaaacuuuuuugaaauaauaaaucugguagaaaaaugagaucuaaaaaaaaaaaaaaaaaaaaaaaaaaaaaaaaaaaaaaaaaaaaaaaaaaaaaaaaaaaaaaaaugcaucccccccccccccccccccccccccccccccaaaggcucuuuucagagccaccagaauu

SEQ ID NO: 16231 - RNA, 1948 nt, Artificial Sequence
  mRNA product Design b-4 comprising derived and/or modified sequence from HRSV(Memphis-37)__AIY60640.1__F_DSCav1_mut4 (opt4)
gggagagucccgcagucggcguccagcggcucugcuuguucgugugugugucguugcaggccuuauucaagcuuaccauggagcugcccauccugaagaccaacgccaucaccaccauccuggccgccgugacccugugcuucgccagcagccagaacaucaccgaggaguucuaccagagcaccugcagcgccgugagcaagggcuaccugagcgcccugagaaccggcugguacaccagcgugaucaccaucgagcugagcaacaucaaggagaacaagugcaacggcaccgacgccaaggugaagcugaucaagcaggagcuggacaaguacaagaacgccgugaccgagcugcagcugcugaugcagagcacccccgccgccggcagcggcagcgccaucugcagcggcaucgccgugugcaaggugcugcaccuggagggcgaggugaacaagaucaagaacgcccugcugagcaccaacaaggccguggugagccugagcaacggcgugagcgugcugaccuucaaggugcuggaccugaagaacuacaucgacaagcagcugcugcccauccugaacaagcagagcugcagcaucagcaacaucgagaccgugaucgaguuccagcagaagaacaacagacugcuggagaucaccagagaguucagcgugaacgccggcgugaccacccccgugagcaccuacaugcugaccaacagcgagcugcugagccugaucaacgacaugcccaucaccaacgaccagaagaagcugaugagcaacaacgugcagaucgugagacagcagagcuacagcaucaugugcaucaucaaggaggaggugcuggccuacguggugcagcugccccuguacggcgugaucgacacccccugcuggaagcugcacaccagcccccugugcaccaccaacaccaaggagggcagcaacaucugccugaccagaaccgacagaggcugguacugcgacaacgccggcagcgugagcuucuucccccaggccgagaccugcaaggugcagagcaacagaguguucugcgacaccaugaacagcagaacccugcccagcgaggugaaccugugcaacaucgacaucuucaaccccaaguacgacugcaagaucaugaccagcaagaccgacgugagcagcagcgugaucaccagccugggcgccaucgugagcugcuacggcaagaccaagugcaccgccagcaacaagaacagaggcaucaucaagaccuucagcaacggcugcgacuacgugagcaacaagggcguggacaccgugagcgugggcaacacccuguacugcgugaacaagcaggagggcaagagccuguacgugaagggcgagcccaucaucaacuucuacgacccccugguguuccccagcgacgaguucgacgccagcaucagccaggugaacgagaagaucaaccagagccuggccuucaucagaaagagcgacgagcugcugcacaacgugaacgugggcaagagcaccaccaacaucaugaucaccaccaucaucaucgugaucaucgugauccugcugcugcugaucgccgugggccuguuccuguacugcaaggccagaagcacccccgugacccugagcaaggaccagcugagcggcaucaacaacaucgccuucagcaacugaggacuaguaauaaggaaacuguaugaaugucugugggcaggaagugaagagauccuucuguaaagguuuuuggaauuaugucugcugaauaauaaacuuuuuugaaauaauaaaucugguagaaaaaugagaucuaaaaaaaaaaaaaaaaaaaaaaaaaaaaaaaaaaaaaaaaaaaaaaaaaaaaaaaaaaaaaaaaugcaucccccccccccccccccccccccccccccccaaaggcucuuuucagagccaccagaauu

SEQ ID NO: 16232 - RNA, 1948 nt, Artificial Sequence
  mRNA product Design b-4 comprising derived and/or modified sequence from HRSV(Memphis-37)__AIY60640.1__F_DSCav1_mut4 (opt5)
gggagagucccgcagucggcguccagcggcucugcuuguucgugugugugucguugcaggccuuauucaagcuuaccauggagcugcccauccucaagaccaacgccauuacaacgauccuggcugccgugacccuuugcuucgcgagcucccagaauauuacagaagaguuuuaccaaucuaccuguagcgcugucuccaaaggcuaucugucugcccucagaacagggugguacaccagcguuaucacaauugaacuguccaacaucaaggagaauaaaugcaacggaaccgacgccaaggugaaacuuaucaagcaggaacuggauaaguauaaaaaugcugugacggagcuccagcugcugaugcagucuaccccugccgcuggcagcggguccgccauuuguagcggaaucgcggucugcaaggugcuccaccuggagggcgaaguuaacaaaauuaagaaugcccuucugucuacaaacaaagcuguggucucccucagcaauggggugucuguucugaccuucaaggugcuugaccugaagaacuacaucgauaaacaacuccugccgauucugaauaagcaguccuguagcaucucuaacauugagacagucaucgaauuucagcagaaaaauaaccggcuccuggagaucacccgcgaguucuccgugaaugccggagugacgacacccgucagcaccuauaugcuuacaaacuccgaacugcucucucugauuaacgacaugccuaucaccaaugaucaaaagaaacuuaugagcaacaauguucagauugugagacagcaguccuacagcaucaugugcauuaucaaggaggaagugcuggcuuaugucgugcaacucccccuguacggcguuaucgacaccccuuguuggaaacugcauacaucuccccucugcacgaccaacacaaaggagggcuccaauauuugucugacccggacagaucgcgggugguacugcgacaacgccggaagcgugagcuuuuucccucaggcggaaaccuguaagguccagucuaauagaguguuuugcgauacgaugaacuccagaacacugccgucugagguuaaucucugcaacaucgacauuuucaaucccaaauaugauuguaagaucaugaccagcaaaaccgacguguccagcucugucauuacaucccugggcgccaucgugagcugcuacgggaagaccaaauguacagcuucuaacaagaaucggggaaucauuaagacguuuuccaacggcugcgauuaugucagcaauaaagggguggacaccguuuccgugggaaacacacuuuacugugucaacaagcaagagggcaaaucucuguaugugaagggcgaaccuaucauuaauuucuacgacccccucguuuuuccuagcgaugaguucgacgccuccaucucucaggugaacgaaaagauuaaucagagccuggcuuuuauccgcaaguccgaugagcugcuccacaacgucaauguggggaaaagcaccacaaacauuaugaucaccacgaucauuaucgugauuaucguuauucugcuucugcucaucgccgucggacuguuccuguauugcaaagccagaucuacccccgugacacuuuccaaggaccagcucagcggcaucaauaacauugcuuucucuaauugaggacuaguaauaaggaaacuguaugaaugucugugggcaggaagugaagagauccuucuguaaagguuuuuggaauuaugucugcugaauaauaaacuuuuuugaaauaauaaaucugguagaaaaaugagaucuaaaaaaaaaaaaaaaaaaaaaaaaaaaaaaaaaaaaaaaaaaaaaaaaaaaaaaaaaaaaaaaaugcaucccccccccccccccccccccccccccccccaaaggcucuuuucagagccaccagaauu

SEQ ID NO: 16233 - RNA, 1948 nt, Artificial Sequence
  mRNA product Design b-4 comprising derived and/or modified sequence from HRSV(Memphis-37)__AIY60640.1__F_DSCav1_mut4 (opt6)
gggagagucccgcagucggcguccagcggcucugcuuguucgugugugugucguugcaggccuuauucaagcuuaccauggaacucccaauccuaaaaacaaacgcaauaacaacaauauuagcagccguaacacucuguuucgccucaucccaaaacauaacagaagaauuuuaucaaucuacauguuccgccgucaguaaaggauaucuaucagccuuaagaacaggcugguacacaucaguaaucaccauagaauuauccaacauaaaagaaaacaaaugcaauggcacagaugccaaaguaaaacuaaucaaacaagaacuugauaaauauaaaaacgcaguaacagaauuacaauuauuaaugcaaagcacaccagccgcaggaucaggaucagcaauauguucaggaauagcagucuguaaaguacuacacuuagaaggagaaguaaacaaaauuaaaaacgcauuacuaagcaccaauaaagcaguaguaucacuaucaaacggcguauccguauuaacguucaaaguccucgaccugaaaaacuacauagauaaacaacuacuaccaauacuaaauaaacaaucaugcucaauaucaaacauagaaacuguuaucgaauuucaacagaaaaauaaccgacuacuagaaaucaccagagaauuuucaguaaacgcaggcgucacuacaccaguauccacauacaugcuaaccaacucggaauuacuuucccucauaaacgacaugccaauaacaaacgaccaaaagaaacuuaugucaaacaacguucaaauaguccgccaacaaucauacucaauaauguguaucauaaaagaagaaguccuagcauaugucguacaacuaccauuauacggaguaauugacacaccuugcuggaaacuacacacauccccacuauguacaacaaacacuaaagaaggaucaaacaucugccuaaccagaacagacagaggcugguauugcgacaacgcaggaucaguaucauucuucccacaagcagaaacaugcaaaguacaaucaaacagagucuucugcgacaccaugaacagcagaacccucccauccgaaguaaacuuaugcaacaucgauaucuucaacccaaaauacgacuguaaaauaaugacaucaaaaacagacguuucauccucaguaauaacaucauuaggugccauaguuucauguuacggaaaaaccaaauguaccgcaucaaacaaaaacagaggcauuauuaaaacauucucuaacggaugcgacuaugucaguaacaaaggaguagacacaguaucagucggaaacacauuauauugcguaaauaaacaagaaggaaaaagucuauacguaaaaggagaaccaauaauaaacuuuuacgacccucucguauucccaucagacgaauuugaugcauccauaucacaagucaacgaaaagauaaaccaaucccuagcauucauaagaaaaucagacgaacuacuccauaacguaaacguaggaaaaagcacaaccaauauaaugauaaccacaauaaucauaguaauaauagucauauuauuacuuuuaauugcaguaggacucuuucuauacugcaaagcaagaagcacaccaguaacacuaagcaaagaccaacuaucaggcaucaacaauaucgccuuuucaaauuaaggacuaguaauaaggaaacuguaugaaugucugugggcaggaagugaagagauccuucuguaaagguuuuuggaauuaugucugcugaauaauaaacuuuuuugaaauaauaaaucugguagaaaaaugagaucuaaaaaaaaaaaaaaaaaaaaaaaaaaaaaaaaaaaaaaaaaaaaaaaaaaaaaaaaaaaaaaaaugcaucccccccccccccccccccccccccccccccaaaggcucuuuucagagccaccagaauu

SEQ ID NO: 16234 - RNA, 1948 nt, Artificial Sequence
  mRNA product Design b-4 comprising derived and/or modified sequence from HRSV(Memphis-37)__AIY60640.1__F_DSCav1_mut4 (opt11)
gggagagucccgcagucggcguccagcggcucugcuuguucgugugugugucguugcaggccuuauucaagcuuaccauggagcugcccauccucaagaccaacgccaucaccacgauccuggccgcggugacccugugcuucgcgagcucccagaacaucaccgaggaguucuaccagagcacgugcuccgccgucagcaagggcuaccucuccgcccugcgcaccgggugguacaccagcgugaucaccaucgagcuguccaacaucaaggagaacaagugcaacggcaccgacgccaaggugaaacucaucaagcaggagcuggacaaguacaagaacgccgucaccgagcugcagcuccugaugcagagcaccccggccgccggguccggcagcgcuaucugcuccgggaucgcggugugcaaggugcugcaccucgagggcgaggucaacaagaucaagaaugcccugcugagcaccaacaaggccguggugucccucagcaacggagucagcgugcuuaccuucaaggugcuggaccucaagaacuacaucgacaagcagcugcugccuauccucaacaagcagagcugcuccaucagcaacaucgagacggucaucgaguuccagcagaagaacaaccggcugcuggagaucacccgcgaguucuccgugaacgccggggugaccacccccgucagcacguacaugcucaccaacagcgaacugcugucccucaucaacgacaugcccaucaccaacgaccagaagaagcugaugagcaacaacgugcagaucgugcggcagcaguccuacagcaucaugugcaucaucaaggaggaaguccuggccuacguggugcagcucccucuguacggcgucaucgacacccccugcuggaagcugcacacgagcccccucugcaccaccaacaccaaggagggguccaacaucugccugacgcgcaccgaccggggcugguacugcgacaacgcgggguccgugagcuucuucccccaggccgagaccugcaaggugcagagcaaccgcgucuucugcgacacuaugaacagcagaacgcucccguccgaggugaaccugugcaacauagacauauucaaccccaaguacgacugcaagaucaugaccagcaagaccgacgucuccagcuccgugauuaccagccugggcgcaaucguguccugcuacggcaagacgaagugcaccgccagcaacaagaaccgggggaucaucaagaccuucuccaacggcugcgacuaugucagcaacaaggggguggacaccgugagcgucggaaacacgcucuacugcgugaacaagcaagagggcaaguccuuauacgugaagggggagcccaucaucaacuucuacgacccccuggucuucccgagcgacgaguucgacgccagcauaagccaggugaacgagaagaucaaccagucccucgcguucauccgcaagagcgacgagcugcugcacaacgugaacgucggcaaguccaccaccaacaucaugaucaccaccaucaucaucgugaucaucgugauccuccugcugcucaucgccgucgggcuguuccuguacugcaaggcccggagcacgcccgugaccuuguccaaggaccagcucagcggcaucaacaacaucgccuucuccaacugaggacuaguaauaaggaaacuguaugaaugucugugggcaggaagugaagagauccuucuguaaagguuuuuggaauuaugucugcugaauaauaaacuuuuuugaaauaauaaaucugguagaaaaaugagaucuaaaaaaaaaaaaaaaaaaaaaaaaaaaaaaaaaaaaaaaaaaaaaaaaaaaaaaaaaaaaaaaaugcaucccccccccccccccccccccccccccccccaaaggcucuuuucagagccaccagaauu

SEQ ID NO: 16235 - RNA, 2010 nt, Artificial Sequence
  mRNA product Design b-5 comprising derived and/or modified sequence from HRSV(Memphis-37)__AIY60640.1__F_DSCav1_mut4 (opt1)
gggagacuccugucgggcggaaguaggaggaguagaguuuaaaaacaguacucuuuuuccgguucgggacguaguugaagcaacgacaagccggauaaccgcucuugagacaggaagcuuaccauggagcugcccauccucaagaccaacgccaucaccacgauccuggccgcggugacccugugcuucgccagcucccagaacaucaccgaggaguucuaccagagcacgugcuccgccgucagcaagggcuaccucuccgcccugcgcaccgggugguacaccagcgugaucaccaucgagcuguccaacaucaaggagaacaagugcaacggcaccgacgccaaggugaagcucaucaagcaggagcuggacaaguacaagaacgcggucacggagcugcagcuccugaugcagagcaccccggccgccggcuccgggagcgcgaucugcuccggcaucgccgucugcaaggugcugcaccucgagggcgaggugaacaagaucaagaacgcccugcuguccaccaacaaggccgucgugagccucuccaacggggugagcguccugaccuucaaggugcuggaccucaagaacuacaucgacaagcagcugcugcccauccugaacaagcagagcugcuccaucagcaacaucgagaccgucaucgaguuccagcagaagaacaaccgccuccuggagaucacgcgggaguucagcgugaacgcgggcgugaccacccccgucuccaccuacaugcugacgaacagcgagcuccugucccugaucaacgacaugccgaucaccaacgaccagaagaagcucaugagcaacaacgugcagaucgugcgccagcaguccuacagcaucaugugcaucaucaaggaggagguccuggccuacguggugcagcugccccucuacggggucaucgacacccccugcuggaagcugcacaccagcccccugugcacgaccaacaccaaggagggcuccaacaucugccucacccggacggaccgcgggugguacugcgacaacgccggcagcguguccuucuucccgcaggccgagaccugcaagguccagagcaaccggguguucugcgacaccaugaacucccggacccugcccagcgaggugaaccucugcaacaucgacaucuucaaccccaaguacgacugcaagaucaugacguccaagaccgacgucagcuccagcgugaucaccucccugggcgccaucgugagcugcuacgggaagaccaagugcacggcgagcaacaagaaccgcggcaucaucaagaccuucuccaacgggugcgacuacgucagcaacaagggcguggacaccguguccgucggcaacacccuguacugcgugaacaagcaggagggcaagagccucuacgugaagggggagcccaucaucaacuucuacgacccgcuggucuuccccuccgacgaguucgacgccagcaucucccaggugaacgagaagaucaaccagagccuggccuucauccggaaguccgacgagcuccugcacaacgugaacgucggcaagagcaccacgaacaucaugaucaccaccaucaucaucgugaucaucgugauccugcugcuccugaucgccgucgggcuguuccucuacugcaaggcccgcuccacccccgugacgcugagcaaggaccagcuguccgggaucaacaacaucgcguucagcaacugaggacuaguacuggcugcaucucccuuuccucuguccuccauccuucucccaggauggugaagggggaccugguacccagugauccccaccccaggauccuaaaucaugacuuaccugcuaauaaaaacucauuggaaaagugagaagaucuaaaaaaaaaaaaaaaaaaaaaaaaaaaaaaaaaaaaaaaaaaaaaaaaaaaaaaaaaaaaaaaaugcaucccccccccccccccccccccccccccccccaaaggcucuuuucagagccaccagaauu

SEQ ID NO: 16236 - RNA, 2010 nt, Artificial Sequence
  mRNA product Design b-5 comprising derived and/or modified sequence from HRSV(Memphis-37)__AIY60640.1__F_DSCav1_mut4 (opt1)
gggagacuccugucgggcggaaguaggaggaguagaguuuaaaaacaguacucuuuuuccgguucgggacguaguugaagcaacgacaagccggauaaccgcucuugagacaggaagcuuaccauggagcugcccauccucaagaccaacgccaucaccacgauccuggccgcggugacccugugcuucgccagcucccagaacaucaccgaggaguucuaccagagcacgugcuccgccgucagcaagggcuaccucuccgcccugcgcaccgggugguacaccagcgugaucaccaucgagcuguccaacaucaaggagaacaagugcaacggcaccgacgccaaggugaagcucaucaagcaggagcuggacaaguacaagaacgcggucacggagcugcagcuccugaugcagagcaccccggccgccggguccggcagcgccaucugcuccgggaucgcggugugcaaggugcugcaccucgagggcgaggucaacaagaucaagaacgcccugcugagcaccaacaaggccguggugucccucagcaacggcgucuccgugcugaccuucaaggugcuggaccucaagaacuacaucgacaagcagcugcugcccauccucaacaagcagagcugcuccaucagcaacaucgagacggucaucgaguuccagcagaagaacaaccggcugcuggagaucacccgcgaguucuccgugaacgccggggugaccacccccgucagcacguacaugcucaccaacagcgagcugcugucccucaucaacgacaugcccaucaccaacgaccagaagaagcugaugagcaacaacgugcagaucgugcggcagcaguccuacagcaucaugugcaucaucaaggaggagguccuggccuacguggugcagcucccgcuguacggcgucaucgacacccccugcuggaagcugcacacgagcccccucugcaccaccaacaccaaggagggguccaacaucugccugacgcgcaccgaccggggcugguacugcgacaacgcgggguccgugagcuucuucccccaggccgagaccugcaaggugcaguccaaccgcgucuucugcgacaccaugaacagccggacgcucccguccgaggugaaccugugcaacaucgacaucuucaaccccaaguacgacugcaagaucaugaccagcaagaccgacgucuccagcuccgugaucaccagccugggcgccaucguguccugcuacggcaagacgaagugcaccgccagcaacaagaaccgggggaucaucaagaccuucuccaacggcugcgacuacgucagcaacaaggggguggacaccgugagcgucggcaacacgcucuacugcgugaacaagcaggagggcaagucccuguacgugaagggggagcccaucaucaacuucuacgacccccuggucuucccgagcgacgaguucgacgccuccaucagccaggugaacgagaagaucaaccagucccucgcguucauccgcaagagcgacgagcugcugcacaacgugaacgucggcaaguccaccaccaacaucaugaucaccaccaucaucaucgugaucaucgugauccuccugcugcucaucgccgucgggcuguuccuguacugcaaggcccggagcacgcccgugacccuguccaaggaccagcucagcggcaucaacaacaucgccuucuccaacugaggacuaguacuggcugcaucucccuuuccucuguccuccauccuucucccaggauggugaagggggaccugguacccagugauccccaccccaggauccuaaaucaugacuuaccugcuaauaaaaacucauuggaaaagugagaagaucuaaaaaaaaaaaaaaaaaaaaaaaaaaaaaaaaaaaaaaaaaaaaaaaaaaaaaaaaaaaaaaaaugcaucccccccccccccccccccccccccccccccaaaggcucuuuucagagccaccagaauu

SEQ ID NO: 16237 - RNA, 2010 nt, Artificial Sequence
  mRNA product Design b-5 comprising derived and/or modified sequence from HRSV(Memphis-37)__AIY60640.1__F_DSCav1_mut4 (opt2)
gggagacuccugucgggcggaaguaggaggaguagaguuuaaaaacaguacucuuuuuccgguucgggacguaguugaagcaacgacaagccggauaaccgcucuugagacaggaagcuuaccauggagcuccccauccucaagaccaacgccaucaccaccauccucgccgccgucacccucugcuucgccuccucccagaacaucaccgaggaguucuaccaguccaccugcuccgccgucuccaagggcuaccucuccgcccuccgcaccggcugguacaccuccgucaucaccaucgagcucuccaacaucaaggagaacaagugcaacggcaccgacgccaaggucaagcucaucaagcaggagcucgacaaguacaagaacgccgucaccgagcuccagcuccucaugcaguccacccccgccgccggcuccggcuccgccaucugcuccggcaucgccgucugcaagguccuccaccucgagggcgaggucaacaagaucaagaacgcccuccucuccaccaacaaggccgucgucucccucuccaacggcgucuccguccucaccuucaagguccucgaccucaagaacuacaucgacaagcagcuccuccccauccucaacaagcaguccugcuccaucuccaacaucgagaccgucaucgaguuccagcagaagaacaaccgccuccucgagaucacccgcgaguucuccgucaacgccggcgucaccacccccgucuccaccuacaugcucaccaacuccgagcuccucucccucaucaacgacaugcccaucaccaacgaccagaagaagcucauguccaacaacguccagaucguccgccagcaguccuacuccaucaugugcaucaucaaggaggagguccucgccuacgucguccagcucccccucuacggcgucaucgacacccccugcuggaagcuccacaccuccccccucugcaccaccaacaccaaggagggcuccaacaucugccucacccgcaccgaccgcggcugguacugcgacaacgccggcuccgucuccuucuucccccaggccgagaccugcaagguccaguccaaccgcgucuucugcgacaccaugaacucccgcacccuccccuccgaggucaaccucugcaacaucgacaucuucaaccccaaguacgacugcaagaucaugaccuccaagaccgacgucuccuccuccgucaucaccucccucggcgccaucgucuccugcuacggcaagaccaagugcaccgccuccaacaagaaccgcggcaucaucaagaccuucuccaacggcugcgacuacgucuccaacaagggcgucgacaccgucuccgucggcaacacccucuacugcgucaacaagcaggagggcaagucccucuacgucaagggcgagcccaucaucaacuucuacgacccccucgucuuccccuccgacgaguucgacgccuccaucucccaggucaacgagaagaucaaccagucccucgccuucauccgcaaguccgacgagcuccuccacaacgucaacgucggcaaguccaccaccaacaucaugaucaccaccaucaucaucgucaucaucgucauccuccuccuccucaucgccgucggccucuuccucuacugcaaggcccgcuccacccccgucacccucuccaaggaccagcucuccggcaucaacaacaucgccuucuccaacugaggacuaguacuggcugcaucucccuuuccucuguccuccauccuucucccaggauggugaagggggaccugguacccagugauccccaccccaggauccuaaaucaugacuuaccugcuaauaaaaacucauuggaaaagugagaagaucuaaaaaaaaaaaaaaaaaaaaaaaaaaaaaaaaaaaaaaaaaaaaaaaaaaaaaaaaaaaaaaaaugcaucccccccccccccccccccccccccccccccaaaggcucuuuucagagccaccagaauu

SEQ ID NO: 16238 - RNA, 2010 nt, Artificial Sequence
  mRNA product Design b-5 comprising derived and/or modified sequence from HRSV(Memphis-37)__AIY60640.1__F_DSCav1_mut4 (opt3)
gggagacuccugucgggcggaaguaggaggaguagaguuuaaaaacaguacucuuuuuccgguucgggacguaguugaagcaacgacaagccggauaaccgcucuugagacaggaagcuuaccauggagcugcccauccucaagaccaacgccauuacaacuauacuugcugcagugacgcugugcuucgccagcucccagaauaucaccgaagaguuuuaccaaucuacauguucagcggucaguaaaggcuauuugagcgcuuuaagaacugggugguacaccuccguuauuacaaucgaacugucuaacauuaaggagaauaaaugcaacggaaccgacgccaaggugaaacuaaucaagcaggaacucgauaaguauaaaaaugcaguaacugagcugcagcuucugaugcagucgaccccugccgcugguucaggcagcgcaauauguagugggaucgccgugugcaaggucuugcaccucgagggagaagugaacaaaauuaagaaugcucugcuguccacaaacaaagccguugugucucucagcaauggcgucuccguguuaacguucaagguacuggaccuuaagaacuacaucgauaaacaauugcugccaauucuaaauaagcagucauguaguaucagcaacauagagacuguuauugaauuucagcagaaaaauaacaggcuccuggagaucacccgggaguucucugugaaugcgggugucacaacuccgguguccaccuauaugcuuacaaacucagaacuguugagccucauuaacgacaugcccaucaccaaugaucaaaagaaacugaugaguaacaaugugcagaucguccgccagcagucuuacuccauuaugugcauaaucaaggaggaaguuuuagcauaugugguacaacugccucucuacggggugauugacacgccauguuggaaacuucauacuagcccccugugcacaaccaacacuaaggagggaucgaauaucuguuugacacgaaccgaucguggcugguacugcgacaacgccggcucugucuccuuuuucccucaggcugaaacguguaaggugcagucaaauagaguguuuugcgauaccaugaacaguagaacacugccaagcgaggugaaucucugcaacauagacauuuucaaucccaaauaugauuguaagaucaugacuuccaaaaccgacgucucuagcucagugaucacaagucugggggccauuguauccugcuacggaaagacuaaauguaccgcaagcaacaagaauagggguaucauuaagacauuuucuaacggcugcgauuauguuucaaauaaagggguggacaccgucagugugggaaacacucuuuacugugucaacaagcaagagggcaaaagccuguaugugaagggugaaccuauaaucaauuucuacgacccauugguuuuuccguccgaugaguucgacgcuucuauuucgcagguuaacgagaaaaucaaucagagccucgccuuuauccggaaguccgaugaacuguuacacaacguaaaugucgggaagucaacgacaaacauuaugauaaccacuaucauuaucgugauuaucguuauacugcuacuccugaucgcggugggacuuuucuuguauugcaaagcccgcaguacccccgucacacugucuaaggaccagcucagcggcauuaauaacaucgcauucuccaauugaggacuaguacuggcugcaucucccuuuccucuguccuccauccuucucccaggauggugaagggggaccugguacccagugauccccaccccaggauccuaaaucaugacuuaccugcuaauaaaaacucauuggaaaagugagaagaucuaaaaaaaaaaaaaaaaaaaaaaaaaaaaaaaaaaaaaaaaaaaaaaaaaaaaaaaaaaaaaaaaugcaucccccccccccccccccccccccccccccccaaaggcucuuuucagagccaccagaauu

SEQ ID NO: 16239 - RNA, 2010 nt, Artificial Sequence
  mRNA product Design b-5 comprising derived and/or modified sequence from HRSV(Memphis-37)__AIY60640.1__F_DSCav1_mut4 (opt4)
gggagacuccugucgggcggaaguaggaggaguagaguuuaaaaacaguacucuuuuuccgguucgggacguaguugaagcaacgacaagccggauaaccgcucuugagacaggaagcuuaccauggagcugcccauccugaagaccaacgccaucaccaccauccuggccgccgugacccugugcuucgccagcagccagaacaucaccgaggaguucuaccagagcaccugcagcgccgugagcaagggcuaccugagcgcccugagaaccggcugguacaccagcgugaucaccaucgagcugagcaacaucaaggagaacaagugcaacggcaccgacgccaaggugaagcugaucaagcaggagcuggacaaguacaagaacgccgugaccgagcugcagcugcugaugcagagcacccccgccgccggcagcggcagcgccaucugcagcggcaucgccgugugcaaggugcugcaccuggagggcgaggugaacaagaucaagaacgcccugcugagcaccaacaaggccguggugagccugagcaacggcgugagcgugcugaccuucaaggugcuggaccugaagaacuacaucgacaagcagcugcugcccauccugaacaagcagagcugcagcaucagcaacaucgagaccgugaucgaguuccagcagaagaacaacagacugcuggagaucaccagagaguucagcgugaacgccggcgugaccacccccgugagcaccuacaugcugaccaacagcgagcugcugagccugaucaacgacaugcccaucaccaacgaccagaagaagcugaugagcaacaacgugcagaucgugagacagcagagcuacagcaucaugugcaucaucaaggaggaggugcuggccuacguggugcagcugccccuguacggcgugaucgacacccccugcuggaagcugcacaccagcccccugugcaccaccaacaccaaggagggcagcaacaucugccugaccagaaccgacagaggcugguacugcgacaacgccggcagcgugagcuucuucccccaggccgagaccugcaaggugcagagcaacagaguguucugcgacaccaugaacagcagaacccugcccagcgaggugaaccugugcaacaucgacaucuucaaccccaaguacgacugcaagaucaugaccagcaagaccgacgugagcagcagcgugaucaccagccugggcgccaucgugagcugcuacggcaagaccaagugcaccgccagcaacaagaacagaggcaucaucaagaccuucagcaacggcugcgacuacgugagcaacaagggcguggacaccgugagcgugggcaacacccuguacugcgugaacaagcaggagggcaagagccuguacgugaagggcgagcccaucaucaacuucuacgacccccugguguuccccagcgacgaguucgacgccagcaucagccaggugaacgagaagaucaaccagagccuggccuucaucagaaagagcgacgagcugcugcacaacgugaacgugggcaagagcaccaccaacaucaugaucaccaccaucaucaucgugaucaucgugauccugcugcugcugaucgccgugggccuguuccuguacugcaaggccagaagcacccccgugacccugagcaaggaccagcugagcggcaucaacaacaucgccuucagcaacugaggacuaguacuggcugcaucucccuuuccucuguccuccauccuucucccaggauggugaagggggaccugguacccagugauccccaccccaggauccuaaaucaugacuuaccugcuaauaaaaacucauuggaaaagugagaagaucuaaaaaaaaaaaaaaaaaaaaaaaaaaaaaaaaaaaaaaaaaaaaaaaaaaaaaaaaaaaaaaaaugcaucccccccccccccccccccccccccccccccaaaggcucuuuucagagccaccagaauu

SEQ ID NO: 16240 - RNA, 2010 nt, Artificial Sequence
  mRNA product Design b-5 comprising derived and/or modified sequence from HRSV(Memphis-37)__AIY60640.1__F_DSCav1_mut4 (opt5)
gggagacuccugucgggcggaaguaggaggaguagaguuuaaaaacaguacucuuuuuccgguucgggacguaguugaagcaacgacaagccggauaaccgcucuugagacaggaagcuuaccauggagcugcccauccucaagaccaacgccauuacaacgauccuggcugccgugacccuuugcuucgcgagcucccagaauauuacagaagaguuuuaccaaucuaccuguagcgcugucuccaaaggcuaucugucugcccucagaacagggugguacaccagcguuaucacaauugaacuguccaacaucaaggagaauaaaugcaacggaaccgacgccaaggugaaacuuaucaagcaggaacuggauaaguauaaaaaugcugugacggagcuccagcugcugaugcagucuaccccugccgcuggcagcggguccgccauuuguagcggaaucgcggucugcaaggugcuccaccuggagggcgaaguuaacaaaauuaagaaugcccuucugucuacaaacaaagcuguggucucccucagcaauggggugucuguucugaccuucaaggugcuugaccugaagaacuacaucgauaaacaacuccugccgauucugaauaagcaguccuguagcaucucuaacauugagacagucaucgaauuucagcagaaaaauaaccggcuccuggagaucacccgcgaguucuccgugaaugccggagugacgacacccgucagcaccuauaugcuuacaaacuccgaacugcucucucugauuaacgacaugccuaucaccaaugaucaaaagaaacuuaugagcaacaauguucagauugugagacagcaguccuacagcaucaugugcauuaucaaggaggaagugcuggcuuaugucgugcaacucccccuguacggcguuaucgacaccccuuguuggaaacugcauacaucuccccucugcacgaccaacacaaaggagggcuccaauauuugucugacccggacagaucgcgggugguacugcgacaacgccggaagcgugagcuuuuucccucaggcggaaaccuguaagguccagucuaauagaguguuuugcgauacgaugaacuccagaacacugccgucugagguuaaucucugcaacaucgacauuuucaaucccaaauaugauuguaagaucaugaccagcaaaaccgacguguccagcucugucauuacaucccugggcgccaucgugagcugcuacgggaagaccaaauguacagcuucuaacaagaaucggggaaucauuaagacguuuuccaacggcugcgauuaugucagcaauaaagggguggacaccguuuccgugggaaacacacuuuacugugucaacaagcaagagggcaaaucucuguaugugaagggcgaaccuaucauuaauuucuacgacccccucguuuuuccuagcgaugaguucgacgccuccaucucucaggugaacgaaaagauuaaucagagccuggcuuuuauccgcaaguccgaugagcugcuccacaacgucaauguggggaaaagcaccacaaacauuaugaucaccacgaucauuaucgugauuaucguuauucugcuucugcucaucgccgucggacuguuccuguauugcaaagccagaucuacccccgugacacuuuccaaggaccagcucagcggcaucaauaacauugcuuucucuaauugaggacuaguacuggcugcaucucccuuuccucuguccuccauccuucucccaggauggugaagggggaccugguacccagugauccccaccccaggauccuaaaucaugacuuaccugcuaauaaaaacucauuggaaaagugagaagaucuaaaaaaaaaaaaaaaaaaaaaaaaaaaaaaaaaaaaaaaaaaaaaaaaaaaaaaaaaaaaaaaaugcaucccccccccccccccccccccccccccccccaaaggcucuuuucagagccaccagaauu

SEQ ID NO: 16241 - RNA, 2010 nt, Artificial Sequence
  mRNA product Design b-5 comprising derived and/or modified sequence from HRSV(Memphis-37)__AIY60640.1__F_DSCav1_mut4 (opt6)
gggagacuccugucgggcggaaguaggaggaguagaguuuaaaaacaguacucuuuuuccgguucgggacguaguugaagcaacgacaagccggauaaccgcucuugagacaggaagcuuaccauggaacucccaauccuaaaaacaaacgcaauaacaacaauauuagcagccguaacacucuguuucgccucaucccaaaacauaacagaagaauuuuaucaaucuacauguuccgccgucaguaaaggauaucuaucagccuuaagaacaggcugguacacaucaguaaucaccauagaauuauccaacauaaaagaaaacaaaugcaauggcacagaugccaaaguaaaacuaaucaaacaagaacuugauaaauauaaaaacgcaguaacagaauuacaauuauuaaugcaaagcacaccagccgcaggaucaggaucagcaauauguucaggaauagcagucuguaaaguacuacacuuagaaggagaaguaaacaaaauuaaaaacgcauuacuaagcaccaauaaagcaguaguaucacuaucaaacggcguauccguauuaacguucaaaguccucgaccugaaaaacuacauagauaaacaacuacuaccaauacuaaauaaacaaucaugcucaauaucaaacauagaaacuguuaucgaauuucaacagaaaaauaaccgacuacuagaaaucaccagagaauuuucaguaaacgcaggcgucacuacaccaguauccacauacaugcuaaccaacucggaauuacuuucccucauaaacgacaugccaauaacaaacgaccaaaagaaacuuaugucaaacaacguucaaauaguccgccaacaaucauacucaauaauguguaucauaaaagaagaaguccuagcauaugucguacaacuaccauuauacggaguaauugacacaccuugcuggaaacuacacacauccccacuauguacaacaaacacuaaagaaggaucaaacaucugccuaaccagaacagacagaggcugguauugcgacaacgcaggaucaguaucauucuucccacaagcagaaacaugcaaaguacaaucaaacagagucuucugcgacaccaugaacagcagaacccucccauccgaaguaaacuuaugcaacaucgauaucuucaacccaaaauacgacuguaaaauaaugacaucaaaaacagacguuucauccucaguaauaacaucauuaggugccauaguuucauguuacggaaaaaccaaauguaccgcaucaaacaaaaacagaggcauuauuaaaacauucucuaacggaugcgacuaugucaguaacaaaggaguagacacaguaucagucggaaacacauuauauugcguaaauaaacaagaaggaaaaagucuauacguaaaaggagaaccaauaauaaacuuuuacgacccucucguauucccaucagacgaauuugaugcauccauaucacaagucaacgaaaagauaaaccaaucccuagcauucauaagaaaaucagacgaacuacuccauaacguaaacguaggaaaaagcacaaccaauauaaugauaaccacaauaaucauaguaauaauagucauauuauuacuuuuaauugcaguaggacucuuucuauacugcaaagcaagaagcacaccaguaacacuaagcaaagaccaacuaucaggcaucaacaauaucgccuuuucaaauuaaggacuaguacuggcugcaucucccuuuccucuguccuccauccuucucccaggauggugaagggggaccugguacccagugauccccaccccaggauccuaaaucaugacuuaccugcuaauaaaaacucauuggaaaagugagaagaucuaaaaaaaaaaaaaaaaaaaaaaaaaaaaaaaaaaaaaaaaaaaaaaaaaaaaaaaaaaaaaaaaugcaucccccccccccccccccccccccccccccccaaaggcucuuuucagagccaccagaauu

SEQ ID NO: 16242 - RNA, 2010 nt, Artificial Sequence
  mRNA product Design b-5 comprising derived and/or modified sequence from HRSV(Memphis-37)__AIY60640.1__F_DSCav1_mut4 (opt11)
gggagacuccugucgggcggaaguaggaggaguagaguuuaaaaacaguacucuuuuuccgguucgggacguaguugaagcaacgacaagccggauaaccgcucuugagacaggaagcuuaccauggagcugcccauccucaagaccaacgccaucaccacgauccuggccgcggugacccugugcuucgcgagcucccagaacaucaccgaggaguucuaccagagcacgugcuccgccgucagcaagggcuaccucuccgcccugcgcaccgggugguacaccagcgugaucaccaucgagcuguccaacaucaaggagaacaagugcaacggcaccgacgccaaggugaaacucaucaagcaggagcuggacaaguacaagaacgccgucaccgagcugcagcuccugaugcagagcaccccggccgccggguccggcagcgcuaucugcuccgggaucgcggugugcaaggugcugcaccucgagggcgaggucaacaagaucaagaaugcccugcugagcaccaacaaggccguggugucccucagcaacggagucagcgugcuuaccuucaaggugcuggaccucaagaacuacaucgacaagcagcugcugccuauccucaacaagcagagcugcuccaucagcaacaucgagacggucaucgaguuccagcagaagaacaaccggcugcuggagaucacccgcgaguucuccgugaacgccggggugaccacccccgucagcacguacaugcucaccaacagcgaacugcugucccucaucaacgacaugcccaucaccaacgaccagaagaagcugaugagcaacaacgugcagaucgugcggcagcaguccuacagcaucaugugcaucaucaaggaggaaguccuggccuacguggugcagcucccucuguacggcgucaucgacacccccugcuggaagcugcacacgagcccccucugcaccaccaacaccaaggagggguccaacaucugccugacgcgcaccgaccggggcugguacugcgacaacgcgggguccgugagcuucuucccccaggccgagaccugcaaggugcagagcaaccgcgucuucugcgacacuaugaacagcagaacgcucccguccgaggugaaccugugcaacauagacauauucaaccccaaguacgacugcaagaucaugaccagcaagaccgacgucuccagcuccgugauuaccagccugggcgcaaucguguccugcuacggcaagacgaagugcaccgccagcaacaagaaccgggggaucaucaagaccuucuccaacggcugcgacuaugucagcaacaaggggguggacaccgugagcgucggaaacacgcucuacugcgugaacaagcaagagggcaaguccuuauacgugaagggggagcccaucaucaacuucuacgacccccuggucuucccgagcgacgaguucgacgccagcauaagccaggugaacgagaagaucaaccagucccucgcguucauccgcaagagcgacgagcugcugcacaacgugaacgucggcaaguccaccaccaacaucaugaucaccaccaucaucaucgugaucaucgugauccuccugcugcucaucgccgucgggcuguuccuguacugcaaggcccggagcacgcccgugaccuuguccaaggaccagcucagcggcaucaacaacaucgccuucuccaacugaggacuaguacuggcugcaucucccuuuccucuguccuccauccuucucccaggauggugaagggggaccugguacccagugauccccaccccaggauccuaaaucaugacuuaccugcuaauaaaaacucauuggaaaagugagaagaucuaaaaaaaaaaaaaaaaaaaaaaaaaaaaaaaaaaaaaaaaaaaaaaaaaaaaaaaaaaaaaaaaugcaucccccccccccccccccccccccccccccccaaaggcucuuuucagagccaccagaauu

SEQ ID NO: 16243 - RNA, 1916 nt, Artificial Sequence
  mRNA product Design c-1 comprising derived and/or modified sequence from HRSV(Memphis-37)__AIY60640.1__F_DSCav1_mut4 (opt1)
gggagaguccgcucagccagguugcagaagcggcuuagcguguguccuaaucuucucucugcguguagguaggccugugccgcaaacaagcuuaccauggagcugcccauccucaagaccaacgccaucaccacgauccuggccgcggugacccugugcuucgccagcucccagaacaucaccgaggaguucuaccagagcacgugcuccgccgucagcaagggcuaccucuccgcccugcgcaccgggugguacaccagcgugaucaccaucgagcuguccaacaucaaggagaacaagugcaacggcaccgacgccaaggugaagcucaucaagcaggagcuggacaaguacaagaacgcggucacggagcugcagcuccugaugcagagcaccccggccgccggcuccgggagcgcgaucugcuccggcaucgccgucugcaaggugcugcaccucgagggcgaggugaacaagaucaagaacgcccugcuguccaccaacaaggccgucgugagccucuccaacggggugagcguccugaccuucaaggugcuggaccucaagaacuacaucgacaagcagcugcugcccauccugaacaagcagagcugcuccaucagcaacaucgagaccgucaucgaguuccagcagaagaacaaccgccuccuggagaucacgcgggaguucagcgugaacgcgggcgugaccacccccgucuccaccuacaugcugacgaacagcgagcuccugucccugaucaacgacaugccgaucaccaacgaccagaagaagcucaugagcaacaacgugcagaucgugcgccagcaguccuacagcaucaugugcaucaucaaggaggagguccuggccuacguggugcagcugccccucuacggggucaucgacacccccugcuggaagcugcacaccagcccccugugcacgaccaacaccaaggagggcuccaacaucugccucacccggacggaccgcgggugguacugcgacaacgccggcagcguguccuucuucccgcaggccgagaccugcaagguccagagcaaccggguguucugcgacaccaugaacucccggacccugcccagcgaggugaaccucugcaacaucgacaucuucaaccccaaguacgacugcaagaucaugacguccaagaccgacgucagcuccagcgugaucaccucccugggcgccaucgugagcugcuacgggaagaccaagugcacggcgagcaacaagaaccgcggcaucaucaagaccuucuccaacgggugcgacuacgucagcaacaagggcguggacaccguguccgucggcaacacccuguacugcgugaacaagcaggagggcaagagccucuacgugaagggggagcccaucaucaacuucuacgacccgcuggucuuccccuccgacgaguucgacgccagcaucucccaggugaacgagaagaucaaccagagccuggccuucauccggaaguccgacgagcuccugcacaacgugaacgucggcaagagcaccacgaacaucaugaucaccaccaucaucaucgugaucaucgugauccugcugcuccugaucgccgucgggcuguuccucuacugcaaggcccgcuccacccccgugacgcugagcaaggaccagcuguccgggaucaacaacaucgcguucagcaacugaggacuaguguccaccugucccuccugggcugcuggauugucucguuuuccugccaaauaaacaggaucagcgcuuuacagaucuaaaaaaaaaaaaaaaaaaaaaaaaaaaaaaaaaaaaaaaaaaaaaaaaaaaaaaaaaaaaaaaaugcaucccccccccccccccccccccccccccccccaaaggcucuuuucagagccaccagaauu

SEQ ID NO: 16244 - RNA, 1916 nt, Artificial Sequence
  mRNA product Design c-1 comprising derived and/or modified sequence from HRSV(Memphis-37)__AIY60640.1__F_DSCav1_mut4 (opt1)
gggagaguccgcucagccagguugcagaagcggcuuagcguguguccuaaucuucucucugcguguagguaggccugugccgcaaacaagcuuaccauggagcugcccauccucaagaccaacgccaucaccacgauccuggccgcggugacccugugcuucgccagcucccagaacaucaccgaggaguucuaccagagcacgugcuccgccgucagcaagggcuaccucuccgcccugcgcaccgggugguacaccagcgugaucaccaucgagcuguccaacaucaaggagaacaagugcaacggcaccgacgccaaggugaagcucaucaagcaggagcuggacaaguacaagaacgcggucacggagcugcagcuccugaugcagagcaccccggccgccggguccggcagcgccaucugcuccgggaucgcggugugcaaggugcugcaccucgagggcgaggucaacaagaucaagaacgcccugcugagcaccaacaaggccguggugucccucagcaacggcgucuccgugcugaccuucaaggugcuggaccucaagaacuacaucgacaagcagcugcugcccauccucaacaagcagagcugcuccaucagcaacaucgagacggucaucgaguuccagcagaagaacaaccggcugcuggagaucacccgcgaguucuccgugaacgccggggugaccacccccgucagcacguacaugcucaccaacagcgagcugcugucccucaucaacgacaugcccaucaccaacgaccagaagaagcugaugagcaacaacgugcagaucgugcggcagcaguccuacagcaucaugugcaucaucaaggaggagguccuggccuacguggugcagcucccgcuguacggcgucaucgacacccccugcuggaagcugcacacgagcccccucugcaccaccaacaccaaggagggguccaacaucugccugacgcgcaccgaccggggcugguacugcgacaacgcgggguccgugagcuucuucccccaggccgagaccugcaaggugcaguccaaccgcgucuucugcgacaccaugaacagccggacgcucccguccgaggugaaccugugcaacaucgacaucuucaaccccaaguacgacugcaagaucaugaccagcaagaccgacgucuccagcuccgugaucaccagccugggcgccaucguguccugcuacggcaagacgaagugcaccgccagcaacaagaaccgggggaucaucaagaccuucuccaacggcugcgacuacgucagcaacaaggggguggacaccgugagcgucggcaacacgcucuacugcgugaacaagcaggagggcaagucccuguacgugaagggggagcccaucaucaacuucuacgacccccuggucuucccgagcgacgaguucgacgccuccaucagccaggugaacgagaagaucaaccagucccucgcguucauccgcaagagcgacgagcugcugcacaacgugaacgucggcaaguccaccaccaacaucaugaucaccaccaucaucaucgugaucaucgugauccuccugcugcucaucgccgucgggcuguuccuguacugcaaggcccggagcacgcccgugacccuguccaaggaccagcucagcggcaucaacaacaucgccuucuccaacugaggacuaguguccaccugucccuccugggcugcuggauugucucguuuuccugccaaauaaacaggaucagcgcuuuacagaucuaaaaaaaaaaaaaaaaaaaaaaaaaaaaaaaaaaaaaaaaaaaaaaaaaaaaaaaaaaaaaaaaugcaucccccccccccccccccccccccccccccccaaaggcucuuuucagagccaccagaauu

SEQ ID NO: 16245 - RNA, 1916 nt, Artificial Sequence
  mRNA product Design c-1 comprising derived and/or modified sequence from HRSV(Memphis-37)__AIY60640.1__F_DSCav1_mut4 (opt2)
gggagaguccgcucagccagguugcagaagcggcuuagcguguguccuaaucuucucucugcguguagguaggccugugccgcaaacaagcuuaccauggagcuccccauccucaagaccaacgccaucaccaccauccucgccgccgucacccucugcuucgccuccucccagaacaucaccgaggaguucuaccaguccaccugcuccgccgucuccaagggcuaccucuccgcccuccgcaccggcugguacaccuccgucaucaccaucgagcucuccaacaucaaggagaacaagugcaacggcaccgacgccaaggucaagcucaucaagcaggagcucgacaaguacaagaacgccgucaccgagcuccagcuccucaugcaguccacccccgccgccggcuccggcuccgccaucugcuccggcaucgccgucugcaagguccuccaccucgagggcgaggucaacaagaucaagaacgcccuccucuccaccaacaaggccgucgucucccucuccaacggcgucuccguccucaccuucaagguccucgaccucaagaacuacaucgacaagcagcuccuccccauccucaacaagcaguccugcuccaucuccaacaucgagaccgucaucgaguuccagcagaagaacaaccgccuccucgagaucacccgcgaguucuccgucaacgccggcgucaccacccccgucuccaccuacaugcucaccaacuccgagcuccucucccucaucaacgacaugcccaucaccaacgaccagaagaagcucauguccaacaacguccagaucguccgccagcaguccuacuccaucaugugcaucaucaaggaggagguccucgccuacgucguccagcucccccucuacggcgucaucgacacccccugcuggaagcuccacaccuccccccucugcaccaccaacaccaaggagggcuccaacaucugccucacccgcaccgaccgcggcugguacugcgacaacgccggcuccgucuccuucuucccccaggccgagaccugcaagguccaguccaaccgcgucuucugcgacaccaugaacucccgcacccuccccuccgaggucaaccucugcaacaucgacaucuucaaccccaaguacgacugcaagaucaugaccuccaagaccgacgucuccuccuccgucaucaccucccucggcgccaucgucuccugcuacggcaagaccaagugcaccgccuccaacaagaaccgcggcaucaucaagaccuucuccaacggcugcgacuacgucuccaacaagggcgucgacaccgucuccgucggcaacacccucuacugcgucaacaagcaggagggcaagucccucuacgucaagggcgagcccaucaucaacuucuacgacccccucgucuuccccuccgacgaguucgacgccuccaucucccaggucaacgagaagaucaaccagucccucgccuucauccgcaaguccgacgagcuccuccacaacgucaacgucggcaaguccaccaccaacaucaugaucaccaccaucaucaucgucaucaucgucauccuccuccuccucaucgccgucggccucuuccucuacugcaaggcccgcuccacccccgucacccucuccaaggaccagcucuccggcaucaacaacaucgccuucuccaacugaggacuaguguccaccugucccuccugggcugcuggauugucucguuuuccugccaaauaaacaggaucagcgcuuuacagaucuaaaaaaaaaaaaaaaaaaaaaaaaaaaaaaaaaaaaaaaaaaaaaaaaaaaaaaaaaaaaaaaaugcaucccccccccccccccccccccccccccccccaaaggcucuuuucagagccaccagaauu

SEQ ID NO: 16246 - RNA, 1916 nt, Artificial Sequence
  mRNA product Design c-1 comprising derived and/or modified sequence from HRSV(Memphis-37)__AIY60640.1__F_DSCav1_mut4 (opt3)
gggagaguccgcucagccagguugcagaagcggcuuagcguguguccuaaucuucucucugcguguagguaggccugugccgcaaacaagcuuaccauggagcugcccauccucaagaccaacgccauuacaacuauacuugcugcagugacgcugugcuucgccagcucccagaauaucaccgaagaguuuuaccaaucuacauguucagcggucaguaaaggcuauuugagcgcuuuaagaacugggugguacaccuccguuauuacaaucgaacugucuaacauuaaggagaauaaaugcaacggaaccgacgccaaggugaaacuaaucaagcaggaacucgauaaguauaaaaaugcaguaacugagcugcagcuucugaugcagucgaccccugccgcugguucaggcagcgcaauauguagugggaucgccgugugcaaggucuugcaccucgagggagaagugaacaaaauuaagaaugcucugcuguccacaaacaaagccguugugucucucagcaauggcgucuccguguuaacguucaagguacuggaccuuaagaacuacaucgauaaacaauugcugccaauucuaaauaagcagucauguaguaucagcaacauagagacuguuauugaauuucagcagaaaaauaacaggcuccuggagaucacccgggaguucucugugaaugcgggugucacaacuccgguguccaccuauaugcuuacaaacucagaacuguugagccucauuaacgacaugcccaucaccaaugaucaaaagaaacugaugaguaacaaugugcagaucguccgccagcagucuuacuccauuaugugcauaaucaaggaggaaguuuuagcauaugugguacaacugccucucuacggggugauugacacgccauguuggaaacuucauacuagcccccugugcacaaccaacacuaaggagggaucgaauaucuguuugacacgaaccgaucguggcugguacugcgacaacgccggcucugucuccuuuuucccucaggcugaaacguguaaggugcagucaaauagaguguuuugcgauaccaugaacaguagaacacugccaagcgaggugaaucucugcaacauagacauuuucaaucccaaauaugauuguaagaucaugacuuccaaaaccgacgucucuagcucagugaucacaagucugggggccauuguauccugcuacggaaagacuaaauguaccgcaagcaacaagaauagggguaucauuaagacauuuucuaacggcugcgauuauguuucaaauaaagggguggacaccgucagugugggaaacacucuuuacugugucaacaagcaagagggcaaaagccuguaugugaagggugaaccuauaaucaauuucuacgacccauugguuuuuccguccgaugaguucgacgcuucuauuucgcagguuaacgagaaaaucaaucagagccucgccuuuauccggaaguccgaugaacuguuacacaacguaaaugucgggaagucaacgacaaacauuaugauaaccacuaucauuaucgugauuaucguuauacugcuacuccugaucgcggugggacuuuucuuguauugcaaagcccgcaguacccccgucacacugucuaaggaccagcucagcggcauuaauaacaucgcauucuccaauugaggacuaguguccaccugucccuccugggcugcuggauugucucguuuuccugccaaauaaacaggaucagcgcuuuacagaucuaaaaaaaaaaaaaaaaaaaaaaaaaaaaaaaaaaaaaaaaaaaaaaaaaaaaaaaaaaaaaaaaugcaucccccccccccccccccccccccccccccccaaaggcucuuuucagagccaccagaauu

SEQ ID NO: 16247 - RNA, 1916 nt, Artificial Sequence
  mRNA product Design c-1 comprising derived and/or modified sequence from HRSV(Memphis-37)__AIY60640.1__F_DSCav1_mut4 (opt4)
gggagaguccgcucagccagguugcagaagcggcuuagcguguguccuaaucuucucucugcguguagguaggccugugccgcaaacaagcuuaccauggagcugcccauccugaagaccaacgccaucaccaccauccuggccgccgugacccugugcuucgccagcagccagaacaucaccgaggaguucuaccagagcaccugcagcgccgugagcaagggcuaccugagcgcccugagaaccggcugguacaccagcgugaucaccaucgagcugagcaacaucaaggagaacaagugcaacggcaccgacgccaaggugaagcugaucaagcaggagcuggacaaguacaagaacgccgugaccgagcugcagcugcugaugcagagcacccccgccgccggcagcggcagcgccaucugcagcggcaucgccgugugcaaggugcugcaccuggagggcgaggugaacaagaucaagaacgcccugcugagcaccaacaaggccguggugagccugagcaacggcgugagcgugcugaccuucaaggugcuggaccugaagaacuacaucgacaagcagcugcugcccauccugaacaagcagagcugcagcaucagcaacaucgagaccgugaucgaguuccagcagaagaacaacagacugcuggagaucaccagagaguucagcgugaacgccggcgugaccacccccgugagcaccuacaugcugaccaacagcgagcugcugagccugaucaacgacaugcccaucaccaacgaccagaagaagcugaugagcaacaacgugcagaucgugagacagcagagcuacagcaucaugugcaucaucaaggaggaggugcuggccuacguggugcagcugccccuguacggcgugaucgacacccccugcuggaagcugcacaccagcccccugugcaccaccaacaccaaggagggcagcaacaucugccugaccagaaccgacagaggcugguacugcgacaacgccggcagcgugagcuucuucccccaggccgagaccugcaaggugcagagcaacagaguguucugcgacaccaugaacagcagaacccugcccagcgaggugaaccugugcaacaucgacaucuucaaccccaaguacgacugcaagaucaugaccagcaagaccgacgugagcagcagcgugaucaccagccugggcgccaucgugagcugcuacggcaagaccaagugcaccgccagcaacaagaacagaggcaucaucaagaccuucagcaacggcugcgacuacgugagcaacaagggcguggacaccgugagcgugggcaacacccuguacugcgugaacaagcaggagggcaagagccuguacgugaagggcgagcccaucaucaacuucuacgacccccugguguuccccagcgacgaguucgacgccagcaucagccaggugaacgagaagaucaaccagagccuggccuucaucagaaagagcgacgagcugcugcacaacgugaacgugggcaagagcaccaccaacaucaugaucaccaccaucaucaucgugaucaucgugauccugcugcugcugaucgccgugggccuguuccuguacugcaaggccagaagcacccccgugacccugagcaaggaccagcugagcggcaucaacaacaucgccuucagcaacugaggacuaguguccaccugucccuccugggcugcuggauugucucguuuuccugccaaauaaacaggaucagcgcuuuacagaucuaaaaaaaaaaaaaaaaaaaaaaaaaaaaaaaaaaaaaaaaaaaaaaaaaaaaaaaaaaaaaaaaugcaucccccccccccccccccccccccccccccccaaaggcucuuuucagagccaccagaauu

SEQ ID NO: 16248 - RNA, 1916 nt, Artificial Sequence
  mRNA product Design c-1 comprising derived and/or modified sequence from HRSV(Memphis-37)__AIY60640.1__F_DSCav1_mut4 (opt5)
gggagaguccgcucagccagguugcagaagcggcuuagcguguguccuaaucuucucucugcguguagguaggccugugccgcaaacaagcuuaccauggagcugcccauccucaagaccaacgccauuacaacgauccuggcugccgugacccuuugcuucgcgagcucccagaauauuacagaagaguuuuaccaaucuaccuguagcgcugucuccaaaggcuaucugucugcccucagaacagggugguacaccagcguuaucacaauugaacuguccaacaucaaggagaauaaaugcaacggaaccgacgccaaggugaaacuuaucaagcaggaacuggauaaguauaaaaaugcugugacggagcuccagcugcugaugcagucuaccccugccgcuggcagcggguccgccauuuguagcggaaucgcggucugcaaggugcuccaccuggagggcgaaguuaacaaaauuaagaaugcccuucugucuacaaacaaagcuguggucucccucagcaauggggugucuguucugaccuucaaggugcuugaccugaagaacuacaucgauaaacaacuccugccgauucugaauaagcaguccuguagcaucucuaacauugagacagucaucgaauuucagcagaaaaauaaccggcuccuggagaucacccgcgaguucuccgugaaugccggagugacgacacccgucagcaccuauaugcuuacaaacuccgaacugcucucucugauuaacgacaugccuaucaccaaugaucaaaagaaacuuaugagcaacaauguucagauugugagacagcaguccuacagcaucaugugcauuaucaaggaggaagugcuggcuuaugucgugcaacucccccuguacggcguuaucgacaccccuuguuggaaacugcauacaucuccccucugcacgaccaacacaaaggagggcuccaauauuugucugacccggacagaucgcgggugguacugcgacaacgccggaagcgugagcuuuuucccucaggcggaaaccuguaagguccagucuaauagaguguuuugcgauacgaugaacuccagaacacugccgucugagguuaaucucugcaacaucgacauuuucaaucccaaauaugauuguaagaucaugaccagcaaaaccgacguguccagcucugucauuacaucccugggcgccaucgugagcugcuacgggaagaccaaauguacagcuucuaacaagaaucggggaaucauuaagacguuuuccaacggcugcgauuaugucagcaauaaagggguggacaccguuuccgugggaaacacacuuuacugugucaacaagcaagagggcaaaucucuguaugugaagggcgaaccuaucauuaauuucuacgacccccucguuuuuccuagcgaugaguucgacgccuccaucucucaggugaacgaaaagauuaaucagagccuggcuuuuauccgcaaguccgaugagcugcuccacaacgucaauguggggaaaagcaccacaaacauuaugaucaccacgaucauuaucgugauuaucguuauucugcuucugcucaucgccgucggacuguuccuguauugcaaagccagaucuacccccgugacacuuuccaaggaccagcucagcggcaucaauaacauugcuuucucuaauugaggacuaguguccaccugucccuccugggcugcuggauugucucguuuuccugccaaauaaacaggaucagcgcuuuacagaucuaaaaaaaaaaaaaaaaaaaaaaaaaaaaaaaaaaaaaaaaaaaaaaaaaaaaaaaaaaaaaaaaugcaucccccccccccccccccccccccccccccccaaaggcucuuuucagagccaccagaauu

SEQ ID NO: 16249 - RNA, 1916 nt, Artificial Sequence
  mRNA product Design c-1 comprising derived and/or modified sequence from HRSV(Memphis-37)__AIY60640.1__F_DSCav1_mut4 (opt6)
gggagaguccgcucagccagguugcagaagcggcuuagcguguguccuaaucuucucucugcguguagguaggccugugccgcaaacaagcuuaccauggaacucccaauccuaaaaacaaacgcaauaacaacaauauuagcagccguaacacucuguuucgccucaucccaaaacauaacagaagaauuuuaucaaucuacauguuccgccgucaguaaaggauaucuaucagccuuaagaacaggcugguacacaucaguaaucaccauagaauuauccaacauaaaagaaaacaaaugcaauggcacagaugccaaaguaaaacuaaucaaacaagaacuugauaaauauaaaaacgcaguaacagaauuacaauuauuaaugcaaagcacaccagccgcaggaucaggaucagcaauauguucaggaauagcagucuguaaaguacuacacuuagaaggagaaguaaacaaaauuaaaaacgcauuacuaagcaccaauaaagcaguaguaucacuaucaaacggcguauccguauuaacguucaaaguccucgaccugaaaaacuacauagauaaacaacuacuaccaauacuaaauaaacaaucaugcucaauaucaaacauagaaacuguuaucgaauuucaacagaaaaauaaccgacuacuagaaaucaccagagaauuuucaguaaacgcaggcgucacuacaccaguauccacauacaugcuaaccaacucggaauuacuuucccucauaaacgacaugccaauaacaaacgaccaaaagaaacuuaugucaaacaacguucaaauaguccgccaacaaucauacucaauaauguguaucauaaaagaagaaguccuagcauaugucguacaacuaccauuauacggaguaauugacacaccuugcuggaaacuacacacauccccacuauguacaacaaacacuaaagaaggaucaaacaucugccuaaccagaacagacagaggcugguauugcgacaacgcaggaucaguaucauucuucccacaagcagaaacaugcaaaguacaaucaaacagagucuucugcgacaccaugaacagcagaacccucccauccgaaguaaacuuaugcaacaucgauaucuucaacccaaaauacgacuguaaaauaaugacaucaaaaacagacguuucauccucaguaauaacaucauuaggugccauaguuucauguuacggaaaaaccaaauguaccgcaucaaacaaaaacagaggcauuauuaaaacauucucuaacggaugcgacuaugucaguaacaaaggaguagacacaguaucagucggaaacacauuauauugcguaaauaaacaagaaggaaaaagucuauacguaaaaggagaaccaauaauaaacuuuuacgacccucucguauucccaucagacgaauuugaugcauccauaucacaagucaacgaaaagauaaaccaaucccuagcauucauaagaaaaucagacgaacuacuccauaacguaaacguaggaaaaagcacaaccaauauaaugauaaccacaauaaucauaguaauaauagucauauuauuacuuuuaauugcaguaggacucuuucuauacugcaaagcaagaagcacaccaguaacacuaagcaaagaccaacuaucaggcaucaacaauaucgccuuuucaaauuaaggacuaguguccaccugucccuccugggcugcuggauugucucguuuuccugccaaauaaacaggaucagcgcuuuacagaucuaaaaaaaaaaaaaaaaaaaaaaaaaaaaaaaaaaaaaaaaaaaaaaaaaaaaaaaaaaaaaaaaugcaucccccccccccccccccccccccccccccccaaaggcucuuuucagagccaccagaauu

SEQ ID NO: 16250 - RNA, 1916 nt, Artificial Sequence
  mRNA product Design c-1 comprising derived and/or modified sequence from HRSV(Memphis-37)__AIY60640.1__F_DSCav1_mut4 (opt11)
gggagaguccgcucagccagguugcagaagcggcuuagcguguguccuaaucuucucucugcguguagguaggccugugccgcaaacaagcuuaccauggagcugcccauccucaagaccaacgccaucaccacgauccuggccgcggugacccugugcuucgcgagcucccagaacaucaccgaggaguucuaccagagcacgugcuccgccgucagcaagggcuaccucuccgcccugcgcaccgggugguacaccagcgugaucaccaucgagcuguccaacaucaaggagaacaagugcaacggcaccgacgccaaggugaaacucaucaagcaggagcuggacaaguacaagaacgccgucaccgagcugcagcuccugaugcagagcaccccggccgccggguccggcagcgcuaucugcuccgggaucgcggugugcaaggugcugcaccucgagggcgaggucaacaagaucaagaaugcccugcugagcaccaacaaggccguggugucccucagcaacggagucagcgugcuuaccuucaaggugcuggaccucaagaacuacaucgacaagcagcugcugccuauccucaacaagcagagcugcuccaucagcaacaucgagacggucaucgaguuccagcagaagaacaaccggcugcuggagaucacccgcgaguucuccgugaacgccggggugaccacccccgucagcacguacaugcucaccaacagcgaacugcugucccucaucaacgacaugcccaucaccaacgaccagaagaagcugaugagcaacaacgugcagaucgugcggcagcaguccuacagcaucaugugcaucaucaaggaggaaguccuggccuacguggugcagcucccucuguacggcgucaucgacacccccugcuggaagcugcacacgagcccccucugcaccaccaacaccaaggagggguccaacaucugccugacgcgcaccgaccggggcugguacugcgacaacgcgggguccgugagcuucuucccccaggccgagaccugcaaggugcagagcaaccgcgucuucugcgacacuaugaacagcagaacgcucccguccgaggugaaccugugcaacauagacauauucaaccccaaguacgacugcaagaucaugaccagcaagaccgacgucuccagcuccgugauuaccagccugggcgcaaucguguccugcuacggcaagacgaagugcaccgccagcaacaagaaccgggggaucaucaagaccuucuccaacggcugcgacuaugucagcaacaaggggguggacaccgugagcgucggaaacacgcucuacugcgugaacaagcaagagggcaaguccuuauacgugaagggggagcccaucaucaacuucuacgacccccuggucuucccgagcgacgaguucgacgccagcauaagccaggugaacgagaagaucaaccagucccucgcguucauccgcaagagcgacgagcugcugcacaacgugaacgucggcaaguccaccaccaacaucaugaucaccaccaucaucaucgugaucaucgugauccuccugcugcucaucgccgucgggcuguuccuguacugcaaggcccggagcacgcccgugaccuuguccaaggaccagcucagcggcaucaacaacaucgccuucuccaacugaggacuaguguccaccugucccuccugggcugcuggauugucucguuuuccugccaaauaaacaggaucagcgcuuuacagaucuaaaaaaaaaaaaaaaaaaaaaaaaaaaaaaaaaaaaaaaaaaaaaaaaaaaaaaaaaaaaaaaaugcaucccccccccccccccccccccccccccccccaaaggcucuuuucagagccaccagaauu

SEQ ID NO: 16251 - RNA, 2006 nt, Artificial Sequence
  mRNA product Design c-2 comprising derived and/or modified sequence from HRSV(Memphis-37)__AIY60640.1__F_DSCav1_mut4 (opt1)
gggagacuccugucgggcggaaguaggaggaguagaguuuaaaaacaguacucuuuuuccgguucgggacguaguugaagcaacgacaagccggauaaccgcucuugagacaggaagcuuaccauggagcugcccauccucaagaccaacgccaucaccacgauccuggccgcggugacccugugcuucgccagcucccagaacaucaccgaggaguucuaccagagcacgugcuccgccgucagcaagggcuaccucuccgcccugcgcaccgggugguacaccagcgugaucaccaucgagcuguccaacaucaaggagaacaagugcaacggcaccgacgccaaggugaagcucaucaagcaggagcuggacaaguacaagaacgcggucacggagcugcagcuccugaugcagagcaccccggccgccggcuccgggagcgcgaucugcuccggcaucgccgucugcaaggugcugcaccucgagggcgaggugaacaagaucaagaacgcccugcuguccaccaacaaggccgucgugagccucuccaacggggugagcguccugaccuucaaggugcuggaccucaagaacuacaucgacaagcagcugcugcccauccugaacaagcagagcugcuccaucagcaacaucgagaccgucaucgaguuccagcagaagaacaaccgccuccuggagaucacgcgggaguucagcgugaacgcgggcgugaccacccccgucuccaccuacaugcugacgaacagcgagcuccugucccugaucaacgacaugccgaucaccaacgaccagaagaagcucaugagcaacaacgugcagaucgugcgccagcaguccuacagcaucaugugcaucaucaaggaggagguccuggccuacguggugcagcugccccucuacggggucaucgacacccccugcuggaagcugcacaccagcccccugugcacgaccaacaccaaggagggcuccaacaucugccucacccggacggaccgcgggugguacugcgacaacgccggcagcguguccuucuucccgcaggccgagaccugcaagguccagagcaaccggguguucugcgacaccaugaacucccggacccugcccagcgaggugaaccucugcaacaucgacaucuucaaccccaaguacgacugcaagaucaugacguccaagaccgacgucagcuccagcgugaucaccucccugggcgccaucgugagcugcuacgggaagaccaagugcacggcgagcaacaagaaccgcggcaucaucaagaccuucuccaacgggugcgacuacgucagcaacaagggcguggacaccguguccgucggcaacacccuguacugcgugaacaagcaggagggcaagagccucuacgugaagggggagcccaucaucaacuucuacgacccgcuggucuuccccuccgacgaguucgacgccagcaucucccaggugaacgagaagaucaaccagagccuggccuucauccggaaguccgacgagcuccugcacaacgugaacgucggcaagagcaccacgaacaucaugaucaccaccaucaucaucgugaucaucgugauccugcugcuccugaucgccgucgggcuguuccucuacugcaaggcccgcuccacccccgugacgcugagcaaggaccagcuguccgggaucaacaacaucgcguucagcaacugaggacuaguggaagcauuuuccuggcugauuaaaagaaauuacucagcuauggucaucuguuccuguuagaaggcuaugcagcauauuauauacuaugcgcauguuaugaaaugcauaauaaaaaauuuuaaaaaaucuaaaagaucuaaaaaaaaaaaaaaaaaaaaaaaaaaaaaaaaaaaaaaaaaaaaaaaaaaaaaaaaaaaaaaaaugcaucccccccccccccccccccccccccccccccaaaggcucuuuucagagccaccagaauu

SEQ ID NO: 16252 - RNA, 2006 nt, Artificial Sequence
  mRNA product Design c-2 comprising derived and/or modified sequence from HRSV(Memphis-37)__AIY60640.1__F_DSCav1_mut4 (opt1)
gggagacuccugucgggcggaaguaggaggaguagaguuuaaaaacaguacucuuuuuccgguucgggacguaguugaagcaacgacaagccggauaaccgcucuugagacaggaagcuuaccauggagcugcccauccucaagaccaacgccaucaccacgauccuggccgcggugacccugugcuucgccagcucccagaacaucaccgaggaguucuaccagagcacgugcuccgccgucagcaagggcuaccucuccgcccugcgcaccgggugguacaccagcgugaucaccaucgagcuguccaacaucaaggagaacaagugcaacggcaccgacgccaaggugaagcucaucaagcaggagcuggacaaguacaagaacgcggucacggagcugcagcuccugaugcagagcaccccggccgccggguccggcagcgccaucugcuccgggaucgcggugugcaaggugcugcaccucgagggcgaggucaacaagaucaagaacgcccugcugagcaccaacaaggccguggugucccucagcaacggcgucuccgugcugaccuucaaggugcuggaccucaagaacuacaucgacaagcagcugcugcccauccucaacaagcagagcugcuccaucagcaacaucgagacggucaucgaguuccagcagaagaacaaccggcugcuggagaucacccgcgaguucuccgugaacgccggggugaccacccccgucagcacguacaugcucaccaacagcgagcugcugucccucaucaacgacaugcccaucaccaacgaccagaagaagcugaugagcaacaacgugcagaucgugcggcagcaguccuacagcaucaugugcaucaucaaggaggagguccuggccuacguggugcagcucccgcuguacggcgucaucgacacccccugcuggaagcugcacacgagcccccucugcaccaccaacaccaaggagggguccaacaucugccugacgcgcaccgaccggggcugguacugcgacaacgcgggguccgugagcuucuucccccaggccgagaccugcaaggugcaguccaaccgcgucuucugcgacaccaugaacagccggacgcucccguccgaggugaaccugugcaacaucgacaucuucaaccccaaguacgacugcaagaucaugaccagcaagaccgacgucuccagcuccgugaucaccagccugggcgccaucguguccugcuacggcaagacgaagugcaccgccagcaacaagaaccgggggaucaucaagaccuucuccaacggcugcgacuacgucagcaacaaggggguggacaccgugagcgucggcaacacgcucuacugcgugaacaagcaggagggcaagucccuguacgugaagggggagcccaucaucaacuucuacgacccccuggucuucccgagcgacgaguucgacgccuccaucagccaggugaacgagaagaucaaccagucccucgcguucauccgcaagagcgacgagcugcugcacaacgugaacgucggcaaguccaccaccaacaucaugaucaccaccaucaucaucgugaucaucgugauccuccugcugcucaucgccgucgggcuguuccuguacugcaaggcccggagcacgcccgugacccuguccaaggaccagcucagcggcaucaacaacaucgccuucuccaacugaggacuaguggaagcauuuuccuggcugauuaaaagaaauuacucagcuauggucaucuguuccuguuagaaggcuaugcagcauauuauauacuaugcgcauguuaugaaaugcauaauaaaaaauuuuaaaaaaucuaaaagaucuaaaaaaaaaaaaaaaaaaaaaaaaaaaaaaaaaaaaaaaaaaaaaaaaaaaaaaaaaaaaaaaaugcaucccccccccccccccccccccccccccccccaaaggcucuuuucagagccaccagaauu

SEQ ID NO: 16253 - RNA, 2006 nt, Artificial Sequence
  mRNA product Design c-2 comprising derived and/or modified sequence from HRSV(Memphis-37)__AIY60640.1__F_DSCav1_mut4 (opt2)
gggagacuccugucgggcggaaguaggaggaguagaguuuaaaaacaguacucuuuuuccgguucgggacguaguugaagcaacgacaagccggauaaccgcucuugagacaggaagcuuaccauggagcuccccauccucaagaccaacgccaucaccaccauccucgccgccgucacccucugcuucgccuccucccagaacaucaccgaggaguucuaccaguccaccugcuccgccgucuccaagggcuaccucuccgcccuccgcaccggcugguacaccuccgucaucaccaucgagcucuccaacaucaaggagaacaagugcaacggcaccgacgccaaggucaagcucaucaagcaggagcucgacaaguacaagaacgccgucaccgagcuccagcuccucaugcaguccacccccgccgccggcuccggcuccgccaucugcuccggcaucgccgucugcaagguccuccaccucgagggcgaggucaacaagaucaagaacgcccuccucuccaccaacaaggccgucgucucccucuccaacggcgucuccguccucaccuucaagguccucgaccucaagaacuacaucgacaagcagcuccuccccauccucaacaagcaguccugcuccaucuccaacaucgagaccgucaucgaguuccagcagaagaacaaccgccuccucgagaucacccgcgaguucuccgucaacgccggcgucaccacccccgucuccaccuacaugcucaccaacuccgagcuccucucccucaucaacgacaugcccaucaccaacgaccagaagaagcucauguccaacaacguccagaucguccgccagcaguccuacuccaucaugugcaucaucaaggaggagguccucgccuacgucguccagcucccccucuacggcgucaucgacacccccugcuggaagcuccacaccuccccccucugcaccaccaacaccaaggagggcuccaacaucugccucacccgcaccgaccgcggcugguacugcgacaacgccggcuccgucuccuucuucccccaggccgagaccugcaagguccaguccaaccgcgucuucugcgacaccaugaacucccgcacccuccccuccgaggucaaccucugcaacaucgacaucuucaaccccaaguacgacugcaagaucaugaccuccaagaccgacgucuccuccuccgucaucaccucccucggcgccaucgucuccugcuacggcaagaccaagugcaccgccuccaacaagaaccgcggcaucaucaagaccuucuccaacggcugcgacuacgucuccaacaagggcgucgacaccgucuccgucggcaacacccucuacugcgucaacaagcaggagggcaagucccucuacgucaagggcgagcccaucaucaacuucuacgacccccucgucuuccccuccgacgaguucgacgccuccaucucccaggucaacgagaagaucaaccagucccucgccuucauccgcaaguccgacgagcuccuccacaacgucaacgucggcaaguccaccaccaacaucaugaucaccaccaucaucaucgucaucaucgucauccuccuccuccucaucgccgucggccucuuccucuacugcaaggcccgcuccacccccgucacccucuccaaggaccagcucuccggcaucaacaacaucgccuucuccaacugaggacuaguggaagcauuuuccuggcugauuaaaagaaauuacucagcuauggucaucuguuccuguuagaaggcuaugcagcauauuauauacuaugcgcauguuaugaaaugcauaauaaaaaauuuuaaaaaaucuaaaagaucuaaaaaaaaaaaaaaaaaaaaaaaaaaaaaaaaaaaaaaaaaaaaaaaaaaaaaaaaaaaaaaaaugcaucccccccccccccccccccccccccccccccaaaggcucuuuucagagccaccagaauu

SEQ ID NO: 16254 - RNA, 2006 nt, Artificial Sequence
  mRNA product Design c-2 comprising derived and/or modified sequence from HRSV(Memphis-37)__AIY60640.1__F_DSCav1_mut4 (opt3)
gggagacuccugucgggcggaaguaggaggaguagaguuuaaaaacaguacucuuuuuccgguucgggacguaguugaagcaacgacaagccggauaaccgcucuugagacaggaagcuuaccauggagcugcccauccucaagaccaacgccauuacaacuauacuugcugcagugacgcugugcuucgccagcucccagaauaucaccgaagaguuuuaccaaucuacauguucagcggucaguaaaggcuauuugagcgcuuuaagaacugggugguacaccuccguuauuacaaucgaacugucuaacauuaaggagaauaaaugcaacggaaccgacgccaaggugaaacuaaucaagcaggaacucgauaaguauaaaaaugcaguaacugagcugcagcuucugaugcagucgaccccugccgcugguucaggcagcgcaauauguagugggaucgccgugugcaaggucuugcaccucgagggagaagugaacaaaauuaagaaugcucugcuguccacaaacaaagccguugugucucucagcaauggcgucuccguguuaacguucaagguacuggaccuuaagaacuacaucgauaaacaauugcugccaauucuaaauaagcagucauguaguaucagcaacauagagacuguuauugaauuucagcagaaaaauaacaggcuccuggagaucacccgggaguucucugugaaugcgggugucacaacuccgguguccaccuauaugcuuacaaacucagaacuguugagccucauuaacgacaugcccaucaccaaugaucaaaagaaacugaugaguaacaaugugcagaucguccgccagcagucuuacuccauuaugugcauaaucaaggaggaaguuuuagcauaugugguacaacugccucucuacggggugauugacacgccauguuggaaacuucauacuagcccccugugcacaaccaacacuaaggagggaucgaauaucuguuugacacgaaccgaucguggcugguacugcgacaacgccggcucugucuccuuuuucccucaggcugaaacguguaaggugcagucaaauagaguguuuugcgauaccaugaacaguagaacacugccaagcgaggugaaucucugcaacauagacauuuucaaucccaaauaugauuguaagaucaugacuuccaaaaccgacgucucuagcucagugaucacaagucugggggccauuguauccugcuacggaaagacuaaauguaccgcaagcaacaagaauagggguaucauuaagacauuuucuaacggcugcgauuauguuucaaauaaagggguggacaccgucagugugggaaacacucuuuacugugucaacaagcaagagggcaaaagccuguaugugaagggugaaccuauaaucaauuucuacgacccauugguuuuuccguccgaugaguucgacgcuucuauuucgcagguuaacgagaaaaucaaucagagccucgccuuuauccggaaguccgaugaacuguuacacaacguaaaugucgggaagucaacgacaaacauuaugauaaccacuaucauuaucgugauuaucguuauacugcuacuccugaucgcggugggacuuuucuuguauugcaaagcccgcaguacccccgucacacugucuaaggaccagcucagcggcauuaauaacaucgcauucuccaauugaggacuaguggaagcauuuuccuggcugauuaaaagaaauuacucagcuauggucaucuguuccuguuagaaggcuaugcagcauauuauauacuaugcgcauguuaugaaaugcauaauaaaaaauuuuaaaaaaucuaaaagaucuaaaaaaaaaaaaaaaaaaaaaaaaaaaaaaaaaaaaaaaaaaaaaaaaaaaaaaaaaaaaaaaaugcaucccccccccccccccccccccccccccccccaaaggcucuuuucagagccaccagaauu

SEQ ID NO: 16255 - RNA, 2006 nt, Artificial Sequence
  mRNA product Design c-2 comprising derived and/or modified sequence from HRSV(Memphis-37)__AIY60640.1__F_DSCav1_mut4 (opt4)
gggagacuccugucgggcggaaguaggaggaguagaguuuaaaaacaguacucuuuuuccgguucgggacguaguugaagcaacgacaagccggauaaccgcucuugagacaggaagcuuaccauggagcugcccauccugaagaccaacgccaucaccaccauccuggccgccgugacccugugcuucgccagcagccagaacaucaccgaggaguucuaccagagcaccugcagcgccgugagcaagggcuaccugagcgcccugagaaccggcugguacaccagcgugaucaccaucgagcugagcaacaucaaggagaacaagugcaacggcaccgacgccaaggugaagcugaucaagcaggagcuggacaaguacaagaacgccgugaccgagcugcagcugcugaugcagagcacccccgccgccggcagcggcagcgccaucugcagcggcaucgccgugugcaaggugcugcaccuggagggcgaggugaacaagaucaagaacgcccugcugagcaccaacaaggccguggugagccugagcaacggcgugagcgugcugaccuucaaggugcuggaccugaagaacuacaucgacaagcagcugcugcccauccugaacaagcagagcugcagcaucagcaacaucgagaccgugaucgaguuccagcagaagaacaacagacugcuggagaucaccagagaguucagcgugaacgccggcgugaccacccccgugagcaccuacaugcugaccaacagcgagcugcugagccugaucaacgacaugcccaucaccaacgaccagaagaagcugaugagcaacaacgugcagaucgugagacagcagagcuacagcaucaugugcaucaucaaggaggaggugcuggccuacguggugcagcugccccuguacggcgugaucgacacccccugcuggaagcugcacaccagcccccugugcaccaccaacaccaaggagggcagcaacaucugccugaccagaaccgacagaggcugguacugcgacaacgccggcagcgugagcuucuucccccaggccgagaccugcaaggugcagagcaacagaguguucugcgacaccaugaacagcagaacccugcccagcgaggugaaccugugcaacaucgacaucuucaaccccaaguacgacugcaagaucaugaccagcaagaccgacgugagcagcagcgugaucaccagccugggcgccaucgugagcugcuacggcaagaccaagugcaccgccagcaacaagaacagaggcaucaucaagaccuucagcaacggcugcgacuacgugagcaacaagggcguggacaccgugagcgugggcaacacccuguacugcgugaacaagcaggagggcaagagccuguacgugaagggcgagcccaucaucaacuucuacgacccccugguguuccccagcgacgaguucgacgccagcaucagccaggugaacgagaagaucaaccagagccuggccuucaucagaaagagcgacgagcugcugcacaacgugaacgugggcaagagcaccaccaacaucaugaucaccaccaucaucaucgugaucaucgugauccugcugcugcugaucgccgugggccuguuccuguacugcaaggccagaagcacccccgugacccugagcaaggaccagcugagcggcaucaacaacaucgccuucagcaacugaggacuaguggaagcauuuuccuggcugauuaaaagaaauuacucagcuauggucaucuguuccuguuagaaggcuaugcagcauauuauauacuaugcgcauguuaugaaaugcauaauaaaaaauuuuaaaaaaucuaaaagaucuaaaaaaaaaaaaaaaaaaaaaaaaaaaaaaaaaaaaaaaaaaaaaaaaaaaaaaaaaaaaaaaaugcaucccccccccccccccccccccccccccccccaaaggcucuuuucagagccaccagaauu

SEQ ID NO: 16256 - RNA, 2006 nt, Artificial Sequence
  mRNA product Design c-2 comprising derived and/or modified sequence from HRSV(Memphis-37)__AIY60640.1__F_DSCav1_mut4 (opt5)
gggagacuccugucgggcggaaguaggaggaguagaguuuaaaaacaguacucuuuuuccgguucgggacguaguugaagcaacgacaagccggauaaccgcucuugagacaggaagcuuaccauggagcugcccauccucaagaccaacgccauuacaacgauccuggcugccgugacccuuugcuucgcgagcucccagaauauuacagaagaguuuuaccaaucuaccuguagcgcugucuccaaaggcuaucugucugcccucagaacagggugguacaccagcguuaucacaauugaacuguccaacaucaaggagaauaaaugcaacggaaccgacgccaaggugaaacuuaucaagcaggaacuggauaaguauaaaaaugcugugacggagcuccagcugcugaugcagucuaccccugccgcuggcagcggguccgccauuuguagcggaaucgcggucugcaaggugcuccaccuggagggcgaaguuaacaaaauuaagaaugcccuucugucuacaaacaaagcuguggucucccucagcaauggggugucuguucugaccuucaaggugcuugaccugaagaacuacaucgauaaacaacuccugccgauucugaauaagcaguccuguagcaucucuaacauugagacagucaucgaauuucagcagaaaaauaaccggcuccuggagaucacccgcgaguucuccgugaaugccggagugacgacacccgucagcaccuauaugcuuacaaacuccgaacugcucucucugauuaacgacaugccuaucaccaaugaucaaaagaaacuuaugagcaacaauguucagauugugagacagcaguccuacagcaucaugugcauuaucaaggaggaagugcuggcuuaugucgugcaacucccccuguacggcguuaucgacaccccuuguuggaaacugcauacaucuccccucugcacgaccaacacaaaggagggcuccaauauuugucugacccggacagaucgcgggugguacugcgacaacgccggaagcgugagcuuuuucccucaggcggaaaccuguaagguccagucuaauagaguguuuugcgauacgaugaacuccagaacacugccgucugagguuaaucucugcaacaucgacauuuucaaucccaaauaugauuguaagaucaugaccagcaaaaccgacguguccagcucugucauuacaucccugggcgccaucgugagcugcuacgggaagaccaaauguacagcuucuaacaagaaucggggaaucauuaagacguuuuccaacggcugcgauuaugucagcaauaaagggguggacaccguuuccgugggaaacacacuuuacugugucaacaagcaagagggcaaaucucuguaugugaagggcgaaccuaucauuaauuucuacgacccccucguuuuuccuagcgaugaguucgacgccuccaucucucaggugaacgaaaagauuaaucagagccuggcuuuuauccgcaaguccgaugagcugcuccacaacgucaauguggggaaaagcaccacaaacauuaugaucaccacgaucauuaucgugauuaucguuauucugcuucugcucaucgccgucggacuguuccuguauugcaaagccagaucuacccccgugacacuuuccaaggaccagcucagcggcaucaauaacauugcuuucucuaauugaggacuaguggaagcauuuuccuggcugauuaaaagaaauuacucagcuauggucaucuguuccuguuagaaggcuaugcagcauauuauauacuaugcgcauguuaugaaaugcauaauaaaaaauuuuaaaaaaucuaaaagaucuaaaaaaaaaaaaaaaaaaaaaaaaaaaaaaaaaaaaaaaaaaaaaaaaaaaaaaaaaaaaaaaaugcaucccccccccccccccccccccccccccccccaaaggcucuuuucagagccaccagaauu

SEQ ID NO: 16257 - RNA, 2006 nt, Artificial Sequence
  mRNA product Design c-2 comprising derived and/or modified sequence from HRSV(Memphis-37)__AIY60640.1__F_DSCav1_mut4 (opt6)
gggagacuccugucgggcggaaguaggaggaguagaguuuaaaaacaguacucuuuuuccgguucgggacguaguugaagcaacgacaagccggauaaccgcucuugagacaggaagcuuaccauggaacucccaauccuaaaaacaaacgcaauaacaacaauauuagcagccguaacacucuguuucgccucaucccaaaacauaacagaagaauuuuaucaaucuacauguuccgccgucaguaaaggauaucuaucagccuuaagaacaggcugguacacaucaguaaucaccauagaauuauccaacauaaaagaaaacaaaugcaauggcacagaugccaaaguaaaacuaaucaaacaagaacuugauaaauauaaaaacgcaguaacagaauuacaauuauuaaugcaaagcacaccagccgcaggaucaggaucagcaauauguucaggaauagcagucuguaaaguacuacacuuagaaggagaaguaaacaaaauuaaaaacgcauuacuaagcaccaauaaagcaguaguaucacuaucaaacggcguauccguauuaacguucaaaguccucgaccugaaaaacuacauagauaaacaacuacuaccaauacuaaauaaacaaucaugcucaauaucaaacauagaaacuguuaucgaauuucaacagaaaaauaaccgacuacuagaaaucaccagagaauuuucaguaaacgcaggcgucacuacaccaguauccacauacaugcuaaccaacucggaauuacuuucccucauaaacgacaugccaauaacaaacgaccaaaagaaacuuaugucaaacaacguucaaauaguccgccaacaaucauacucaauaauguguaucauaaaagaagaaguccuagcauaugucguacaacuaccauuauacggaguaauugacacaccuugcuggaaacuacacacauccccacuauguacaacaaacacuaaagaaggaucaaacaucugccuaaccagaacagacagaggcugguauugcgacaacgcaggaucaguaucauucuucccacaagcagaaacaugcaaaguacaaucaaacagagucuucugcgacaccaugaacagcagaacccucccauccgaaguaaacuuaugcaacaucgauaucuucaacccaaaauacgacuguaaaauaaugacaucaaaaacagacguuucauccucaguaauaacaucauuaggugccauaguuucauguuacggaaaaaccaaauguaccgcaucaaacaaaaacagaggcauuauuaaaacauucucuaacggaugcgacuaugucaguaacaaaggaguagacacaguaucagucggaaacacauuauauugcguaaauaaacaagaaggaaaaagucuauacguaaaaggagaaccaauaauaaacuuuuacgacccucucguauucccaucagacgaauuugaugcauccauaucacaagucaacgaaaagauaaaccaaucccuagcauucauaagaaaaucagacgaacuacuccauaacguaaacguaggaaaaagcacaaccaauauaaugauaaccacaauaaucauaguaauaauagucauauuauuacuuuuaauugcaguaggacucuuucuauacugcaaagcaagaagcacaccaguaacacuaagcaaagaccaacuaucaggcaucaacaauaucgccuuuucaaauuaaggacuaguggaagcauuuuccuggcugauuaaaagaaauuacucagcuauggucaucuguuccuguuagaaggcuaugcagcauauuauauacuaugcgcauguuaugaaaugcauaauaaaaaauuuuaaaaaaucuaaaagaucuaaaaaaaaaaaaaaaaaaaaaaaaaaaaaaaaaaaaaaaaaaaaaaaaaaaaaaaaaaaaaaaaugcaucccccccccccccccccccccccccccccccaaaggcucuuuucagagccaccagaauu

SEQ ID NO: 16258 - RNA, 2006 nt, Artificial Sequence
  mRNA product Design c-2 comprising derived and/or modified sequence from HRSV(Memphis-37)__AIY60640.1__F_DSCav1_mut4 (opt11)
gggagacuccugucgggcggaaguaggaggaguagaguuuaaaaacaguacucuuuuuccgguucgggacguaguugaagcaacgacaagccggauaaccgcucuugagacaggaagcuuaccauggagcugcccauccucaagaccaacgccaucaccacgauccuggccgcggugacccugugcuucgcgagcucccagaacaucaccgaggaguucuaccagagcacgugcuccgccgucagcaagggcuaccucuccgcccugcgcaccgggugguacaccagcgugaucaccaucgagcuguccaacaucaaggagaacaagugcaacggcaccgacgccaaggugaaacucaucaagcaggagcuggacaaguacaagaacgccgucaccgagcugcagcuccugaugcagagcaccccggccgccggguccggcagcgcuaucugcuccgggaucgcggugugcaaggugcugcaccucgagggcgaggucaacaagaucaagaaugcccugcugagcaccaacaaggccguggugucccucagcaacggagucagcgugcuuaccuucaaggugcuggaccucaagaacuacaucgacaagcagcugcugccuauccucaacaagcagagcugcuccaucagcaacaucgagacggucaucgaguuccagcagaagaacaaccggcugcuggagaucacccgcgaguucuccgugaacgccggggugaccacccccgucagcacguacaugcucaccaacagcgaacugcugucccucaucaacgacaugcccaucaccaacgaccagaagaagcugaugagcaacaacgugcagaucgugcggcagcaguccuacagcaucaugugcaucaucaaggaggaaguccuggccuacguggugcagcucccucuguacggcgucaucgacacccccugcuggaagcugcacacgagcccccucugcaccaccaacaccaaggagggguccaacaucugccugacgcgcaccgaccggggcugguacugcgacaacgcgggguccgugagcuucuucccccaggccgagaccugcaaggugcagagcaaccgcgucuucugcgacacuaugaacagcagaacgcucccguccgaggugaaccugugcaacauagacauauucaaccccaaguacgacugcaagaucaugaccagcaagaccgacgucuccagcuccgugauuaccagccugggcgcaaucguguccugcuacggcaagacgaagugcaccgccagcaacaagaaccgggggaucaucaagaccuucuccaacggcugcgacuaugucagcaacaaggggguggacaccgugagcgucggaaacacgcucuacugcgugaacaagcaagagggcaaguccuuauacgugaagggggagcccaucaucaacuucuacgacccccuggucuucccgagcgacgaguucgacgccagcauaagccaggugaacgagaagaucaaccagucccucgcguucauccgcaagagcgacgagcugcugcacaacgugaacgucggcaaguccaccaccaacaucaugaucaccaccaucaucaucgugaucaucgugauccuccugcugcucaucgccgucgggcuguuccuguacugcaaggcccggagcacgcccgugaccuuguccaaggaccagcucagcggcaucaacaacaucgccuucuccaacugaggacuaguggaagcauuuuccuggcugauuaaaagaaauuacucagcuauggucaucuguuccuguuagaaggcuaugcagcauauuauauacuaugcgcauguuaugaaaugcauaauaaaaaauuuuaaaaaaucuaaaagaucuaaaaaaaaaaaaaaaaaaaaaaaaaaaaaaaaaaaaaaaaaaaaaaaaaaaaaaaaaaaaaaaaugcaucccccccccccccccccccccccccccccccaaaggcucuuuucagagccaccagaauu

SEQ ID NO: 16259 - RNA, 1983 nt, Artificial Sequence
  mRNA product Design c-3 comprising derived and/or modified sequence from HRSV(Memphis-37)__AIY60640.1__F_DSCav1_mut4 (opt1)
gggagaguccgcucagccagguugcagaagcggcuuagcguguguccuaaucuucucucugcguguagguaggccugugccgcaaacaagcuuaccauggagcugcccauccucaagaccaacgccaucaccacgauccuggccgcggugacccugugcuucgccagcucccagaacaucaccgaggaguucuaccagagcacgugcuccgccgucagcaagggcuaccucuccgcccugcgcaccgggugguacaccagcgugaucaccaucgagcuguccaacaucaaggagaacaagugcaacggcaccgacgccaaggugaagcucaucaagcaggagcuggacaaguacaagaacgcggucacggagcugcagcuccugaugcagagcaccccggccgccggcuccgggagcgcgaucugcuccggcaucgccgucugcaaggugcugcaccucgagggcgaggugaacaagaucaagaacgcccugcuguccaccaacaaggccgucgugagccucuccaacggggugagcguccugaccuucaaggugcuggaccucaagaacuacaucgacaagcagcugcugcccauccugaacaagcagagcugcuccaucagcaacaucgagaccgucaucgaguuccagcagaagaacaaccgccuccuggagaucacgcgggaguucagcgugaacgcgggcgugaccacccccgucuccaccuacaugcugacgaacagcgagcuccugucccugaucaacgacaugccgaucaccaacgaccagaagaagcucaugagcaacaacgugcagaucgugcgccagcaguccuacagcaucaugugcaucaucaaggaggagguccuggccuacguggugcagcugccccucuacggggucaucgacacccccugcuggaagcugcacaccagcccccugugcacgaccaacaccaaggagggcuccaacaucugccucacccggacggaccgcgggugguacugcgacaacgccggcagcguguccuucuucccgcaggccgagaccugcaagguccagagcaaccggguguucugcgacaccaugaacucccggacccugcccagcgaggugaaccucugcaacaucgacaucuucaaccccaaguacgacugcaagaucaugacguccaagaccgacgucagcuccagcgugaucaccucccugggcgccaucgugagcugcuacgggaagaccaagugcacggcgagcaacaagaaccgcggcaucaucaagaccuucuccaacgggugcgacuacgucagcaacaagggcguggacaccguguccgucggcaacacccuguacugcgugaacaagcaggagggcaagagccucuacgugaagggggagcccaucaucaacuucuacgacccgcuggucuuccccuccgacgaguucgacgccagcaucucccaggugaacgagaagaucaaccagagccuggccuucauccggaaguccgacgagcuccugcacaacgugaacgucggcaagagcaccacgaacaucaugaucaccaccaucaucaucgugaucaucgugauccugcugcuccugaucgccgucgggcuguuccucuacugcaaggcccgcuccacccccgugacgcugagcaaggaccagcuguccgggaucaacaacaucgcguucagcaacugaggacuaguacuggcugcaucucccuuuccucuguccuccauccuucucccaggauggugaagggggaccugguacccagugauccccaccccaggauccuaaaucaugacuuaccugcuaauaaaaacucauuggaaaagugagaagaucuaaaaaaaaaaaaaaaaaaaaaaaaaaaaaaaaaaaaaaaaaaaaaaaaaaaaaaaaaaaaaaaaugcaucccccccccccccccccccccccccccccccaaaggcucuuuucagagccaccagaauu

SEQ ID NO: 16260 - RNA, 1983 nt, Artificial Sequence
  mRNA product Design c-3 comprising derived and/or modified sequence from HRSV(Memphis-37)__AIY60640.1__F_DSCav1_mut4 (opt1)
gggagaguccgcucagccagguugcagaagcggcuuagcguguguccuaaucuucucucugcguguagguaggccugugccgcaaacaagcuuaccauggagcugcccauccucaagaccaacgccaucaccacgauccuggccgcggugacccugugcuucgccagcucccagaacaucaccgaggaguucuaccagagcacgugcuccgccgucagcaagggcuaccucuccgcccugcgcaccgggugguacaccagcgugaucaccaucgagcuguccaacaucaaggagaacaagugcaacggcaccgacgccaaggugaagcucaucaagcaggagcuggacaaguacaagaacgcggucacggagcugcagcuccugaugcagagcaccccggccgccggguccggcagcgccaucugcuccgggaucgcggugugcaaggugcugcaccucgagggcgaggucaacaagaucaagaacgcccugcugagcaccaacaaggccguggugucccucagcaacggcgucuccgugcugaccuucaaggugcuggaccucaagaacuacaucgacaagcagcugcugcccauccucaacaagcagagcugcuccaucagcaacaucgagacggucaucgaguuccagcagaagaacaaccggcugcuggagaucacccgcgaguucuccgugaacgccggggugaccacccccgucagcacguacaugcucaccaacagcgagcugcugucccucaucaacgacaugcccaucaccaacgaccagaagaagcugaugagcaacaacgugcagaucgugcggcagcaguccuacagcaucaugugcaucaucaaggaggagguccuggccuacguggugcagcucccgcuguacggcgucaucgacacccccugcuggaagcugcacacgagcccccucugcaccaccaacaccaaggagggguccaacaucugccugacgcgcaccgaccggggcugguacugcgacaacgcgggguccgugagcuucuucccccaggccgagaccugcaaggugcaguccaaccgcgucuucugcgacaccaugaacagccggacgcucccguccgaggugaaccugugcaacaucgacaucuucaaccccaaguacgacugcaagaucaugaccagcaagaccgacgucuccagcuccgugaucaccagccugggcgccaucguguccugcuacggcaagacgaagugcaccgccagcaacaagaaccgggggaucaucaagaccuucuccaacggcugcgacuacgucagcaacaaggggguggacaccgugagcgucggcaacacgcucuacugcgugaacaagcaggagggcaagucccuguacgugaagggggagcccaucaucaacuucuacgacccccuggucuucccgagcgacgaguucgacgccuccaucagccaggugaacgagaagaucaaccagucccucgcguucauccgcaagagcgacgagcugcugcacaacgugaacgucggcaaguccaccaccaacaucaugaucaccaccaucaucaucgugaucaucgugauccuccugcugcucaucgccgucgggcuguuccuguacugcaaggcccggagcacgcccgugacccuguccaaggaccagcucagcggcaucaacaacaucgccuucuccaacugaggacuaguacuggcugcaucucccuuuccucuguccuccauccuucucccaggauggugaagggggaccugguacccagugauccccaccccaggauccuaaaucaugacuuaccugcuaauaaaaacucauuggaaaagugagaagaucuaaaaaaaaaaaaaaaaaaaaaaaaaaaaaaaaaaaaaaaaaaaaaaaaaaaaaaaaaaaaaaaaugcaucccccccccccccccccccccccccccccccaaaggcucuuuucagagccaccagaauu

SEQ ID NO: 16261 - RNA, 1983 nt, Artificial Sequence
  mRNA product Design c-3 comprising derived and/or modified sequence from HRSV(Memphis-37)__AIY60640.1__F_DSCav1_mut4 (opt2)
gggagaguccgcucagccagguugcagaagcggcuuagcguguguccuaaucuucucucugcguguagguaggccugugccgcaaacaagcuuaccauggagcuccccauccucaagaccaacgccaucaccaccauccucgccgccgucacccucugcuucgccuccucccagaacaucaccgaggaguucuaccaguccaccugcuccgccgucuccaagggcuaccucuccgcccuccgcaccggcugguacaccuccgucaucaccaucgagcucuccaacaucaaggagaacaagugcaacggcaccgacgccaaggucaagcucaucaagcaggagcucgacaaguacaagaacgccgucaccgagcuccagcuccucaugcaguccacccccgccgccggcuccggcuccgccaucugcuccggcaucgccgucugcaagguccuccaccucgagggcgaggucaacaagaucaagaacgcccuccucuccaccaacaaggccgucgucucccucuccaacggcgucuccguccucaccuucaagguccucgaccucaagaacuacaucgacaagcagcuccuccccauccucaacaagcaguccugcuccaucuccaacaucgagaccgucaucgaguuccagcagaagaacaaccgccuccucgagaucacccgcgaguucuccgucaacgccggcgucaccacccccgucuccaccuacaugcucaccaacuccgagcuccucucccucaucaacgacaugcccaucaccaacgaccagaagaagcucauguccaacaacguccagaucguccgccagcaguccuacuccaucaugugcaucaucaaggaggagguccucgccuacgucguccagcucccccucuacggcgucaucgacacccccugcuggaagcuccacaccuccccccucugcaccaccaacaccaaggagggcuccaacaucugccucacccgcaccgaccgcggcugguacugcgacaacgccggcuccgucuccuucuucccccaggccgagaccugcaagguccaguccaaccgcgucuucugcgacaccaugaacucccgcacccuccccuccgaggucaaccucugcaacaucgacaucuucaaccccaaguacgacugcaagaucaugaccuccaagaccgacgucuccuccuccgucaucaccucccucggcgccaucgucuccugcuacggcaagaccaagugcaccgccuccaacaagaaccgcggcaucaucaagaccuucuccaacggcugcgacuacgucuccaacaagggcgucgacaccgucuccgucggcaacacccucuacugcgucaacaagcaggagggcaagucccucuacgucaagggcgagcccaucaucaacuucuacgacccccucgucuuccccuccgacgaguucgacgccuccaucucccaggucaacgagaagaucaaccagucccucgccuucauccgcaaguccgacgagcuccuccacaacgucaacgucggcaaguccaccaccaacaucaugaucaccaccaucaucaucgucaucaucgucauccuccuccuccucaucgccgucggccucuuccucuacugcaaggcccgcuccacccccgucacccucuccaaggaccagcucuccggcaucaacaacaucgccuucuccaacugaggacuaguacuggcugcaucucccuuuccucuguccuccauccuucucccaggauggugaagggggaccugguacccagugauccccaccccaggauccuaaaucaugacuuaccugcuaauaaaaacucauuggaaaagugagaagaucuaaaaaaaaaaaaaaaaaaaaaaaaaaaaaaaaaaaaaaaaaaaaaaaaaaaaaaaaaaaaaaaaugcaucccccccccccccccccccccccccccccccaaaggcucuuuucagagccaccagaauu

SEQ ID NO: 16262 - RNA, 1983 nt, Artificial Sequence
  mRNA product Design c-3 comprising derived and/or modified sequence from HRSV(Memphis-37)__AIY60640.1__F_DSCav1_mut4 (opt3)
gggagaguccgcucagccagguugcagaagcggcuuagcguguguccuaaucuucucucugcguguagguaggccugugccgcaaacaagcuuaccauggagcugcccauccucaagaccaacgccauuacaacuauacuugcugcagugacgcugugcuucgccagcucccagaauaucaccgaagaguuuuaccaaucuacauguucagcggucaguaaaggcuauuugagcgcuuuaagaacugggugguacaccuccguuauuacaaucgaacugucuaacauuaaggagaauaaaugcaacggaaccgacgccaaggugaaacuaaucaagcaggaacucgauaaguauaaaaaugcaguaacugagcugcagcuucugaugcagucgaccccugccgcugguucaggcagcgcaauauguagugggaucgccgugugcaaggucuugcaccucgagggagaagugaacaaaauuaagaaugcucugcuguccacaaacaaagccguugugucucucagcaauggcgucuccguguuaacguucaagguacuggaccuuaagaacuacaucgauaaacaauugcugccaauucuaaauaagcagucauguaguaucagcaacauagagacuguuauugaauuucagcagaaaaauaacaggcuccuggagaucacccgggaguucucugugaaugcgggugucacaacuccgguguccaccuauaugcuuacaaacucagaacuguugagccucauuaacgacaugcccaucaccaaugaucaaaagaaacugaugaguaacaaugugcagaucguccgccagcagucuuacuccauuaugugcauaaucaaggaggaaguuuuagcauaugugguacaacugccucucuacggggugauugacacgccauguuggaaacuucauacuagcccccugugcacaaccaacacuaaggagggaucgaauaucuguuugacacgaaccgaucguggcugguacugcgacaacgccggcucugucuccuuuuucccucaggcugaaacguguaaggugcagucaaauagaguguuuugcgauaccaugaacaguagaacacugccaagcgaggugaaucucugcaacauagacauuuucaaucccaaauaugauuguaagaucaugacuuccaaaaccgacgucucuagcucagugaucacaagucugggggccauuguauccugcuacggaaagacuaaauguaccgcaagcaacaagaauagggguaucauuaagacauuuucuaacggcugcgauuauguuucaaauaaagggguggacaccgucagugugggaaacacucuuuacugugucaacaagcaagagggcaaaagccuguaugugaagggugaaccuauaaucaauuucuacgacccauugguuuuuccguccgaugaguucgacgcuucuauuucgcagguuaacgagaaaaucaaucagagccucgccuuuauccggaaguccgaugaacuguuacacaacguaaaugucgggaagucaacgacaaacauuaugauaaccacuaucauuaucgugauuaucguuauacugcuacuccugaucgcggugggacuuuucuuguauugcaaagcccgcaguacccccgucacacugucuaaggaccagcucagcggcauuaauaacaucgcauucuccaauugaggacuaguacuggcugcaucucccuuuccucuguccuccauccuucucccaggauggugaagggggaccugguacccagugauccccaccccaggauccuaaaucaugacuuaccugcuaauaaaaacucauuggaaaagugagaagaucuaaaaaaaaaaaaaaaaaaaaaaaaaaaaaaaaaaaaaaaaaaaaaaaaaaaaaaaaaaaaaaaaugcaucccccccccccccccccccccccccccccccaaaggcucuuuucagagccaccagaauu

SEQ ID NO: 16263 - RNA, 1983 nt, Artificial Sequence
  mRNA product Design c-3 comprising derived and/or modified sequence from HRSV(Memphis-37)__AIY60640.1__F_DSCav1_mut4 (opt4)
gggagaguccgcucagccagguugcagaagcggcuuagcguguguccuaaucuucucucugcguguagguaggccugugccgcaaacaagcuuaccauggagcugcccauccugaagaccaacgccaucaccaccauccuggccgccgugacccugugcuucgccagcagccagaacaucaccgaggaguucuaccagagcaccugcagcgccgugagcaagggcuaccugagcgcccugagaaccggcugguacaccagcgugaucaccaucgagcugagcaacaucaaggagaacaagugcaacggcaccgacgccaaggugaagcugaucaagcaggagcuggacaaguacaagaacgccgugaccgagcugcagcugcugaugcagagcacccccgccgccggcagcggcagcgccaucugcagcggcaucgccgugugcaaggugcugcaccuggagggcgaggugaacaagaucaagaacgcccugcugagcaccaacaaggccguggugagccugagcaacggcgugagcgugcugaccuucaaggugcuggaccugaagaacuacaucgacaagcagcugcugcccauccugaacaagcagagcugcagcaucagcaacaucgagaccgugaucgaguuccagcagaagaacaacagacugcuggagaucaccagagaguucagcgugaacgccggcgugaccacccccgugagcaccuacaugcugaccaacagcgagcugcugagccugaucaacgacaugcccaucaccaacgaccagaagaagcugaugagcaacaacgugcagaucgugagacagcagagcuacagcaucaugugcaucaucaaggaggaggugcuggccuacguggugcagcugccccuguacggcgugaucgacacccccugcuggaagcugcacaccagcccccugugcaccaccaacaccaaggagggcagcaacaucugccugaccagaaccgacagaggcugguacugcgacaacgccggcagcgugagcuucuucccccaggccgagaccugcaaggugcagagcaacagaguguucugcgacaccaugaacagcagaacccugcccagcgaggugaaccugugcaacaucgacaucuucaaccccaaguacgacugcaagaucaugaccagcaagaccgacgugagcagcagcgugaucaccagccugggcgccaucgugagcugcuacggcaagaccaagugcaccgccagcaacaagaacagaggcaucaucaagaccuucagcaacggcugcgacuacgugagcaacaagggcguggacaccgugagcgugggcaacacccuguacugcgugaacaagcaggagggcaagagccuguacgugaagggcgagcccaucaucaacuucuacgacccccugguguuccccagcgacgaguucgacgccagcaucagccaggugaacgagaagaucaaccagagccuggccuucaucagaaagagcgacgagcugcugcacaacgugaacgugggcaagagcaccaccaacaucaugaucaccaccaucaucaucgugaucaucgugauccugcugcugcugaucgccgugggccuguuccuguacugcaaggccagaagcacccccgugacccugagcaaggaccagcugagcggcaucaacaacaucgccuucagcaacugaggacuaguacuggcugcaucucccuuuccucuguccuccauccuucucccaggauggugaagggggaccugguacccagugauccccaccccaggauccuaaaucaugacuuaccugcuaauaaaaacucauuggaaaagugagaagaucuaaaaaaaaaaaaaaaaaaaaaaaaaaaaaaaaaaaaaaaaaaaaaaaaaaaaaaaaaaaaaaaaugcaucccccccccccccccccccccccccccccccaaaggcucuuuucagagccaccagaauu

SEQ ID NO: 16264 - RNA, 1983 nt, Artificial Sequence
  mRNA product Design c-3 comprising derived and/or modified sequence from HRSV(Memphis-37)__AIY60640.1__F_DSCav1_mut4 (opt5)
gggagaguccgcucagccagguugcagaagcggcuuagcguguguccuaaucuucucucugcguguagguaggccugugccgcaaacaagcuuaccauggagcugcccauccucaagaccaacgccauuacaacgauccuggcugccgugacccuuugcuucgcgagcucccagaauauuacagaagaguuuuaccaaucuaccuguagcgcugucuccaaaggcuaucugucugcccucagaacagggugguacaccagcguuaucacaauugaacuguccaacaucaaggagaauaaaugcaacggaaccgacgccaaggugaaacuuaucaagcaggaacuggauaaguauaaaaaugcugugacggagcuccagcugcugaugcagucuaccccugccgcuggcagcggguccgccauuuguagcggaaucgcggucugcaaggugcuccaccuggagggcgaaguuaacaaaauuaagaaugcccuucugucuacaaacaaagcuguggucucccucagcaauggggugucuguucugaccuucaaggugcuugaccugaagaacuacaucgauaaacaacuccugccgauucugaauaagcaguccuguagcaucucuaacauugagacagucaucgaauuucagcagaaaaauaaccggcuccuggagaucacccgcgaguucuccgugaaugccggagugacgacacccgucagcaccuauaugcuuacaaacuccgaacugcucucucugauuaacgacaugccuaucaccaaugaucaaaagaaacuuaugagcaacaauguucagauugugagacagcaguccuacagcaucaugugcauuaucaaggaggaagugcuggcuuaugucgugcaacucccccuguacggcguuaucgacaccccuuguuggaaacugcauacaucuccccucugcacgaccaacacaaaggagggcuccaauauuugucugacccggacagaucgcgggugguacugcgacaacgccggaagcgugagcuuuuucccucaggcggaaaccuguaagguccagucuaauagaguguuuugcgauacgaugaacuccagaacacugccgucugagguuaaucucugcaacaucgacauuuucaaucccaaauaugauuguaagaucaugaccagcaaaaccgacguguccagcucugucauuacaucccugggcgccaucgugagcugcuacgggaagaccaaauguacagcuucuaacaagaaucggggaaucauuaagacguuuuccaacggcugcgauuaugucagcaauaaagggguggacaccguuuccgugggaaacacacuuuacugugucaacaagcaagagggcaaaucucuguaugugaagggcgaaccuaucauuaauuucuacgacccccucguuuuuccuagcgaugaguucgacgccuccaucucucaggugaacgaaaagauuaaucagagccuggcuuuuauccgcaaguccgaugagcugcuccacaacgucaauguggggaaaagcaccacaaacauuaugaucaccacgaucauuaucgugauuaucguuauucugcuucugcucaucgccgucggacuguuccuguauugcaaagccagaucuacccccgugacacuuuccaaggaccagcucagcggcaucaauaacauugcuuucucuaauugaggacuaguacuggcugcaucucccuuuccucuguccuccauccuucucccaggauggugaagggggaccugguacccagugauccccaccccaggauccuaaaucaugacuuaccugcuaauaaaaacucauuggaaaagugagaagaucuaaaaaaaaaaaaaaaaaaaaaaaaaaaaaaaaaaaaaaaaaaaaaaaaaaaaaaaaaaaaaaaaugcaucccccccccccccccccccccccccccccccaaaggcucuuuucagagccaccagaauu

SEQ ID NO: 16265 - RNA, 1983 nt, Artificial Sequence
  mRNA product Design c-3 comprising derived and/or modified sequence from HRSV(Memphis-37)__AIY60640.1__F_DSCav1_mut4 (opt6)
gggagaguccgcucagccagguugcagaagcggcuuagcguguguccuaaucuucucucugcguguagguaggccugugccgcaaacaagcuuaccauggaacucccaauccuaaaaacaaacgcaauaacaacaauauuagcagccguaacacucuguuucgccucaucccaaaacauaacagaagaauuuuaucaaucuacauguuccgccgucaguaaaggauaucuaucagccuuaagaacaggcugguacacaucaguaaucaccauagaauuauccaacauaaaagaaaacaaaugcaauggcacagaugccaaaguaaaacuaaucaaacaagaacuugauaaauauaaaaacgcaguaacagaauuacaauuauuaaugcaaagcacaccagccgcaggaucaggaucagcaauauguucaggaauagcagucuguaaaguacuacacuuagaaggagaaguaaacaaaauuaaaaacgcauuacuaagcaccaauaaagcaguaguaucacuaucaaacggcguauccguauuaacguucaaaguccucgaccugaaaaacuacauagauaaacaacuacuaccaauacuaaauaaacaaucaugcucaauaucaaacauagaaacuguuaucgaauuucaacagaaaaauaaccgacuacuagaaaucaccagagaauuuucaguaaacgcaggcgucacuacaccaguauccacauacaugcuaaccaacucggaauuacuuucccucauaaacgacaugccaauaacaaacgaccaaaagaaacuuaugucaaacaacguucaaauaguccgccaacaaucauacucaauaauguguaucauaaaagaagaaguccuagcauaugucguacaacuaccauuauacggaguaauugacacaccuugcuggaaacuacacacauccccacuauguacaacaaacacuaaagaaggaucaaacaucugccuaaccagaacagacagaggcugguauugcgacaacgcaggaucaguaucauucuucccacaagcagaaacaugcaaaguacaaucaaacagagucuucugcgacaccaugaacagcagaacccucccauccgaaguaaacuuaugcaacaucgauaucuucaacccaaaauacgacuguaaaauaaugacaucaaaaacagacguuucauccucaguaauaacaucauuaggugccauaguuucauguuacggaaaaaccaaauguaccgcaucaaacaaaaacagaggcauuauuaaaacauucucuaacggaugcgacuaugucaguaacaaaggaguagacacaguaucagucggaaacacauuauauugcguaaauaaacaagaaggaaaaagucuauacguaaaaggagaaccaauaauaaacuuuuacgacccucucguauucccaucagacgaauuugaugcauccauaucacaagucaacgaaaagauaaaccaaucccuagcauucauaagaaaaucagacgaacuacuccauaacguaaacguaggaaaaagcacaaccaauauaaugauaaccacaauaaucauaguaauaauagucauauuauuacuuuuaauugcaguaggacucuuucuauacugcaaagcaagaagcacaccaguaacacuaagcaaagaccaacuaucaggcaucaacaauaucgccuuuucaaauuaaggacuaguacuggcugcaucucccuuuccucuguccuccauccuucucccaggauggugaagggggaccugguacccagugauccccaccccaggauccuaaaucaugacuuaccugcuaauaaaaacucauuggaaaagugagaagaucuaaaaaaaaaaaaaaaaaaaaaaaaaaaaaaaaaaaaaaaaaaaaaaaaaaaaaaaaaaaaaaaaugcaucccccccccccccccccccccccccccccccaaaggcucuuuucagagccaccagaauu

SEQ ID NO: 16266 - RNA, 1983 nt, Artificial Sequence
  mRNA product Design c-3 comprising derived and/or modified sequence from HRSV(Memphis-37)__AIY60640.1__F_DSCav1_mut4 (opt11)
gggagaguccgcucagccagguugcagaagcggcuuagcguguguccuaaucuucucucugcguguagguaggccugugccgcaaacaagcuuaccauggagcugcccauccucaagaccaacgccaucaccacgauccuggccgcggugacccugugcuucgcgagcucccagaacaucaccgaggaguucuaccagagcacgugcuccgccgucagcaagggcuaccucuccgcccugcgcaccgggugguacaccagcgugaucaccaucgagcuguccaacaucaaggagaacaagugcaacggcaccgacgccaaggugaaacucaucaagcaggagcuggacaaguacaagaacgccgucaccgagcugcagcuccugaugcagagcaccccggccgccggguccggcagcgcuaucugcuccgggaucgcggugugcaaggugcugcaccucgagggcgaggucaacaagaucaagaaugcccugcugagcaccaacaaggccguggugucccucagcaacggagucagcgugcuuaccuucaaggugcuggaccucaagaacuacaucgacaagcagcugcugccuauccucaacaagcagagcugcuccaucagcaacaucgagacggucaucgaguuccagcagaagaacaaccggcugcuggagaucacccgcgaguucuccgugaacgccggggugaccacccccgucagcacguacaugcucaccaacagcgaacugcugucccucaucaacgacaugcccaucaccaacgaccagaagaagcugaugagcaacaacgugcagaucgugcggcagcaguccuacagcaucaugugcaucaucaaggaggaaguccuggccuacguggugcagcucccucuguacggcgucaucgacacccccugcuggaagcugcacacgagcccccucugcaccaccaacaccaaggagggguccaacaucugccugacgcgcaccgaccggggcugguacugcgacaacgcgggguccgugagcuucuucccccaggccgagaccugcaaggugcagagcaaccgcgucuucugcgacacuaugaacagcagaacgcucccguccgaggugaaccugugcaacauagacauauucaaccccaaguacgacugcaagaucaugaccagcaagaccgacgucuccagcuccgugauuaccagccugggcgcaaucguguccugcuacggcaagacgaagugcaccgccagcaacaagaaccgggggaucaucaagaccuucuccaacggcugcgacuaugucagcaacaaggggguggacaccgugagcgucggaaacacgcucuacugcgugaacaagcaagagggcaaguccuuauacgugaagggggagcccaucaucaacuucuacgacccccuggucuucccgagcgacgaguucgacgccagcauaagccaggugaacgagaagaucaaccagucccucgcguucauccgcaagagcgacgagcugcugcacaacgugaacgucggcaaguccaccaccaacaucaugaucaccaccaucaucaucgugaucaucgugauccuccugcugcucaucgccgucgggcuguuccuguacugcaaggcccggagcacgcccgugaccuuguccaaggaccagcucagcggcaucaacaacaucgccuucuccaacugaggacuaguacuggcugcaucucccuuuccucuguccuccauccuucucccaggauggugaagggggaccugguacccagugauccccaccccaggauccuaaaucaugacuuaccugcuaauaaaaacucauuggaaaagugagaagaucuaaaaaaaaaaaaaaaaaaaaaaaaaaaaaaaaaaaaaaaaaaaaaaaaaaaaaaaaaaaaaaaaugcaucccccccccccccccccccccccccccccccaaaggcucuuuucagagccaccagaauu

SEQ ID NO: 16267 - RNA, 1979 nt, Artificial Sequence
  mRNA product Design c-4 comprising derived and/or modified sequence from HRSV(Memphis-37)__AIY60640.1__F_DSCav1_mut4 (opt1)
gggagaguccgcucagccagguugcagaagcggcuuagcguguguccuaaucuucucucugcguguagguaggccugugccgcaaacaagcuuaccauggagcugcccauccucaagaccaacgccaucaccacgauccuggccgcggugacccugugcuucgccagcucccagaacaucaccgaggaguucuaccagagcacgugcuccgccgucagcaagggcuaccucuccgcccugcgcaccgggugguacaccagcgugaucaccaucgagcuguccaacaucaaggagaacaagugcaacggcaccgacgccaaggugaagcucaucaagcaggagcuggacaaguacaagaacgcggucacggagcugcagcuccugaugcagagcaccccggccgccggcuccgggagcgcgaucugcuccggcaucgccgucugcaaggugcugcaccucgagggcgaggugaacaagaucaagaacgcccugcuguccaccaacaaggccgucgugagccucuccaacggggugagcguccugaccuucaaggugcuggaccucaagaacuacaucgacaagcagcugcugcccauccugaacaagcagagcugcuccaucagcaacaucgagaccgucaucgaguuccagcagaagaacaaccgccuccuggagaucacgcgggaguucagcgugaacgcgggcgugaccacccccgucuccaccuacaugcugacgaacagcgagcuccugucccugaucaacgacaugccgaucaccaacgaccagaagaagcucaugagcaacaacgugcagaucgugcgccagcaguccuacagcaucaugugcaucaucaaggaggagguccuggccuacguggugcagcugccccucuacggggucaucgacacccccugcuggaagcugcacaccagcccccugugcacgaccaacaccaaggagggcuccaacaucugccucacccggacggaccgcgggugguacugcgacaacgccggcagcguguccuucuucccgcaggccgagaccugcaagguccagagcaaccggguguucugcgacaccaugaacucccggacccugcccagcgaggugaaccucugcaacaucgacaucuucaaccccaaguacgacugcaagaucaugacguccaagaccgacgucagcuccagcgugaucaccucccugggcgccaucgugagcugcuacgggaagaccaagugcacggcgagcaacaagaaccgcggcaucaucaagaccuucuccaacgggugcgacuacgucagcaacaagggcguggacaccguguccgucggcaacacccuguacugcgugaacaagcaggagggcaagagccucuacgugaagggggagcccaucaucaacuucuacgacccgcuggucuuccccuccgacgaguucgacgccagcaucucccaggugaacgagaagaucaaccagagccuggccuucauccggaaguccgacgagcuccugcacaacgugaacgucggcaagagcaccacgaacaucaugaucaccaccaucaucaucgugaucaucgugauccugcugcuccugaucgccgucgggcuguuccucuacugcaaggcccgcuccacccccgugacgcugagcaaggaccagcuguccgggaucaacaacaucgcguucagcaacugaggacuaguggaagcauuuuccuggcugauuaaaagaaauuacucagcuauggucaucuguuccuguuagaaggcuaugcagcauauuauauacuaugcgcauguuaugaaaugcauaauaaaaaauuuuaaaaaaucuaaaagaucuaaaaaaaaaaaaaaaaaaaaaaaaaaaaaaaaaaaaaaaaaaaaaaaaaaaaaaaaaaaaaaaaugcaucccccccccccccccccccccccccccccccaaaggcucuuuucagagccaccagaauu

SEQ ID NO: 16268 - RNA, 1979 nt, Artificial Sequence
  mRNA product Design c-4 comprising derived and/or modified sequence from HRSV(Memphis-37)__AIY60640.1__F_DSCav1_mut4 (opt1)
gggagaguccgcucagccagguugcagaagcggcuuagcguguguccuaaucuucucucugcguguagguaggccugugccgcaaacaagcuuaccauggagcugcccauccucaagaccaacgccaucaccacgauccuggccgcggugacccugugcuucgccagcucccagaacaucaccgaggaguucuaccagagcacgugcuccgccgucagcaagggcuaccucuccgcccugcgcaccgggugguacaccagcgugaucaccaucgagcuguccaacaucaaggagaacaagugcaacggcaccgacgccaaggugaagcucaucaagcaggagcuggacaaguacaagaacgcggucacggagcugcagcuccugaugcagagcaccccggccgccggguccggcagcgccaucugcuccgggaucgcggugugcaaggugcugcaccucgagggcgaggucaacaagaucaagaacgcccugcugagcaccaacaaggccguggugucccucagcaacggcgucuccgugcugaccuucaaggugcuggaccucaagaacuacaucgacaagcagcugcugcccauccucaacaagcagagcugcuccaucagcaacaucgagacggucaucgaguuccagcagaagaacaaccggcugcuggagaucacccgcgaguucuccgugaacgccggggugaccacccccgucagcacguacaugcucaccaacagcgagcugcugucccucaucaacgacaugcccaucaccaacgaccagaagaagcugaugagcaacaacgugcagaucgugcggcagcaguccuacagcaucaugugcaucaucaaggaggagguccuggccuacguggugcagcucccgcuguacggcgucaucgacacccccugcuggaagcugcacacgagcccccucugcaccaccaacaccaaggagggguccaacaucugccugacgcgcaccgaccggggcugguacugcgacaacgcgggguccgugagcuucuucccccaggccgagaccugcaaggugcaguccaaccgcgucuucugcgacaccaugaacagccggacgcucccguccgaggugaaccugugcaacaucgacaucuucaaccccaaguacgacugcaagaucaugaccagcaagaccgacgucuccagcuccgugaucaccagccugggcgccaucguguccugcuacggcaagacgaagugcaccgccagcaacaagaaccgggggaucaucaagaccuucuccaacggcugcgacuacgucagcaacaaggggguggacaccgugagcgucggcaacacgcucuacugcgugaacaagcaggagggcaagucccuguacgugaagggggagcccaucaucaacuucuacgacccccuggucuucccgagcgacgaguucgacgccuccaucagccaggugaacgagaagaucaaccagucccucgcguucauccgcaagagcgacgagcugcugcacaacgugaacgucggcaaguccaccaccaacaucaugaucaccaccaucaucaucgugaucaucgugauccuccugcugcucaucgccgucgggcuguuccuguacugcaaggcccggagcacgcccgugacccuguccaaggaccagcucagcggcaucaacaacaucgccuucuccaacugaggacuaguggaagcauuuuccuggcugauuaaaagaaauuacucagcuauggucaucuguuccuguuagaaggcuaugcagcauauuauauacuaugcgcauguuaugaaaugcauaauaaaaaauuuuaaaaaaucuaaaagaucuaaaaaaaaaaaaaaaaaaaaaaaaaaaaaaaaaaaaaaaaaaaaaaaaaaaaaaaaaaaaaaaaugcaucccccccccccccccccccccccccccccccaaaggcucuuuucagagccaccagaauu

SEQ ID NO: 16269 - RNA, 1979 nt, Artificial Sequence
  mRNA product Design c-4 comprising derived and/or modified sequence from HRSV(Memphis-37)__AIY60640.1__F_DSCav1_mut4 (opt2)
gggagaguccgcucagccagguugcagaagcggcuuagcguguguccuaaucuucucucugcguguagguaggccugugccgcaaacaagcuuaccauggagcuccccauccucaagaccaacgccaucaccaccauccucgccgccgucacccucugcuucgccuccucccagaacaucaccgaggaguucuaccaguccaccugcuccgccgucuccaagggcuaccucuccgcccuccgcaccggcugguacaccuccgucaucaccaucgagcucuccaacaucaaggagaacaagugcaacggcaccgacgccaaggucaagcucaucaagcaggagcucgacaaguacaagaacgccgucaccgagcuccagcuccucaugcaguccacccccgccgccggcuccggcuccgccaucugcuccggcaucgccgucugcaagguccuccaccucgagggcgaggucaacaagaucaagaacgcccuccucuccaccaacaaggccgucgucucccucuccaacggcgucuccguccucaccuucaagguccucgaccucaagaacuacaucgacaagcagcuccuccccauccucaacaagcaguccugcuccaucuccaacaucgagaccgucaucgaguuccagcagaagaacaaccgccuccucgagaucacccgcgaguucuccgucaacgccggcgucaccacccccgucuccaccuacaugcucaccaacuccgagcuccucucccucaucaacgacaugcccaucaccaacgaccagaagaagcucauguccaacaacguccagaucguccgccagcaguccuacuccaucaugugcaucaucaaggaggagguccucgccuacgucguccagcucccccucuacggcgucaucgacacccccugcuggaagcuccacaccuccccccucugcaccaccaacaccaaggagggcuccaacaucugccucacccgcaccgaccgcggcugguacugcgacaacgccggcuccgucuccuucuucccccaggccgagaccugcaagguccaguccaaccgcgucuucugcgacaccaugaacucccgcacccuccccuccgaggucaaccucugcaacaucgacaucuucaaccccaaguacgacugcaagaucaugaccuccaagaccgacgucuccuccuccgucaucaccucccucggcgccaucgucuccugcuacggcaagaccaagugcaccgccuccaacaagaaccgcggcaucaucaagaccuucuccaacggcugcgacuacgucuccaacaagggcgucgacaccgucuccgucggcaacacccucuacugcgucaacaagcaggagggcaagucccucuacgucaagggcgagcccaucaucaacuucuacgacccccucgucuuccccuccgacgaguucgacgccuccaucucccaggucaacgagaagaucaaccagucccucgccuucauccgcaaguccgacgagcuccuccacaacgucaacgucggcaaguccaccaccaacaucaugaucaccaccaucaucaucgucaucaucgucauccuccuccuccucaucgccgucggccucuuccucuacugcaaggcccgcuccacccccgucacccucuccaaggaccagcucuccggcaucaacaacaucgccuucuccaacugaggacuaguggaagcauuuuccuggcugauuaaaagaaauuacucagcuauggucaucuguuccuguuagaaggcuaugcagcauauuauauacuaugcgcauguuaugaaaugcauaauaaaaaauuuuaaaaaaucuaaaagaucuaaaaaaaaaaaaaaaaaaaaaaaaaaaaaaaaaaaaaaaaaaaaaaaaaaaaaaaaaaaaaaaaugcaucccccccccccccccccccccccccccccccaaaggcucuuuucagagccaccagaauu

SEQ ID NO: 16270 - RNA, 1979 nt, Artificial Sequence
  mRNA product Design c-4 comprising derived and/or modified sequence from HRSV(Memphis-37)__AIY60640.1__F_DSCav1_mut4 (opt3)
gggagaguccgcucagccagguugcagaagcggcuuagcguguguccuaaucuucucucugcguguagguaggccugugccgcaaacaagcuuaccauggagcugcccauccucaagaccaacgccauuacaacuauacuugcugcagugacgcugugcuucgccagcucccagaauaucaccgaagaguuuuaccaaucuacauguucagcggucaguaaaggcuauuugagcgcuuuaagaacugggugguacaccuccguuauuacaaucgaacugucuaacauuaaggagaauaaaugcaacggaaccgacgccaaggugaaacuaaucaagcaggaacucgauaaguauaaaaaugcaguaacugagcugcagcuucugaugcagucgaccccugccgcugguucaggcagcgcaauauguagugggaucgccgugugcaaggucuugcaccucgagggagaagugaacaaaauuaagaaugcucugcuguccacaaacaaagccguugugucucucagcaauggcgucuccguguuaacguucaagguacuggaccuuaagaacuacaucgauaaacaauugcugccaauucuaaauaagcagucauguaguaucagcaacauagagacuguuauugaauuucagcagaaaaauaacaggcuccuggagaucacccgggaguucucugugaaugcgggugucacaacuccgguguccaccuauaugcuuacaaacucagaacuguugagccucauuaacgacaugcccaucaccaaugaucaaaagaaacugaugaguaacaaugugcagaucguccgccagcagucuuacuccauuaugugcauaaucaaggaggaaguuuuagcauaugugguacaacugccucucuacggggugauugacacgccauguuggaaacuucauacuagcccccugugcacaaccaacacuaaggagggaucgaauaucuguuugacacgaaccgaucguggcugguacugcgacaacgccggcucugucuccuuuuucccucaggcugaaacguguaaggugcagucaaauagaguguuuugcgauaccaugaacaguagaacacugccaagcgaggugaaucucugcaacauagacauuuucaaucccaaauaugauuguaagaucaugacuuccaaaaccgacgucucuagcucagugaucacaagucugggggccauuguauccugcuacggaaagacuaaauguaccgcaagcaacaagaauagggguaucauuaagacauuuucuaacggcugcgauuauguuucaaauaaagggguggacaccgucagugugggaaacacucuuuacugugucaacaagcaagagggcaaaagccuguaugugaagggugaaccuauaaucaauuucuacgacccauugguuuuuccguccgaugaguucgacgcuucuauuucgcagguuaacgagaaaaucaaucagagccucgccuuuauccggaaguccgaugaacuguuacacaacguaaaugucgggaagucaacgacaaacauuaugauaaccacuaucauuaucgugauuaucguuauacugcuacuccugaucgcggugggacuuuucuuguauugcaaagcccgcaguacccccgucacacugucuaaggaccagcucagcggcauuaauaacaucgcauucuccaauugaggacuaguggaagcauuuuccuggcugauuaaaagaaauuacucagcuauggucaucuguuccuguuagaaggcuaugcagcauauuauauacuaugcgcauguuaugaaaugcauaauaaaaaauuuuaaaaaaucuaaaagaucuaaaaaaaaaaaaaaaaaaaaaaaaaaaaaaaaaaaaaaaaaaaaaaaaaaaaaaaaaaaaaaaaugcaucccccccccccccccccccccccccccccccaaaggcucuuuucagagccaccagaauu

SEQ ID NO: 16271 - RNA, 1979 nt, Artificial Sequence
  mRNA product Design c-4 comprising derived and/or modified sequence from HRSV(Memphis-37)__AIY60640.1__F_DSCav1_mut4 (opt4)
gggagaguccgcucagccagguugcagaagcggcuuagcguguguccuaaucuucucucugcguguagguaggccugugccgcaaacaagcuuaccauggagcugcccauccugaagaccaacgccaucaccaccauccuggccgccgugacccugugcuucgccagcagccagaacaucaccgaggaguucuaccagagcaccugcagcgccgugagcaagggcuaccugagcgcccugagaaccggcugguacaccagcgugaucaccaucgagcugagcaacaucaaggagaacaagugcaacggcaccgacgccaaggugaagcugaucaagcaggagcuggacaaguacaagaacgccgugaccgagcugcagcugcugaugcagagcacccccgccgccggcagcggcagcgccaucugcagcggcaucgccgugugcaaggugcugcaccuggagggcgaggugaacaagaucaagaacgcccugcugagcaccaacaaggccguggugagccugagcaacggcgugagcgugcugaccuucaaggugcuggaccugaagaacuacaucgacaagcagcugcugcccauccugaacaagcagagcugcagcaucagcaacaucgagaccgugaucgaguuccagcagaagaacaacagacugcuggagaucaccagagaguucagcgugaacgccggcgugaccacccccgugagcaccuacaugcugaccaacagcgagcugcugagccugaucaacgacaugcccaucaccaacgaccagaagaagcugaugagcaacaacgugcagaucgugagacagcagagcuacagcaucaugugcaucaucaaggaggaggugcuggccuacguggugcagcugccccuguacggcgugaucgacacccccugcuggaagcugcacaccagcccccugugcaccaccaacaccaaggagggcagcaacaucugccugaccagaaccgacagaggcugguacugcgacaacgccggcagcgugagcuucuucccccaggccgagaccugcaaggugcagagcaacagaguguucugcgacaccaugaacagcagaacccugcccagcgaggugaaccugugcaacaucgacaucuucaaccccaaguacgacugcaagaucaugaccagcaagaccgacgugagcagcagcgugaucaccagccugggcgccaucgugagcugcuacggcaagaccaagugcaccgccagcaacaagaacagaggcaucaucaagaccuucagcaacggcugcgacuacgugagcaacaagggcguggacaccgugagcgugggcaacacccuguacugcgugaacaagcaggagggcaagagccuguacgugaagggcgagcccaucaucaacuucuacgacccccugguguuccccagcgacgaguucgacgccagcaucagccaggugaacgagaagaucaaccagagccuggccuucaucagaaagagcgacgagcugcugcacaacgugaacgugggcaagagcaccaccaacaucaugaucaccaccaucaucaucgugaucaucgugauccugcugcugcugaucgccgugggccuguuccuguacugcaaggccagaagcacccccgugacccugagcaaggaccagcugagcggcaucaacaacaucgccuucagcaacugaggacuaguggaagcauuuuccuggcugauuaaaagaaauuacucagcuauggucaucuguuccuguuagaaggcuaugcagcauauuauauacuaugcgcauguuaugaaaugcauaauaaaaaauuuuaaaaaaucuaaaagaucuaaaaaaaaaaaaaaaaaaaaaaaaaaaaaaaaaaaaaaaaaaaaaaaaaaaaaaaaaaaaaaaaugcaucccccccccccccccccccccccccccccccaaaggcucuuuucagagccaccagaauu

SEQ ID NO: 16272 - RNA, 1979 nt, Artificial Sequence
  mRNA product Design c-4 comprising derived and/or modified sequence from HRSV(Memphis-37)__AIY60640.1__F_DSCav1_mut4 (opt5)
gggagaguccgcucagccagguugcagaagcggcuuagcguguguccuaaucuucucucugcguguagguaggccugugccgcaaacaagcuuaccauggagcugcccauccucaagaccaacgccauuacaacgauccuggcugccgugacccuuugcuucgcgagcucccagaauauuacagaagaguuuuaccaaucuaccuguagcgcugucuccaaaggcuaucugucugcccucagaacagggugguacaccagcguuaucacaauugaacuguccaacaucaaggagaauaaaugcaacggaaccgacgccaaggugaaacuuaucaagcaggaacuggauaaguauaaaaaugcugugacggagcuccagcugcugaugcagucuaccccugccgcuggcagcggguccgccauuuguagcggaaucgcggucugcaaggugcuccaccuggagggcgaaguuaacaaaauuaagaaugcccuucugucuacaaacaaagcuguggucucccucagcaauggggugucuguucugaccuucaaggugcuugaccugaagaacuacaucgauaaacaacuccugccgauucugaauaagcaguccuguagcaucucuaacauugagacagucaucgaauuucagcagaaaaauaaccggcuccuggagaucacccgcgaguucuccgugaaugccggagugacgacacccgucagcaccuauaugcuuacaaacuccgaacugcucucucugauuaacgacaugccuaucaccaaugaucaaaagaaacuuaugagcaacaauguucagauugugagacagcaguccuacagcaucaugugcauuaucaaggaggaagugcuggcuuaugucgugcaacucccccuguacggcguuaucgacaccccuuguuggaaacugcauacaucuccccucugcacgaccaacacaaaggagggcuccaauauuugucugacccggacagaucgcgggugguacugcgacaacgccggaagcgugagcuuuuucccucaggcggaaaccuguaagguccagucuaauagaguguuuugcgauacgaugaacuccagaacacugccgucugagguuaaucucugcaacaucgacauuuucaaucccaaauaugauuguaagaucaugaccagcaaaaccgacguguccagcucugucauuacaucccugggcgccaucgugagcugcuacgggaagaccaaauguacagcuucuaacaagaaucggggaaucauuaagacguuuuccaacggcugcgauuaugucagcaauaaagggguggacaccguuuccgugggaaacacacuuuacugugucaacaagcaagagggcaaaucucuguaugugaagggcgaaccuaucauuaauuucuacgacccccucguuuuuccuagcgaugaguucgacgccuccaucucucaggugaacgaaaagauuaaucagagccuggcuuuuauccgcaaguccgaugagcugcuccacaacgucaauguggggaaaagcaccacaaacauuaugaucaccacgaucauuaucgugauuaucguuauucugcuucugcucaucgccgucggacuguuccuguauugcaaagccagaucuacccccgugacacuuuccaaggaccagcucagcggcaucaauaacauugcuuucucuaauugaggacuaguggaagcauuuuccuggcugauuaaaagaaauuacucagcuauggucaucuguuccuguuagaaggcuaugcagcauauuauauacuaugcgcauguuaugaaaugcauaauaaaaaauuuuaaaaaaucuaaaagaucuaaaaaaaaaaaaaaaaaaaaaaaaaaaaaaaaaaaaaaaaaaaaaaaaaaaaaaaaaaaaaaaaugcaucccccccccccccccccccccccccccccccaaaggcucuuuucagagccaccagaauu

SEQ ID NO: 16273 - RNA, 1979 nt, Artificial Sequence
  mRNA product Design c-4 comprising derived and/or modified sequence from HRSV(Memphis-37)__AIY60640.1__F_DSCav1_mut4 (opt6)
gggagaguccgcucagccagguugcagaagcggcuuagcguguguccuaaucuucucucugcguguagguaggccugugccgcaaacaagcuuaccauggaacucccaauccuaaaaacaaacgcaauaacaacaauauuagcagccguaacacucuguuucgccucaucccaaaacauaacagaagaauuuuaucaaucuacauguuccgccgucaguaaaggauaucuaucagccuuaagaacaggcugguacacaucaguaaucaccauagaauuauccaacauaaaagaaaacaaaugcaauggcacagaugccaaaguaaaacuaaucaaacaagaacuugauaaauauaaaaacgcaguaacagaauuacaauuauuaaugcaaagcacaccagccgcaggaucaggaucagcaauauguucaggaauagcagucuguaaaguacuacacuuagaaggagaaguaaacaaaauuaaaaacgcauuacuaagcaccaauaaagcaguaguaucacuaucaaacggcguauccguauuaacguucaaaguccucgaccugaaaaacuacauagauaaacaacuacuaccaauacuaaauaaacaaucaugcucaauaucaaacauagaaacuguuaucgaauuucaacagaaaaauaaccgacuacuagaaaucaccagagaauuuucaguaaacgcaggcgucacuacaccaguauccacauacaugcuaaccaacucggaauuacuuucccucauaaacgacaugccaauaacaaacgaccaaaagaaacuuaugucaaacaacguucaaauaguccgccaacaaucauacucaauaauguguaucauaaaagaagaaguccuagcauaugucguacaacuaccauuauacggaguaauugacacaccuugcuggaaacuacacacauccccacuauguacaacaaacacuaaagaaggaucaaacaucugccuaaccagaacagacagaggcugguauugcgacaacgcaggaucaguaucauucuucccacaagcagaaacaugcaaaguacaaucaaacagagucuucugcgacaccaugaacagcagaacccucccauccgaaguaaacuuaugcaacaucgauaucuucaacccaaaauacgacuguaaaauaaugacaucaaaaacagacguuucauccucaguaauaacaucauuaggugccauaguuucauguuacggaaaaaccaaauguaccgcaucaaacaaaaacagaggcauuauuaaaacauucucuaacggaugcgacuaugucaguaacaaaggaguagacacaguaucagucggaaacacauuauauugcguaaauaaacaagaaggaaaaagucuauacguaaaaggagaaccaauaauaaacuuuuacgacccucucguauucccaucagacgaauuugaugcauccauaucacaagucaacgaaaagauaaaccaaucccuagcauucauaagaaaaucagacgaacuacuccauaacguaaacguaggaaaaagcacaaccaauauaaugauaaccacaauaaucauaguaauaauagucauauuauuacuuuuaauugcaguaggacucuuucuauacugcaaagcaagaagcacaccaguaacacuaagcaaagaccaacuaucaggcaucaacaauaucgccuuuucaaauuaaggacuaguggaagcauuuuccuggcugauuaaaagaaauuacucagcuauggucaucuguuccuguuagaaggcuaugcagcauauuauauacuaugcgcauguuaugaaaugcauaauaaaaaauuuuaaaaaaucuaaaagaucuaaaaaaaaaaaaaaaaaaaaaaaaaaaaaaaaaaaaaaaaaaaaaaaaaaaaaaaaaaaaaaaaugcaucccccccccccccccccccccccccccccccaaaggcucuuuucagagccaccagaauu

SEQ ID NO: 16274 - RNA, 1979 nt, Artificial Sequence
  mRNA product Design c-4 comprising derived and/or modified sequence from HRSV(Memphis-37)__AIY60640.1__F_DSCav1_mut4 (opt11)
gggagaguccgcucagccagguugcagaagcggcuuagcguguguccuaaucuucucucugcguguagguaggccugugccgcaaacaagcuuaccauggagcugcccauccucaagaccaacgccaucaccacgauccuggccgcggugacccugugcuucgcgagcucccagaacaucaccgaggaguucuaccagagcacgugcuccgccgucagcaagggcuaccucuccgcccugcgcaccgggugguacaccagcgugaucaccaucgagcuguccaacaucaaggagaacaagugcaacggcaccgacgccaaggugaaacucaucaagcaggagcuggacaaguacaagaacgccgucaccgagcugcagcuccugaugcagagcaccccggccgccggguccggcagcgcuaucugcuccgggaucgcggugugcaaggugcugcaccucgagggcgaggucaacaagaucaagaaugcccugcugagcaccaacaaggccguggugucccucagcaacggagucagcgugcuuaccuucaaggugcuggaccucaagaacuacaucgacaagcagcugcugccuauccucaacaagcagagcugcuccaucagcaacaucgagacggucaucgaguuccagcagaagaacaaccggcugcuggagaucacccgcgaguucuccgugaacgccggggugaccacccccgucagcacguacaugcucaccaacagcgaacugcugucccucaucaacgacaugcccaucaccaacgaccagaagaagcugaugagcaacaacgugcagaucgugcggcagcaguccuacagcaucaugugcaucaucaaggaggaaguccuggccuacguggugcagcucccucuguacggcgucaucgacacccccugcuggaagcugcacacgagcccccucugcaccaccaacaccaaggagggguccaacaucugccugacgcgcaccgaccggggcugguacugcgacaacgcgggguccgugagcuucuucccccaggccgagaccugcaaggugcagagcaaccgcgucuucugcgacacuaugaacagcagaacgcucccguccgaggugaaccugugcaacauagacauauucaaccccaaguacgacugcaagaucaugaccagcaagaccgacgucuccagcuccgugauuaccagccugggcgcaaucguguccugcuacggcaagacgaagugcaccgccagcaacaagaaccgggggaucaucaagaccuucuccaacggcugcgacuaugucagcaacaaggggguggacaccgugagcgucggaaacacgcucuacugcgugaacaagcaagagggcaaguccuuauacgugaagggggagcccaucaucaacuucuacgacccccuggucuucccgagcgacgaguucgacgccagcauaagccaggugaacgagaagaucaaccagucccucgcguucauccgcaagagcgacgagcugcugcacaacgugaacgucggcaaguccaccaccaacaucaugaucaccaccaucaucaucgugaucaucgugauccuccugcugcucaucgccgucgggcuguuccuguacugcaaggcccggagcacgcccgugaccuuguccaaggaccagcucagcggcaucaacaacaucgccuucuccaacugaggacuaguggaagcauuuuccuggcugauuaaaagaaauuacucagcuauggucaucuguuccuguuagaaggcuaugcagcauauuauauacuaugcgcauguuaugaaaugcauaauaaaaaauuuuaaaaaaucuaaaagaucuaaaaaaaaaaaaaaaaaaaaaaaaaaaaaaaaaaaaaaaaaaaaaaaaaaaaaaaaaaaaaaaaugcaucccccccccccccccccccccccccccccccaaaggcucuuuucagagccaccagaauu

SEQ ID NO: 16275 - RNA, 1897 nt, Artificial Sequence
  mRNA product Design c-5 comprising derived and/or modified sequence from HRSV(Memphis-37)__AIY60640.1__F_DSCav1_mut4 (opt1)
gggagagcggcucggccauuuugucccagucaguccggaggcugcggcugcagaaguaccgccugcggaguaacugcaaagaagcuuaccauggagcugcccauccucaagaccaacgccaucaccacgauccuggccgcggugacccugugcuucgccagcucccagaacaucaccgaggaguucuaccagagcacgugcuccgccgucagcaagggcuaccucuccgcccugcgcaccgggugguacaccagcgugaucaccaucgagcuguccaacaucaaggagaacaagugcaacggcaccgacgccaaggugaagcucaucaagcaggagcuggacaaguacaagaacgcggucacggagcugcagcuccugaugcagagcaccccggccgccggcuccgggagcgcgaucugcuccggcaucgccgucugcaaggugcugcaccucgagggcgaggugaacaagaucaagaacgcccugcuguccaccaacaaggccgucgugagccucuccaacggggugagcguccugaccuucaaggugcuggaccucaagaacuacaucgacaagcagcugcugcccauccugaacaagcagagcugcuccaucagcaacaucgagaccgucaucgaguuccagcagaagaacaaccgccuccuggagaucacgcgggaguucagcgugaacgcgggcgugaccacccccgucuccaccuacaugcugacgaacagcgagcuccugucccugaucaacgacaugccgaucaccaacgaccagaagaagcucaugagcaacaacgugcagaucgugcgccagcaguccuacagcaucaugugcaucaucaaggaggagguccuggccuacguggugcagcugccccucuacggggucaucgacacccccugcuggaagcugcacaccagcccccugugcacgaccaacaccaaggagggcuccaacaucugccucacccggacggaccgcgggugguacugcgacaacgccggcagcguguccuucuucccgcaggccgagaccugcaagguccagagcaaccggguguucugcgacaccaugaacucccggacccugcccagcgaggugaaccucugcaacaucgacaucuucaaccccaaguacgacugcaagaucaugacguccaagaccgacgucagcuccagcgugaucaccucccugggcgccaucgugagcugcuacgggaagaccaagugcacggcgagcaacaagaaccgcggcaucaucaagaccuucuccaacgggugcgacuacgucagcaacaagggcguggacaccguguccgucggcaacacccuguacugcgugaacaagcaggagggcaagagccucuacgugaagggggagcccaucaucaacuucuacgacccgcuggucuuccccuccgacgaguucgacgccagcaucucccaggugaacgagaagaucaaccagagccuggccuucauccggaaguccgacgagcuccugcacaacgugaacgucggcaagagcaccacgaacaucaugaucaccaccaucaucaucgugaucaucgugauccugcugcuccugaucgccgucgggcuguuccucuacugcaaggcccgcuccacccccgugacgcugagcaaggaccagcuguccgggaucaacaacaucgcguucagcaacugaggacuagucccuguucccagagcccacuuuuuuuucuuuuuuugaaauaaaauagccugucuuucagaucuaaaaaaaaaaaaaaaaaaaaaaaaaaaaaaaaaaaaaaaaaaaaaaaaaaaaaaaaaaaaaaaaugcaucccccccccccccccccccccccccccccccaaaggcucuuuucagagccaccagaauu

SEQ ID NO: 16276 - RNA, 1897 nt, Artificial Sequence
  mRNA product Design c-5 comprising derived and/or modified sequence from HRSV(Memphis-37)__AIY60640.1__F_DSCav1_mut4 (opt1)
gggagagcggcucggccauuuugucccagucaguccggaggcugcggcugcagaaguaccgccugcggaguaacugcaaagaagcuuaccauggagcugcccauccucaagaccaacgccaucaccacgauccuggccgcggugacccugugcuucgccagcucccagaacaucaccgaggaguucuaccagagcacgugcuccgccgucagcaagggcuaccucuccgcccugcgcaccgggugguacaccagcgugaucaccaucgagcuguccaacaucaaggagaacaagugcaacggcaccgacgccaaggugaagcucaucaagcaggagcuggacaaguacaagaacgcggucacggagcugcagcuccugaugcagagcaccccggccgccggguccggcagcgccaucugcuccgggaucgcggugugcaaggugcugcaccucgagggcgaggucaacaagaucaagaacgcccugcugagcaccaacaaggccguggugucccucagcaacggcgucuccgugcugaccuucaaggugcuggaccucaagaacuacaucgacaagcagcugcugcccauccucaacaagcagagcugcuccaucagcaacaucgagacggucaucgaguuccagcagaagaacaaccggcugcuggagaucacccgcgaguucuccgugaacgccggggugaccacccccgucagcacguacaugcucaccaacagcgagcugcugucccucaucaacgacaugcccaucaccaacgaccagaagaagcugaugagcaacaacgugcagaucgugcggcagcaguccuacagcaucaugugcaucaucaaggaggagguccuggccuacguggugcagcucccgcuguacggcgucaucgacacccccugcuggaagcugcacacgagcccccucugcaccaccaacaccaaggagggguccaacaucugccugacgcgcaccgaccggggcugguacugcgacaacgcgggguccgugagcuucuucccccaggccgagaccugcaaggugcaguccaaccgcgucuucugcgacaccaugaacagccggacgcucccguccgaggugaaccugugcaacaucgacaucuucaaccccaaguacgacugcaagaucaugaccagcaagaccgacgucuccagcuccgugaucaccagccugggcgccaucguguccugcuacggcaagacgaagugcaccgccagcaacaagaaccgggggaucaucaagaccuucuccaacggcugcgacuacgucagcaacaaggggguggacaccgugagcgucggcaacacgcucuacugcgugaacaagcaggagggcaagucccuguacgugaagggggagcccaucaucaacuucuacgacccccuggucuucccgagcgacgaguucgacgccuccaucagccaggugaacgagaagaucaaccagucccucgcguucauccgcaagagcgacgagcugcugcacaacgugaacgucggcaaguccaccaccaacaucaugaucaccaccaucaucaucgugaucaucgugauccuccugcugcucaucgccgucgggcuguuccuguacugcaaggcccggagcacgcccgugacccuguccaaggaccagcucagcggcaucaacaacaucgccuucuccaacugaggacuagucccuguucccagagcccacuuuuuuuucuuuuuuugaaauaaaauagccugucuuucagaucuaaaaaaaaaaaaaaaaaaaaaaaaaaaaaaaaaaaaaaaaaaaaaaaaaaaaaaaaaaaaaaaaugcaucccccccccccccccccccccccccccccccaaaggcucuuuucagagccaccagaauu

SEQ ID NO: 16277 - RNA, 1897 nt, Artificial Sequence
  mRNA product Design c-5 comprising derived and/or modified sequence from HRSV(Memphis-37)__AIY60640.1__F_DSCav1_mut4 (opt2)
gggagagcggcucggccauuuugucccagucaguccggaggcugcggcugcagaaguaccgccugcggaguaacugcaaagaagcuuaccauggagcuccccauccucaagaccaacgccaucaccaccauccucgccgccgucacccucugcuucgccuccucccagaacaucaccgaggaguucuaccaguccaccugcuccgccgucuccaagggcuaccucuccgcccuccgcaccggcugguacaccuccgucaucaccaucgagcucuccaacaucaaggagaacaagugcaacggcaccgacgccaaggucaagcucaucaagcaggagcucgacaaguacaagaacgccgucaccgagcuccagcuccucaugcaguccacccccgccgccggcuccggcuccgccaucugcuccggcaucgccgucugcaagguccuccaccucgagggcgaggucaacaagaucaagaacgcccuccucuccaccaacaaggccgucgucucccucuccaacggcgucuccguccucaccuucaagguccucgaccucaagaacuacaucgacaagcagcuccuccccauccucaacaagcaguccugcuccaucuccaacaucgagaccgucaucgaguuccagcagaagaacaaccgccuccucgagaucacccgcgaguucuccgucaacgccggcgucaccacccccgucuccaccuacaugcucaccaacuccgagcuccucucccucaucaacgacaugcccaucaccaacgaccagaagaagcucauguccaacaacguccagaucguccgccagcaguccuacuccaucaugugcaucaucaaggaggagguccucgccuacgucguccagcucccccucuacggcgucaucgacacccccugcuggaagcuccacaccuccccccucugcaccaccaacaccaaggagggcuccaacaucugccucacccgcaccgaccgcggcugguacugcgacaacgccggcuccgucuccuucuucccccaggccgagaccugcaagguccaguccaaccgcgucuucugcgacaccaugaacucccgcacccuccccuccgaggucaaccucugcaacaucgacaucuucaaccccaaguacgacugcaagaucaugaccuccaagaccgacgucuccuccuccgucaucaccucccucggcgccaucgucuccugcuacggcaagaccaagugcaccgccuccaacaagaaccgcggcaucaucaagaccuucuccaacggcugcgacuacgucuccaacaagggcgucgacaccgucuccgucggcaacacccucuacugcgucaacaagcaggagggcaagucccucuacgucaagggcgagcccaucaucaacuucuacgacccccucgucuuccccuccgacgaguucgacgccuccaucucccaggucaacgagaagaucaaccagucccucgccuucauccgcaaguccgacgagcuccuccacaacgucaacgucggcaaguccaccaccaacaucaugaucaccaccaucaucaucgucaucaucgucauccuccuccuccucaucgccgucggccucuuccucuacugcaaggcccgcuccacccccgucacccucuccaaggaccagcucuccggcaucaacaacaucgccuucuccaacugaggacuagucccuguucccagagcccacuuuuuuuucuuuuuuugaaauaaaauagccugucuuucagaucuaaaaaaaaaaaaaaaaaaaaaaaaaaaaaaaaaaaaaaaaaaaaaaaaaaaaaaaaaaaaaaaaugcaucccccccccccccccccccccccccccccccaaaggcucuuuucagagccaccagaauu

SEQ ID NO: 16278 - RNA, 1897 nt, Artificial Sequence
  mRNA product Design c-5 comprising derived and/or modified sequence from HRSV(Memphis-37)__AIY60640.1__F_DSCav1_mut4 (opt3)
gggagagcggcucggccauuuugucccagucaguccggaggcugcggcugcagaaguaccgccugcggaguaacugcaaagaagcuuaccauggagcugcccauccucaagaccaacgccauuacaacuauacuugcugcagugacgcugugcuucgccagcucccagaauaucaccgaagaguuuuaccaaucuacauguucagcggucaguaaaggcuauuugagcgcuuuaagaacugggugguacaccuccguuauuacaaucgaacugucuaacauuaaggagaauaaaugcaacggaaccgacgccaaggugaaacuaaucaagcaggaacucgauaaguauaaaaaugcaguaacugagcugcagcuucugaugcagucgaccccugccgcugguucaggcagcgcaauauguagugggaucgccgugugcaaggucuugcaccucgagggagaagugaacaaaauuaagaaugcucugcuguccacaaacaaagccguugugucucucagcaauggcgucuccguguuaacguucaagguacuggaccuuaagaacuacaucgauaaacaauugcugccaauucuaaauaagcagucauguaguaucagcaacauagagacuguuauugaauuucagcagaaaaauaacaggcuccuggagaucacccgggaguucucugugaaugcgggugucacaacuccgguguccaccuauaugcuuacaaacucagaacuguugagccucauuaacgacaugcccaucaccaaugaucaaaagaaacugaugaguaacaaugugcagaucguccgccagcagucuuacuccauuaugugcauaaucaaggaggaaguuuuagcauaugugguacaacugccucucuacggggugauugacacgccauguuggaaacuucauacuagcccccugugcacaaccaacacuaaggagggaucgaauaucuguuugacacgaaccgaucguggcugguacugcgacaacgccggcucugucuccuuuuucccucaggcugaaacguguaaggugcagucaaauagaguguuuugcgauaccaugaacaguagaacacugccaagcgaggugaaucucugcaacauagacauuuucaaucccaaauaugauuguaagaucaugacuuccaaaaccgacgucucuagcucagugaucacaagucugggggccauuguauccugcuacggaaagacuaaauguaccgcaagcaacaagaauagggguaucauuaagacauuuucuaacggcugcgauuauguuucaaauaaagggguggacaccgucagugugggaaacacucuuuacugugucaacaagcaagagggcaaaagccuguaugugaagggugaaccuauaaucaauuucuacgacccauugguuuuuccguccgaugaguucgacgcuucuauuucgcagguuaacgagaaaaucaaucagagccucgccuuuauccggaaguccgaugaacuguuacacaacguaaaugucgggaagucaacgacaaacauuaugauaaccacuaucauuaucgugauuaucguuauacugcuacuccugaucgcggugggacuuuucuuguauugcaaagcccgcaguacccccgucacacugucuaaggaccagcucagcggcauuaauaacaucgcauucuccaauugaggacuagucccuguucccagagcccacuuuuuuuucuuuuuuugaaauaaaauagccugucuuucagaucuaaaaaaaaaaaaaaaaaaaaaaaaaaaaaaaaaaaaaaaaaaaaaaaaaaaaaaaaaaaaaaaaugcaucccccccccccccccccccccccccccccccaaaggcucuuuucagagccaccagaauu

SEQ ID NO: 16279 - RNA, 1897 nt, Artificial Sequence
  mRNA product Design c-5 comprising derived and/or modified sequence from HRSV(Memphis-37)__AIY60640.1__F_DSCav1_mut4 (opt4)
gggagagcggcucggccauuuugucccagucaguccggaggcugcggcugcagaaguaccgccugcggaguaacugcaaagaagcuuaccauggagcugcccauccugaagaccaacgccaucaccaccauccuggccgccgugacccugugcuucgccagcagccagaacaucaccgaggaguucuaccagagcaccugcagcgccgugagcaagggcuaccugagcgcccugagaaccggcugguacaccagcgugaucaccaucgagcugagcaacaucaaggagaacaagugcaacggcaccgacgccaaggugaagcugaucaagcaggagcuggacaaguacaagaacgccgugaccgagcugcagcugcugaugcagagcacccccgccgccggcagcggcagcgccaucugcagcggcaucgccgugugcaaggugcugcaccuggagggcgaggugaacaagaucaagaacgcccugcugagcaccaacaaggccguggugagccugagcaacggcgugagcgugcugaccuucaaggugcuggaccugaagaacuacaucgacaagcagcugcugcccauccugaacaagcagagcugcagcaucagcaacaucgagaccgugaucgaguuccagcagaagaacaacagacugcuggagaucaccagagaguucagcgugaacgccggcgugaccacccccgugagcaccuacaugcugaccaacagcgagcugcugagccugaucaacgacaugcccaucaccaacgaccagaagaagcugaugagcaacaacgugcagaucgugagacagcagagcuacagcaucaugugcaucaucaaggaggaggugcuggccuacguggugcagcugccccuguacggcgugaucgacacccccugcuggaagcugcacaccagcccccugugcaccaccaacaccaaggagggcagcaacaucugccugaccagaaccgacagaggcugguacugcgacaacgccggcagcgugagcuucuucccccaggccgagaccugcaaggugcagagcaacagaguguucugcgacaccaugaacagcagaacccugcccagcgaggugaaccugugcaacaucgacaucuucaaccccaaguacgacugcaagaucaugaccagcaagaccgacgugagcagcagcgugaucaccagccugggcgccaucgugagcugcuacggcaagaccaagugcaccgccagcaacaagaacagaggcaucaucaagaccuucagcaacggcugcgacuacgugagcaacaagggcguggacaccgugagcgugggcaacacccuguacugcgugaacaagcaggagggcaagagccuguacgugaagggcgagcccaucaucaacuucuacgacccccugguguuccccagcgacgaguucgacgccagcaucagccaggugaacgagaagaucaaccagagccuggccuucaucagaaagagcgacgagcugcugcacaacgugaacgugggcaagagcaccaccaacaucaugaucaccaccaucaucaucgugaucaucgugauccugcugcugcugaucgccgugggccuguuccuguacugcaaggccagaagcacccccgugacccugagcaaggaccagcugagcggcaucaacaacaucgccuucagcaacugaggacuagucccuguucccagagcccacuuuuuuuucuuuuuuugaaauaaaauagccugucuuucagaucuaaaaaaaaaaaaaaaaaaaaaaaaaaaaaaaaaaaaaaaaaaaaaaaaaaaaaaaaaaaaaaaaugcaucccccccccccccccccccccccccccccccaaaggcucuuuucagagccaccagaauu

SEQ ID NO: 16280 - RNA, 1897 nt, Artificial Sequence
  mRNA product Design c-5 comprising derived and/or modified sequence from HRSV(Memphis-37)__AIY60640.1__F_DSCav1_mut4 (opt5)
gggagagcggcucggccauuuugucccagucaguccggaggcugcggcugcagaaguaccgccugcggaguaacugcaaagaagcuuaccauggagcugcccauccucaagaccaacgccauuacaacgauccuggcugccgugacccuuugcuucgcgagcucccagaauauuacagaagaguuuuaccaaucuaccuguagcgcugucuccaaaggcuaucugucugcccucagaacagggugguacaccagcguuaucacaauugaacuguccaacaucaaggagaauaaaugcaacggaaccgacgccaaggugaaacuuaucaagcaggaacuggauaaguauaaaaaugcugugacggagcuccagcugcugaugcagucuaccccugccgcuggcagcggguccgccauuuguagcggaaucgcggucugcaaggugcuccaccuggagggcgaaguuaacaaaauuaagaaugcccuucugucuacaaacaaagcuguggucucccucagcaauggggugucuguucugaccuucaaggugcuugaccugaagaacuacaucgauaaacaacuccugccgauucugaauaagcaguccuguagcaucucuaacauugagacagucaucgaauuucagcagaaaaauaaccggcuccuggagaucacccgcgaguucuccgugaaugccggagugacgacacccgucagcaccuauaugcuuacaaacuccgaacugcucucucugauuaacgacaugccuaucaccaaugaucaaaagaaacuuaugagcaacaauguucagauugugagacagcaguccuacagcaucaugugcauuaucaaggaggaagugcuggcuuaugucgugcaacucccccuguacggcguuaucgacaccccuuguuggaaacugcauacaucuccccucugcacgaccaacacaaaggagggcuccaauauuugucugacccggacagaucgcgggugguacugcgacaacgccggaagcgugagcuuuuucccucaggcggaaaccuguaagguccagucuaauagaguguuuugcgauacgaugaacuccagaacacugccgucugagguuaaucucugcaacaucgacauuuucaaucccaaauaugauuguaagaucaugaccagcaaaaccgacguguccagcucugucauuacaucccugggcgccaucgugagcugcuacgggaagaccaaauguacagcuucuaacaagaaucggggaaucauuaagacguuuuccaacggcugcgauuaugucagcaauaaagggguggacaccguuuccgugggaaacacacuuuacugugucaacaagcaagagggcaaaucucuguaugugaagggcgaaccuaucauuaauuucuacgacccccucguuuuuccuagcgaugaguucgacgccuccaucucucaggugaacgaaaagauuaaucagagccuggcuuuuauccgcaaguccgaugagcugcuccacaacgucaauguggggaaaagcaccacaaacauuaugaucaccacgaucauuaucgugauuaucguuauucugcuucugcucaucgccgucggacuguuccuguauugcaaagccagaucuacccccgugacacuuuccaaggaccagcucagcggcaucaauaacauugcuuucucuaauugaggacuagucccuguucccagagcccacuuuuuuuucuuuuuuugaaauaaaauagccugucuuucagaucuaaaaaaaaaaaaaaaaaaaaaaaaaaaaaaaaaaaaaaaaaaaaaaaaaaaaaaaaaaaaaaaaugcaucccccccccccccccccccccccccccccccaaaggcucuuuucagagccaccagaauu

SEQ ID NO: 16281 - RNA, 1897 nt, Artificial Sequence
  mRNA product Design c-5 comprising derived and/or modified sequence from HRSV(Memphis-37)__AIY60640.1__F_DSCav1_mut4 (opt6)
gggagagcggcucggccauuuugucccagucaguccggaggcugcggcugcagaaguaccgccugcggaguaacugcaaagaagcuuaccauggaacucccaauccuaaaaacaaacgcaauaacaacaauauuagcagccguaacacucuguuucgccucaucccaaaacauaacagaagaauuuuaucaaucuacauguuccgccgucaguaaaggauaucuaucagccuuaagaacaggcugguacacaucaguaaucaccauagaauuauccaacauaaaagaaaacaaaugcaauggcacagaugccaaaguaaaacuaaucaaacaagaacuugauaaauauaaaaacgcaguaacagaauuacaauuauuaaugcaaagcacaccagccgcaggaucaggaucagcaauauguucaggaauagcagucuguaaaguacuacacuuagaaggagaaguaaacaaaauuaaaaacgcauuacuaagcaccaauaaagcaguaguaucacuaucaaacggcguauccguauuaacguucaaaguccucgaccugaaaaacuacauagauaaacaacuacuaccaauacuaaauaaacaaucaugcucaauaucaaacauagaaacuguuaucgaauuucaacagaaaaauaaccgacuacuagaaaucaccagagaauuuucaguaaacgcaggcgucacuacaccaguauccacauacaugcuaaccaacucggaauuacuuucccucauaaacgacaugccaauaacaaacgaccaaaagaaacuuaugucaaacaacguucaaauaguccgccaacaaucauacucaauaauguguaucauaaaagaagaaguccuagcauaugucguacaacuaccauuauacggaguaauugacacaccuugcuggaaacuacacacauccccacuauguacaacaaacacuaaagaaggaucaaacaucugccuaaccagaacagacagaggcugguauugcgacaacgcaggaucaguaucauucuucccacaagcagaaacaugcaaaguacaaucaaacagagucuucugcgacaccaugaacagcagaacccucccauccgaaguaaacuuaugcaacaucgauaucuucaacccaaaauacgacuguaaaauaaugacaucaaaaacagacguuucauccucaguaauaacaucauuaggugccauaguuucauguuacggaaaaaccaaauguaccgcaucaaacaaaaacagaggcauuauuaaaacauucucuaacggaugcgacuaugucaguaacaaaggaguagacacaguaucagucggaaacacauuauauugcguaaauaaacaagaaggaaaaagucuauacguaaaaggagaaccaauaauaaacuuuuacgacccucucguauucccaucagacgaauuugaugcauccauaucacaagucaacgaaaagauaaaccaaucccuagcauucauaagaaaaucagacgaacuacuccauaacguaaacguaggaaaaagcacaaccaauauaaugauaaccacaauaaucauaguaauaauagucauauuauuacuuuuaauugcaguaggacucuuucuauacugcaaagcaagaagcacaccaguaacacuaagcaaagaccaacuaucaggcaucaacaauaucgccuuuucaaauuaaggacuagucccuguucccagagcccacuuuuuuuucuuuuuuugaaauaaaauagccugucuuucagaucuaaaaaaaaaaaaaaaaaaaaaaaaaaaaaaaaaaaaaaaaaaaaaaaaaaaaaaaaaaaaaaaaugcaucccccccccccccccccccccccccccccccaaaggcucuuuucagagccaccagaauu

SEQ ID NO: 16282 - RNA, 1897 nt, Artificial Sequence
  mRNA product Design c-5 comprising derived and/or modified sequence from HRSV(Memphis-37)__AIY60640.1__F_DSCav1_mut4 (opt11)
gggagagcggcucggccauuuugucccagucaguccggaggcugcggcugcagaaguaccgccugcggaguaacugcaaagaagcuuaccauggagcugcccauccucaagaccaacgccaucaccacgauccuggccgcggugacccugugcuucgcgagcucccagaacaucaccgaggaguucuaccagagcacgugcuccgccgucagcaagggcuaccucuccgcccugcgcaccgggugguacaccagcgugaucaccaucgagcuguccaacaucaaggagaacaagugcaacggcaccgacgccaaggugaaacucaucaagcaggagcuggacaaguacaagaacgccgucaccgagcugcagcuccugaugcagagcaccccggccgccggguccggcagcgcuaucugcuccgggaucgcggugugcaaggugcugcaccucgagggcgaggucaacaagaucaagaaugcccugcugagcaccaacaaggccguggugucccucagcaacggagucagcgugcuuaccuucaaggugcuggaccucaagaacuacaucgacaagcagcugcugccuauccucaacaagcagagcugcuccaucagcaacaucgagacggucaucgaguuccagcagaagaacaaccggcugcuggagaucacccgcgaguucuccgugaacgccggggugaccacccccgucagcacguacaugcucaccaacagcgaacugcugucccucaucaacgacaugcccaucaccaacgaccagaagaagcugaugagcaacaacgugcagaucgugcggcagcaguccuacagcaucaugugcaucaucaaggaggaaguccuggccuacguggugcagcucccucuguacggcgucaucgacacccccugcuggaagcugcacacgagcccccucugcaccaccaacaccaaggagggguccaacaucugccugacgcgcaccgaccggggcugguacugcgacaacgcgggguccgugagcuucuucccccaggccgagaccugcaaggugcagagcaaccgcgucuucugcgacacuaugaacagcagaacgcucccguccgaggugaaccugugcaacauagacauauucaaccccaaguacgacugcaagaucaugaccagcaagaccgacgucuccagcuccgugauuaccagccugggcgcaaucguguccugcuacggcaagacgaagugcaccgccagcaacaagaaccgggggaucaucaagaccuucuccaacggcugcgacuaugucagcaacaaggggguggacaccgugagcgucggaaacacgcucuacugcgugaacaagcaagagggcaaguccuuauacgugaagggggagcccaucaucaacuucuacgacccccuggucuucccgagcgacgaguucgacgccagcauaagccaggugaacgagaagaucaaccagucccucgcguucauccgcaagagcgacgagcugcugcacaacgugaacgucggcaaguccaccaccaacaucaugaucaccaccaucaucaucgugaucaucgugauccuccugcugcucaucgccgucgggcuguuccuguacugcaaggcccggagcacgcccgugaccuuguccaaggaccagcucagcggcaucaacaacaucgccuucuccaacugaggacuagucccuguucccagagcccacuuuuuuuucuuuuuuugaaauaaaauagccugucuuucagaucuaaaaaaaaaaaaaaaaaaaaaaaaaaaaaaaaaaaaaaaaaaaaaaaaaaaaaaaaaaaaaaaaugcaucccccccccccccccccccccccccccccccaaaggcucuuuucagagccaccagaauu

SEQ ID NO: 16283 - RNA, 1906 nt, Artificial Sequence
  mRNA product Design d-1 comprising derived and/or modified sequence from HRSV(Memphis-37)__AIY60640.1__F_DSCav1_mut4 (opt1)
gggagacccgugacccggaaguuguacggcuacgcgacuuucccucccacaaacccucgcgcccuuccuuuccuacuugggcccggcagaaagcuuaccauggagcugcccauccucaagaccaacgccaucaccacgauccuggccgcggugacccugugcuucgccagcucccagaacaucaccgaggaguucuaccagagcacgugcuccgccgucagcaagggcuaccucuccgcccugcgcaccgggugguacaccagcgugaucaccaucgagcuguccaacaucaaggagaacaagugcaacggcaccgacgccaaggugaagcucaucaagcaggagcuggacaaguacaagaacgcggucacggagcugcagcuccugaugcagagcaccccggccgccggcuccgggagcgcgaucugcuccggcaucgccgucugcaaggugcugcaccucgagggcgaggugaacaagaucaagaacgcccugcuguccaccaacaaggccgucgugagccucuccaacggggugagcguccugaccuucaaggugcuggaccucaagaacuacaucgacaagcagcugcugcccauccugaacaagcagagcugcuccaucagcaacaucgagaccgucaucgaguuccagcagaagaacaaccgccuccuggagaucacgcgggaguucagcgugaacgcgggcgugaccacccccgucuccaccuacaugcugacgaacagcgagcuccugucccugaucaacgacaugccgaucaccaacgaccagaagaagcucaugagcaacaacgugcagaucgugcgccagcaguccuacagcaucaugugcaucaucaaggaggagguccuggccuacguggugcagcugccccucuacggggucaucgacacccccugcuggaagcugcacaccagcccccugugcacgaccaacaccaaggagggcuccaacaucugccucacccggacggaccgcgggugguacugcgacaacgccggcagcguguccuucuucccgcaggccgagaccugcaagguccagagcaaccggguguucugcgacaccaugaacucccggacccugcccagcgaggugaaccucugcaacaucgacaucuucaaccccaaguacgacugcaagaucaugacguccaagaccgacgucagcuccagcgugaucaccucccugggcgccaucgugagcugcuacgggaagaccaagugcacggcgagcaacaagaaccgcggcaucaucaagaccuucuccaacgggugcgacuacgucagcaacaagggcguggacaccguguccgucggcaacacccuguacugcgugaacaagcaggagggcaagagccucuacgugaagggggagcccaucaucaacuucuacgacccgcuggucuuccccuccgacgaguucgacgccagcaucucccaggugaacgagaagaucaaccagagccuggccuucauccggaaguccgacgagcuccugcacaacgugaacgucggcaagagcaccacgaacaucaugaucaccaccaucaucaucgugaucaucgugauccugcugcuccugaucgccgucgggcuguuccucuacugcaaggcccgcuccacccccgugacgcugagcaaggaccagcuguccgggaucaacaacaucgcguucagcaacugaggacuagucccuguucccagagcccacuuuuuuuucuuuuuuugaaauaaaauagccugucuuucagaucuaaaaaaaaaaaaaaaaaaaaaaaaaaaaaaaaaaaaaaaaaaaaaaaaaaaaaaaaaaaaaaaaugcaucccccccccccccccccccccccccccccccaaaggcucuuuucagagccaccagaauu

SEQ ID NO: 16284 - RNA, 1906 nt, Artificial Sequence
  mRNA product Design d-1 comprising derived and/or modified sequence from HRSV(Memphis-37)__AIY60640.1__F_DSCav1_mut4 (opt1)
gggagacccgugacccggaaguuguacggcuacgcgacuuucccucccacaaacccucgcgcccuuccuuuccuacuugggcccggcagaaagcuuaccauggagcugcccauccucaagaccaacgccaucaccacgauccuggccgcggugacccugugcuucgccagcucccagaacaucaccgaggaguucuaccagagcacgugcuccgccgucagcaagggcuaccucuccgcccugcgcaccgggugguacaccagcgugaucaccaucgagcuguccaacaucaaggagaacaagugcaacggcaccgacgccaaggugaagcucaucaagcaggagcuggacaaguacaagaacgcggucacggagcugcagcuccugaugcagagcaccccggccgccggguccggcagcgccaucugcuccgggaucgcggugugcaaggugcugcaccucgagggcgaggucaacaagaucaagaacgcccugcugagcaccaacaaggccguggugucccucagcaacggcgucuccgugcugaccuucaaggugcuggaccucaagaacuacaucgacaagcagcugcugcccauccucaacaagcagagcugcuccaucagcaacaucgagacggucaucgaguuccagcagaagaacaaccggcugcuggagaucacccgcgaguucuccgugaacgccggggugaccacccccgucagcacguacaugcucaccaacagcgagcugcugucccucaucaacgacaugcccaucaccaacgaccagaagaagcugaugagcaacaacgugcagaucgugcggcagcaguccuacagcaucaugugcaucaucaaggaggagguccuggccuacguggugcagcucccgcuguacggcgucaucgacacccccugcuggaagcugcacacgagcccccucugcaccaccaacaccaaggagggguccaacaucugccugacgcgcaccgaccggggcugguacugcgacaacgcgggguccgugagcuucuucccccaggccgagaccugcaaggugcaguccaaccgcgucuucugcgacaccaugaacagccggacgcucccguccgaggugaaccugugcaacaucgacaucuucaaccccaaguacgacugcaagaucaugaccagcaagaccgacgucuccagcuccgugaucaccagccugggcgccaucguguccugcuacggcaagacgaagugcaccgccagcaacaagaaccgggggaucaucaagaccuucuccaacggcugcgacuacgucagcaacaaggggguggacaccgugagcgucggcaacacgcucuacugcgugaacaagcaggagggcaagucccuguacgugaagggggagcccaucaucaacuucuacgacccccuggucuucccgagcgacgaguucgacgccuccaucagccaggugaacgagaagaucaaccagucccucgcguucauccgcaagagcgacgagcugcugcacaacgugaacgucggcaaguccaccaccaacaucaugaucaccaccaucaucaucgugaucaucgugauccuccugcugcucaucgccgucgggcuguuccuguacugcaaggcccggagcacgcccgugacccuguccaaggaccagcucagcggcaucaacaacaucgccuucuccaacugaggacuagucccuguucccagagcccacuuuuuuuucuuuuuuugaaauaaaauagccugucuuucagaucuaaaaaaaaaaaaaaaaaaaaaaaaaaaaaaaaaaaaaaaaaaaaaaaaaaaaaaaaaaaaaaaaugcaucccccccccccccccccccccccccccccccaaaggcucuuuucagagccaccagaauu

SEQ ID NO: 16285 - RNA, 1906 nt, Artificial Sequence
  mRNA product Design d-1 comprising derived and/or modified sequence from HRSV(Memphis-37)__AIY60640.1__F_DSCav1_mut4 (opt2)
gggagacccgugacccggaaguuguacggcuacgcgacuuucccucccacaaacccucgcgcccuuccuuuccuacuugggcccggcagaaagcuuaccauggagcuccccauccucaagaccaacgccaucaccaccauccucgccgccgucacccucugcuucgccuccucccagaacaucaccgaggaguucuaccaguccaccugcuccgccgucuccaagggcuaccucuccgcccuccgcaccggcugguacaccuccgucaucaccaucgagcucuccaacaucaaggagaacaagugcaacggcaccgacgccaaggucaagcucaucaagcaggagcucgacaaguacaagaacgccgucaccgagcuccagcuccucaugcaguccacccccgccgccggcuccggcuccgccaucugcuccggcaucgccgucugcaagguccuccaccucgagggcgaggucaacaagaucaagaacgcccuccucuccaccaacaaggccgucgucucccucuccaacggcgucuccguccucaccuucaagguccucgaccucaagaacuacaucgacaagcagcuccuccccauccucaacaagcaguccugcuccaucuccaacaucgagaccgucaucgaguuccagcagaagaacaaccgccuccucgagaucacccgcgaguucuccgucaacgccggcgucaccacccccgucuccaccuacaugcucaccaacuccgagcuccucucccucaucaacgacaugcccaucaccaacgaccagaagaagcucauguccaacaacguccagaucguccgccagcaguccuacuccaucaugugcaucaucaaggaggagguccucgccuacgucguccagcucccccucuacggcgucaucgacacccccugcuggaagcuccacaccuccccccucugcaccaccaacaccaaggagggcuccaacaucugccucacccgcaccgaccgcggcugguacugcgacaacgccggcuccgucuccuucuucccccaggccgagaccugcaagguccaguccaaccgcgucuucugcgacaccaugaacucccgcacccuccccuccgaggucaaccucugcaacaucgacaucuucaaccccaaguacgacugcaagaucaugaccuccaagaccgacgucuccuccuccgucaucaccucccucggcgccaucgucuccugcuacggcaagaccaagugcaccgccuccaacaagaaccgcggcaucaucaagaccuucuccaacggcugcgacuacgucuccaacaagggcgucgacaccgucuccgucggcaacacccucuacugcgucaacaagcaggagggcaagucccucuacgucaagggcgagcccaucaucaacuucuacgacccccucgucuuccccuccgacgaguucgacgccuccaucucccaggucaacgagaagaucaaccagucccucgccuucauccgcaaguccgacgagcuccuccacaacgucaacgucggcaaguccaccaccaacaucaugaucaccaccaucaucaucgucaucaucgucauccuccuccuccucaucgccgucggccucuuccucuacugcaaggcccgcuccacccccgucacccucuccaaggaccagcucuccggcaucaacaacaucgccuucuccaacugaggacuagucccuguucccagagcccacuuuuuuuucuuuuuuugaaauaaaauagccugucuuucagaucuaaaaaaaaaaaaaaaaaaaaaaaaaaaaaaaaaaaaaaaaaaaaaaaaaaaaaaaaaaaaaaaaugcaucccccccccccccccccccccccccccccccaaaggcucuuuucagagccaccagaauu

SEQ ID NO: 16286 - RNA, 1906 nt, Artificial Sequence
  mRNA product Design d-1 comprising derived and/or modified sequence from HRSV(Memphis-37)__AIY60640.1__F_DSCav1_mut4 (opt3)
gggagacccgugacccggaaguuguacggcuacgcgacuuucccucccacaaacccucgcgcccuuccuuuccuacuugggcccggcagaaagcuuaccauggagcugcccauccucaagaccaacgccauuacaacuauacuugcugcagugacgcugugcuucgccagcucccagaauaucaccgaagaguuuuaccaaucuacauguucagcggucaguaaaggcuauuugagcgcuuuaagaacugggugguacaccuccguuauuacaaucgaacugucuaacauuaaggagaauaaaugcaacggaaccgacgccaaggugaaacuaaucaagcaggaacucgauaaguauaaaaaugcaguaacugagcugcagcuucugaugcagucgaccccugccgcugguucaggcagcgcaauauguagugggaucgccgugugcaaggucuugcaccucgagggagaagugaacaaaauuaagaaugcucugcuguccacaaacaaagccguugugucucucagcaauggcgucuccguguuaacguucaagguacuggaccuuaagaacuacaucgauaaacaauugcugccaauucuaaauaagcagucauguaguaucagcaacauagagacuguuauugaauuucagcagaaaaauaacaggcuccuggagaucacccgggaguucucugugaaugcgggugucacaacuccgguguccaccuauaugcuuacaaacucagaacuguugagccucauuaacgacaugcccaucaccaaugaucaaaagaaacugaugaguaacaaugugcagaucguccgccagcagucuuacuccauuaugugcauaaucaaggaggaaguuuuagcauaugugguacaacugccucucuacggggugauugacacgccauguuggaaacuucauacuagcccccugugcacaaccaacacuaaggagggaucgaauaucuguuugacacgaaccgaucguggcugguacugcgacaacgccggcucugucuccuuuuucccucaggcugaaacguguaaggugcagucaaauagaguguuuugcgauaccaugaacaguagaacacugccaagcgaggugaaucucugcaacauagacauuuucaaucccaaauaugauuguaagaucaugacuuccaaaaccgacgucucuagcucagugaucacaagucugggggccauuguauccugcuacggaaagacuaaauguaccgcaagcaacaagaauagggguaucauuaagacauuuucuaacggcugcgauuauguuucaaauaaagggguggacaccgucagugugggaaacacucuuuacugugucaacaagcaagagggcaaaagccuguaugugaagggugaaccuauaaucaauuucuacgacccauugguuuuuccguccgaugaguucgacgcuucuauuucgcagguuaacgagaaaaucaaucagagccucgccuuuauccggaaguccgaugaacuguuacacaacguaaaugucgggaagucaacgacaaacauuaugauaaccacuaucauuaucgugauuaucguuauacugcuacuccugaucgcggugggacuuuucuuguauugcaaagcccgcaguacccccgucacacugucuaaggaccagcucagcggcauuaauaacaucgcauucuccaauugaggacuagucccuguucccagagcccacuuuuuuuucuuuuuuugaaauaaaauagccugucuuucagaucuaaaaaaaaaaaaaaaaaaaaaaaaaaaaaaaaaaaaaaaaaaaaaaaaaaaaaaaaaaaaaaaaugcaucccccccccccccccccccccccccccccccaaaggcucuuuucagagccaccagaauu

SEQ ID NO: 16287 - RNA, 1906 nt, Artificial Sequence
  mRNA product Design d-1 comprising derived and/or modified sequence from HRSV(Memphis-37)__AIY60640.1__F_DSCav1_mut4 (opt4)
gggagacccgugacccggaaguuguacggcuacgcgacuuucccucccacaaacccucgcgcccuuccuuuccuacuugggcccggcagaaagcuuaccauggagcugcccauccugaagaccaacgccaucaccaccauccuggccgccgugacccugugcuucgccagcagccagaacaucaccgaggaguucuaccagagcaccugcagcgccgugagcaagggcuaccugagcgcccugagaaccggcugguacaccagcgugaucaccaucgagcugagcaacaucaaggagaacaagugcaacggcaccgacgccaaggugaagcugaucaagcaggagcuggacaaguacaagaacgccgugaccgagcugcagcugcugaugcagagcacccccgccgccggcagcggcagcgccaucugcagcggcaucgccgugugcaaggugcugcaccuggagggcgaggugaacaagaucaagaacgcccugcugagcaccaacaaggccguggugagccugagcaacggcgugagcgugcugaccuucaaggugcuggaccugaagaacuacaucgacaagcagcugcugcccauccugaacaagcagagcugcagcaucagcaacaucgagaccgugaucgaguuccagcagaagaacaacagacugcuggagaucaccagagaguucagcgugaacgccggcgugaccacccccgugagcaccuacaugcugaccaacagcgagcugcugagccugaucaacgacaugcccaucaccaacgaccagaagaagcugaugagcaacaacgugcagaucgugagacagcagagcuacagcaucaugugcaucaucaaggaggaggugcuggccuacguggugcagcugccccuguacggcgugaucgacacccccugcuggaagcugcacaccagcccccugugcaccaccaacaccaaggagggcagcaacaucugccugaccagaaccgacagaggcugguacugcgacaacgccggcagcgugagcuucuucccccaggccgagaccugcaaggugcagagcaacagaguguucugcgacaccaugaacagcagaacccugcccagcgaggugaaccugugcaacaucgacaucuucaaccccaaguacgacugcaagaucaugaccagcaagaccgacgugagcagcagcgugaucaccagccugggcgccaucgugagcugcuacggcaagaccaagugcaccgccagcaacaagaacagaggcaucaucaagaccuucagcaacggcugcgacuacgugagcaacaagggcguggacaccgugagcgugggcaacacccuguacugcgugaacaagcaggagggcaagagccuguacgugaagggcgagcccaucaucaacuucuacgacccccugguguuccccagcgacgaguucgacgccagcaucagccaggugaacgagaagaucaaccagagccuggccuucaucagaaagagcgacgagcugcugcacaacgugaacgugggcaagagcaccaccaacaucaugaucaccaccaucaucaucgugaucaucgugauccugcugcugcugaucgccgugggccuguuccuguacugcaaggccagaagcacccccgugacccugagcaaggaccagcugagcggcaucaacaacaucgccuucagcaacugaggacuagucccuguucccagagcccacuuuuuuuucuuuuuuugaaauaaaauagccugucuuucagaucuaaaaaaaaaaaaaaaaaaaaaaaaaaaaaaaaaaaaaaaaaaaaaaaaaaaaaaaaaaaaaaaaugcaucccccccccccccccccccccccccccccccaaaggcucuuuucagagccaccagaauu

SEQ ID NO: 16288 - RNA, 1906 nt, Artificial Sequence
  mRNA product Design d-1 comprising derived and/or modified sequence from HRSV(Memphis-37)__AIY60640.1__F_DSCav1_mut4 (opt5)
gggagacccgugacccggaaguuguacggcuacgcgacuuucccucccacaaacccucgcgcccuuccuuuccuacuugggcccggcagaaagcuuaccauggagcugcccauccucaagaccaacgccauuacaacgauccuggcugccgugacccuuugcuucgcgagcucccagaauauuacagaagaguuuuaccaaucuaccuguagcgcugucuccaaaggcuaucugucugcccucagaacagggugguacaccagcguuaucacaauugaacuguccaacaucaaggagaauaaaugcaacggaaccgacgccaaggugaaacuuaucaagcaggaacuggauaaguauaaaaaugcugugacggagcuccagcugcugaugcagucuaccccugccgcuggcagcggguccgccauuuguagcggaaucgcggucugcaaggugcuccaccuggagggcgaaguuaacaaaauuaagaaugcccuucugucuacaaacaaagcuguggucucccucagcaauggggugucuguucugaccuucaaggugcuugaccugaagaacuacaucgauaaacaacuccugccgauucugaauaagcaguccuguagcaucucuaacauugagacagucaucgaauuucagcagaaaaauaaccggcuccuggagaucacccgcgaguucuccgugaaugccggagugacgacacccgucagcaccuauaugcuuacaaacuccgaacugcucucucugauuaacgacaugccuaucaccaaugaucaaaagaaacuuaugagcaacaauguucagauugugagacagcaguccuacagcaucaugugcauuaucaaggaggaagugcuggcuuaugucgugcaacucccccuguacggcguuaucgacaccccuuguuggaaacugcauacaucuccccucugcacgaccaacacaaaggagggcuccaauauuugucugacccggacagaucgcgggugguacugcgacaacgccggaagcgugagcuuuuucccucaggcggaaaccuguaagguccagucuaauagaguguuuugcgauacgaugaacuccagaacacugccgucugagguuaaucucugcaacaucgacauuuucaaucccaaauaugauuguaagaucaugaccagcaaaaccgacguguccagcucugucauuacaucccugggcgccaucgugagcugcuacgggaagaccaaauguacagcuucuaacaagaaucggggaaucauuaagacguuuuccaacggcugcgauuaugucagcaauaaagggguggacaccguuuccgugggaaacacacuuuacugugucaacaagcaagagggcaaaucucuguaugugaagggcgaaccuaucauuaauuucuacgacccccucguuuuuccuagcgaugaguucgacgccuccaucucucaggugaacgaaaagauuaaucagagccuggcuuuuauccgcaaguccgaugagcugcuccacaacgucaauguggggaaaagcaccacaaacauuaugaucaccacgaucauuaucgugauuaucguuauucugcuucugcucaucgccgucggacuguuccuguauugcaaagccagaucuacccccgugacacuuuccaaggaccagcucagcggcaucaauaacauugcuuucucuaauugaggacuagucccuguucccagagcccacuuuuuuuucuuuuuuugaaauaaaauagccugucuuucagaucuaaaaaaaaaaaaaaaaaaaaaaaaaaaaaaaaaaaaaaaaaaaaaaaaaaaaaaaaaaaaaaaaugcaucccccccccccccccccccccccccccccccaaaggcucuuuucagagccaccagaauu

SEQ ID NO: 16289 - RNA, 1906 nt, Artificial Sequence
  mRNA product Design d-1 comprising derived and/or modified sequence from HRSV(Memphis-37)__AIY60640.1__F_DSCav1_mut4 (opt6)
gggagacccgugacccggaaguuguacggcuacgcgacuuucccucccacaaacccucgcgcccuuccuuuccuacuugggcccggcagaaagcuuaccauggaacucccaauccuaaaaacaaacgcaauaacaacaauauuagcagccguaacacucuguuucgccucaucccaaaacauaacagaagaauuuuaucaaucuacauguuccgccgucaguaaaggauaucuaucagccuuaagaacaggcugguacacaucaguaaucaccauagaauuauccaacauaaaagaaaacaaaugcaauggcacagaugccaaaguaaaacuaaucaaacaagaacuugauaaauauaaaaacgcaguaacagaauuacaauuauuaaugcaaagcacaccagccgcaggaucaggaucagcaauauguucaggaauagcagucuguaaaguacuacacuuagaaggagaaguaaacaaaauuaaaaacgcauuacuaagcaccaauaaagcaguaguaucacuaucaaacggcguauccguauuaacguucaaaguccucgaccugaaaaacuacauagauaaacaacuacuaccaauacuaaauaaacaaucaugcucaauaucaaacauagaaacuguuaucgaauuucaacagaaaaauaaccgacuacuagaaaucaccagagaauuuucaguaaacgcaggcgucacuacaccaguauccacauacaugcuaaccaacucggaauuacuuucccucauaaacgacaugccaauaacaaacgaccaaaagaaacuuaugucaaacaacguucaaauaguccgccaacaaucauacucaauaauguguaucauaaaagaagaaguccuagcauaugucguacaacuaccauuauacggaguaauugacacaccuugcuggaaacuacacacauccccacuauguacaacaaacacuaaagaaggaucaaacaucugccuaaccagaacagacagaggcugguauugcgacaacgcaggaucaguaucauucuucccacaagcagaaacaugcaaaguacaaucaaacagagucuucugcgacaccaugaacagcagaacccucccauccgaaguaaacuuaugcaacaucgauaucuucaacccaaaauacgacuguaaaauaaugacaucaaaaacagacguuucauccucaguaauaacaucauuaggugccauaguuucauguuacggaaaaaccaaauguaccgcaucaaacaaaaacagaggcauuauuaaaacauucucuaacggaugcgacuaugucaguaacaaaggaguagacacaguaucagucggaaacacauuauauugcguaaauaaacaagaaggaaaaagucuauacguaaaaggagaaccaauaauaaacuuuuacgacccucucguauucccaucagacgaauuugaugcauccauaucacaagucaacgaaaagauaaaccaaucccuagcauucauaagaaaaucagacgaacuacuccauaacguaaacguaggaaaaagcacaaccaauauaaugauaaccacaauaaucauaguaauaauagucauauuauuacuuuuaauugcaguaggacucuuucuauacugcaaagcaagaagcacaccaguaacacuaagcaaagaccaacuaucaggcaucaacaauaucgccuuuucaaauuaaggacuagucccuguucccagagcccacuuuuuuuucuuuuuuugaaauaaaauagccugucuuucagaucuaaaaaaaaaaaaaaaaaaaaaaaaaaaaaaaaaaaaaaaaaaaaaaaaaaaaaaaaaaaaaaaaugcaucccccccccccccccccccccccccccccccaaaggcucuuuucagagccaccagaauu

SEQ ID NO: 16290 - RNA, 1906 nt, Artificial Sequence
  mRNA product Design d-1 comprising derived and/or modified sequence from HRSV(Memphis-37)__AIY60640.1__F_DSCav1_mut4 (opt11)
gggagacccgugacccggaaguuguacggcuacgcgacuuucccucccacaaacccucgcgcccuuccuuuccuacuugggcccggcagaaagcuuaccauggagcugcccauccucaagaccaacgccaucaccacgauccuggccgcggugacccugugcuucgcgagcucccagaacaucaccgaggaguucuaccagagcacgugcuccgccgucagcaagggcuaccucuccgcccugcgcaccgggugguacaccagcgugaucaccaucgagcuguccaacaucaaggagaacaagugcaacggcaccgacgccaaggugaaacucaucaagcaggagcuggacaaguacaagaacgccgucaccgagcugcagcuccugaugcagagcaccccggccgccggguccggcagcgcuaucugcuccgggaucgcggugugcaaggugcugcaccucgagggcgaggucaacaagaucaagaaugcccugcugagcaccaacaaggccguggugucccucagcaacggagucagcgugcuuaccuucaaggugcuggaccucaagaacuacaucgacaagcagcugcugccuauccucaacaagcagagcugcuccaucagcaacaucgagacggucaucgaguuccagcagaagaacaaccggcugcuggagaucacccgcgaguucuccgugaacgccggggugaccacccccgucagcacguacaugcucaccaacagcgaacugcugucccucaucaacgacaugcccaucaccaacgaccagaagaagcugaugagcaacaacgugcagaucgugcggcagcaguccuacagcaucaugugcaucaucaaggaggaaguccuggccuacguggugcagcucccucuguacggcgucaucgacacccccugcuggaagcugcacacgagcccccucugcaccaccaacaccaaggagggguccaacaucugccugacgcgcaccgaccggggcugguacugcgacaacgcgggguccgugagcuucuucccccaggccgagaccugcaaggugcagagcaaccgcgucuucugcgacacuaugaacagcagaacgcucccguccgaggugaaccugugcaacauagacauauucaaccccaaguacgacugcaagaucaugaccagcaagaccgacgucuccagcuccgugauuaccagccugggcgcaaucguguccugcuacggcaagacgaagugcaccgccagcaacaagaaccgggggaucaucaagaccuucuccaacggcugcgacuaugucagcaacaaggggguggacaccgugagcgucggaaacacgcucuacugcgugaacaagcaagagggcaaguccuuauacgugaagggggagcccaucaucaacuucuacgacccccuggucuucccgagcgacgaguucgacgccagcauaagccaggugaacgagaagaucaaccagucccucgcguucauccgcaagagcgacgagcugcugcacaacgugaacgucggcaaguccaccaccaacaucaugaucaccaccaucaucaucgugaucaucgugauccuccugcugcucaucgccgucgggcuguuccuguacugcaaggcccggagcacgcccgugaccuuguccaaggaccagcucagcggcaucaacaacaucgccuucuccaacugaggacuagucccuguucccagagcccacuuuuuuuucuuuuuuugaaauaaaauagccugucuuucagaucuaaaaaaaaaaaaaaaaaaaaaaaaaaaaaaaaaaaaaaaaaaaaaaaaaaaaaaaaaaaaaaaaugcaucccccccccccccccccccccccccccccccaaaggcucuuuucagagccaccagaauu

SEQ ID NO: 16291 - RNA, 1961 nt, Artificial Sequence
  mRNA product Design d-2 comprising derived and/or modified sequence from HRSV(Memphis-37)__AIY60640.1__F_DSCav1_mut4 (opt1)
gggagagcggcucggccauuuugucccagucaguccggaggcugcggcugcagaaguaccgccugcggaguaacugcaaagaagcuuaccauggagcugcccauccucaagaccaacgccaucaccacgauccuggccgcggugacccugugcuucgccagcucccagaacaucaccgaggaguucuaccagagcacgugcuccgccgucagcaagggcuaccucuccgcccugcgcaccgggugguacaccagcgugaucaccaucgagcuguccaacaucaaggagaacaagugcaacggcaccgacgccaaggugaagcucaucaagcaggagcuggacaaguacaagaacgcggucacggagcugcagcuccugaugcagagcaccccggccgccggcuccgggagcgcgaucugcuccggcaucgccgucugcaaggugcugcaccucgagggcgaggugaacaagaucaagaacgcccugcuguccaccaacaaggccgucgugagccucuccaacggggugagcguccugaccuucaaggugcuggaccucaagaacuacaucgacaagcagcugcugcccauccugaacaagcagagcugcuccaucagcaacaucgagaccgucaucgaguuccagcagaagaacaaccgccuccuggagaucacgcgggaguucagcgugaacgcgggcgugaccacccccgucuccaccuacaugcugacgaacagcgagcuccugucccugaucaacgacaugccgaucaccaacgaccagaagaagcucaugagcaacaacgugcagaucgugcgccagcaguccuacagcaucaugugcaucaucaaggaggagguccuggccuacguggugcagcugccccucuacggggucaucgacacccccugcuggaagcugcacaccagcccccugugcacgaccaacaccaaggagggcuccaacaucugccucacccggacggaccgcgggugguacugcgacaacgccggcagcguguccuucuucccgcaggccgagaccugcaagguccagagcaaccggguguucugcgacaccaugaacucccggacccugcccagcgaggugaaccucugcaacaucgacaucuucaaccccaaguacgacugcaagaucaugacguccaagaccgacgucagcuccagcgugaucaccucccugggcgccaucgugagcugcuacgggaagaccaagugcacggcgagcaacaagaaccgcggcaucaucaagaccuucuccaacgggugcgacuacgucagcaacaagggcguggacaccguguccgucggcaacacccuguacugcgugaacaagcaggagggcaagagccucuacgugaagggggagcccaucaucaacuucuacgacccgcuggucuuccccuccgacgaguucgacgccagcaucucccaggugaacgagaagaucaaccagagccuggccuucauccggaaguccgacgagcuccugcacaacgugaacgucggcaagagcaccacgaacaucaugaucaccaccaucaucaucgugaucaucgugauccugcugcuccugaucgccgucgggcuguuccucuacugcaaggcccgcuccacccccgugacgcugagcaaggaccagcuguccgggaucaacaacaucgcguucagcaacugaggacuaguaauaaggaaacuguaugaaugucugugggcaggaagugaagagauccuucuguaaagguuuuuggaauuaugucugcugaauaauaaacuuuuuugaaauaauaaaucugguagaaaaaugagaucuaaaaaaaaaaaaaaaaaaaaaaaaaaaaaaaaaaaaaaaaaaaaaaaaaaaaaaaaaaaaaaaaugcaucccccccccccccccccccccccccccccccaaaggcucuuuucagagccaccagaauu

SEQ ID NO: 16292 - RNA, 1961 nt, Artificial Sequence
  mRNA product Design d-2 comprising derived and/or modified sequence from HRSV(Memphis-37)__AIY60640.1__F_DSCav1_mut4 (opt1)
gggagagcggcucggccauuuugucccagucaguccggaggcugcggcugcagaaguaccgccugcggaguaacugcaaagaagcuuaccauggagcugcccauccucaagaccaacgccaucaccacgauccuggccgcggugacccugugcuucgccagcucccagaacaucaccgaggaguucuaccagagcacgugcuccgccgucagcaagggcuaccucuccgcccugcgcaccgggugguacaccagcgugaucaccaucgagcuguccaacaucaaggagaacaagugcaacggcaccgacgccaaggugaagcucaucaagcaggagcuggacaaguacaagaacgcggucacggagcugcagcuccugaugcagagcaccccggccgccggguccggcagcgccaucugcuccgggaucgcggugugcaaggugcugcaccucgagggcgaggucaacaagaucaagaacgcccugcugagcaccaacaaggccguggugucccucagcaacggcgucuccgugcugaccuucaaggugcuggaccucaagaacuacaucgacaagcagcugcugcccauccucaacaagcagagcugcuccaucagcaacaucgagacggucaucgaguuccagcagaagaacaaccggcugcuggagaucacccgcgaguucuccgugaacgccggggugaccacccccgucagcacguacaugcucaccaacagcgagcugcugucccucaucaacgacaugcccaucaccaacgaccagaagaagcugaugagcaacaacgugcagaucgugcggcagcaguccuacagcaucaugugcaucaucaaggaggagguccuggccuacguggugcagcucccgcuguacggcgucaucgacacccccugcuggaagcugcacacgagcccccucugcaccaccaacaccaaggagggguccaacaucugccugacgcgcaccgaccggggcugguacugcgacaacgcgggguccgugagcuucuucccccaggccgagaccugcaaggugcaguccaaccgcgucuucugcgacaccaugaacagccggacgcucccguccgaggugaaccugugcaacaucgacaucuucaaccccaaguacgacugcaagaucaugaccagcaagaccgacgucuccagcuccgugaucaccagccugggcgccaucguguccugcuacggcaagacgaagugcaccgccagcaacaagaaccgggggaucaucaagaccuucuccaacggcugcgacuacgucagcaacaaggggguggacaccgugagcgucggcaacacgcucuacugcgugaacaagcaggagggcaagucccuguacgugaagggggagcccaucaucaacuucuacgacccccuggucuucccgagcgacgaguucgacgccuccaucagccaggugaacgagaagaucaaccagucccucgcguucauccgcaagagcgacgagcugcugcacaacgugaacgucggcaaguccaccaccaacaucaugaucaccaccaucaucaucgugaucaucgugauccuccugcugcucaucgccgucgggcuguuccuguacugcaaggcccggagcacgcccgugacccuguccaaggaccagcucagcggcaucaacaacaucgccuucuccaacugaggacuaguaauaaggaaacuguaugaaugucugugggcaggaagugaagagauccuucuguaaagguuuuuggaauuaugucugcugaauaauaaacuuuuuugaaauaauaaaucugguagaaaaaugagaucuaaaaaaaaaaaaaaaaaaaaaaaaaaaaaaaaaaaaaaaaaaaaaaaaaaaaaaaaaaaaaaaaugcaucccccccccccccccccccccccccccccccaaaggcucuuuucagagccaccagaauu

SEQ ID NO: 16293 - RNA, 1961 nt, Artificial Sequence
  mRNA product Design d-2 comprising derived and/or modified sequence from HRSV(Memphis-37)__AIY60640.1__F_DSCav1_mut4 (opt2)
gggagagcggcucggccauuuugucccagucaguccggaggcugcggcugcagaaguaccgccugcggaguaacugcaaagaagcuuaccauggagcuccccauccucaagaccaacgccaucaccaccauccucgccgccgucacccucugcuucgccuccucccagaacaucaccgaggaguucuaccaguccaccugcuccgccgucuccaagggcuaccucuccgcccuccgcaccggcugguacaccuccgucaucaccaucgagcucuccaacaucaaggagaacaagugcaacggcaccgacgccaaggucaagcucaucaagcaggagcucgacaaguacaagaacgccgucaccgagcuccagcuccucaugcaguccacccccgccgccggcuccggcuccgccaucugcuccggcaucgccgucugcaagguccuccaccucgagggcgaggucaacaagaucaagaacgcccuccucuccaccaacaaggccgucgucucccucuccaacggcgucuccguccucaccuucaagguccucgaccucaagaacuacaucgacaagcagcuccuccccauccucaacaagcaguccugcuccaucuccaacaucgagaccgucaucgaguuccagcagaagaacaaccgccuccucgagaucacccgcgaguucuccgucaacgccggcgucaccacccccgucuccaccuacaugcucaccaacuccgagcuccucucccucaucaacgacaugcccaucaccaacgaccagaagaagcucauguccaacaacguccagaucguccgccagcaguccuacuccaucaugugcaucaucaaggaggagguccucgccuacgucguccagcucccccucuacggcgucaucgacacccccugcuggaagcuccacaccuccccccucugcaccaccaacaccaaggagggcuccaacaucugccucacccgcaccgaccgcggcugguacugcgacaacgccggcuccgucuccuucuucccccaggccgagaccugcaagguccaguccaaccgcgucuucugcgacaccaugaacucccgcacccuccccuccgaggucaaccucugcaacaucgacaucuucaaccccaaguacgacugcaagaucaugaccuccaagaccgacgucuccuccuccgucaucaccucccucggcgccaucgucuccugcuacggcaagaccaagugcaccgccuccaacaagaaccgcggcaucaucaagaccuucuccaacggcugcgacuacgucuccaacaagggcgucgacaccgucuccgucggcaacacccucuacugcgucaacaagcaggagggcaagucccucuacgucaagggcgagcccaucaucaacuucuacgacccccucgucuuccccuccgacgaguucgacgccuccaucucccaggucaacgagaagaucaaccagucccucgccuucauccgcaaguccgacgagcuccuccacaacgucaacgucggcaaguccaccaccaacaucaugaucaccaccaucaucaucgucaucaucgucauccuccuccuccucaucgccgucggccucuuccucuacugcaaggcccgcuccacccccgucacccucuccaaggaccagcucuccggcaucaacaacaucgccuucuccaacugaggacuaguaauaaggaaacuguaugaaugucugugggcaggaagugaagagauccuucuguaaagguuuuuggaauuaugucugcugaauaauaaacuuuuuugaaauaauaaaucugguagaaaaaugagaucuaaaaaaaaaaaaaaaaaaaaaaaaaaaaaaaaaaaaaaaaaaaaaaaaaaaaaaaaaaaaaaaaugcaucccccccccccccccccccccccccccccccaaaggcucuuuucagagccaccagaauu

SEQ ID NO: 16294 - RNA, 1961 nt, Artificial Sequence
  mRNA product Design d-2 comprising derived and/or modified sequence from HRSV(Memphis-37)__AIY60640.1__F_DSCav1_mut4 (opt3)
gggagagcggcucggccauuuugucccagucaguccggaggcugcggcugcagaaguaccgccugcggaguaacugcaaagaagcuuaccauggagcugcccauccucaagaccaacgccauuacaacuauacuugcugcagugacgcugugcuucgccagcucccagaauaucaccgaagaguuuuaccaaucuacauguucagcggucaguaaaggcuauuugagcgcuuuaagaacugggugguacaccuccguuauuacaaucgaacugucuaacauuaaggagaauaaaugcaacggaaccgacgccaaggugaaacuaaucaagcaggaacucgauaaguauaaaaaugcaguaacugagcugcagcuucugaugcagucgaccccugccgcugguucaggcagcgcaauauguagugggaucgccgugugcaaggucuugcaccucgagggagaagugaacaaaauuaagaaugcucugcuguccacaaacaaagccguugugucucucagcaauggcgucuccguguuaacguucaagguacuggaccuuaagaacuacaucgauaaacaauugcugccaauucuaaauaagcagucauguaguaucagcaacauagagacuguuauugaauuucagcagaaaaauaacaggcuccuggagaucacccgggaguucucugugaaugcgggugucacaacuccgguguccaccuauaugcuuacaaacucagaacuguugagccucauuaacgacaugcccaucaccaaugaucaaaagaaacugaugaguaacaaugugcagaucguccgccagcagucuuacuccauuaugugcauaaucaaggaggaaguuuuagcauaugugguacaacugccucucuacggggugauugacacgccauguuggaaacuucauacuagcccccugugcacaaccaacacuaaggagggaucgaauaucuguuugacacgaaccgaucguggcugguacugcgacaacgccggcucugucuccuuuuucccucaggcugaaacguguaaggugcagucaaauagaguguuuugcgauaccaugaacaguagaacacugccaagcgaggugaaucucugcaacauagacauuuucaaucccaaauaugauuguaagaucaugacuuccaaaaccgacgucucuagcucagugaucacaagucugggggccauuguauccugcuacggaaagacuaaauguaccgcaagcaacaagaauagggguaucauuaagacauuuucuaacggcugcgauuauguuucaaauaaagggguggacaccgucagugugggaaacacucuuuacugugucaacaagcaagagggcaaaagccuguaugugaagggugaaccuauaaucaauuucuacgacccauugguuuuuccguccgaugaguucgacgcuucuauuucgcagguuaacgagaaaaucaaucagagccucgccuuuauccggaaguccgaugaacuguuacacaacguaaaugucgggaagucaacgacaaacauuaugauaaccacuaucauuaucgugauuaucguuauacugcuacuccugaucgcggugggacuuuucuuguauugcaaagcccgcaguacccccgucacacugucuaaggaccagcucagcggcauuaauaacaucgcauucuccaauugaggacuaguaauaaggaaacuguaugaaugucugugggcaggaagugaagagauccuucuguaaagguuuuuggaauuaugucugcugaauaauaaacuuuuuugaaauaauaaaucugguagaaaaaugagaucuaaaaaaaaaaaaaaaaaaaaaaaaaaaaaaaaaaaaaaaaaaaaaaaaaaaaaaaaaaaaaaaaugcaucccccccccccccccccccccccccccccccaaaggcucuuuucagagccaccagaauu

SEQ ID NO: 16295 - RNA, 1961 nt, Artificial Sequence
  mRNA product Design d-2 comprising derived and/or modified sequence from HRSV(Memphis-37)__AIY60640.1__F_DSCav1_mut4 (opt4)
gggagagcggcucggccauuuugucccagucaguccggaggcugcggcugcagaaguaccgccugcggaguaacugcaaagaagcuuaccauggagcugcccauccugaagaccaacgccaucaccaccauccuggccgccgugacccugugcuucgccagcagccagaacaucaccgaggaguucuaccagagcaccugcagcgccgugagcaagggcuaccugagcgcccugagaaccggcugguacaccagcgugaucaccaucgagcugagcaacaucaaggagaacaagugcaacggcaccgacgccaaggugaagcugaucaagcaggagcuggacaaguacaagaacgccgugaccgagcugcagcugcugaugcagagcacccccgccgccggcagcggcagcgccaucugcagcggcaucgccgugugcaaggugcugcaccuggagggcgaggugaacaagaucaagaacgcccugcugagcaccaacaaggccguggugagccugagcaacggcgugagcgugcugaccuucaaggugcuggaccugaagaacuacaucgacaagcagcugcugcccauccugaacaagcagagcugcagcaucagcaacaucgagaccgugaucgaguuccagcagaagaacaacagacugcuggagaucaccagagaguucagcgugaacgccggcgugaccacccccgugagcaccuacaugcugaccaacagcgagcugcugagccugaucaacgacaugcccaucaccaacgaccagaagaagcugaugagcaacaacgugcagaucgugagacagcagagcuacagcaucaugugcaucaucaaggaggaggugcuggccuacguggugcagcugccccuguacggcgugaucgacacccccugcuggaagcugcacaccagcccccugugcaccaccaacaccaaggagggcagcaacaucugccugaccagaaccgacagaggcugguacugcgacaacgccggcagcgugagcuucuucccccaggccgagaccugcaaggugcagagcaacagaguguucugcgacaccaugaacagcagaacccugcccagcgaggugaaccugugcaacaucgacaucuucaaccccaaguacgacugcaagaucaugaccagcaagaccgacgugagcagcagcgugaucaccagccugggcgccaucgugagcugcuacggcaagaccaagugcaccgccagcaacaagaacagaggcaucaucaagaccuucagcaacggcugcgacuacgugagcaacaagggcguggacaccgugagcgugggcaacacccuguacugcgugaacaagcaggagggcaagagccuguacgugaagggcgagcccaucaucaacuucuacgacccccugguguuccccagcgacgaguucgacgccagcaucagccaggugaacgagaagaucaaccagagccuggccuucaucagaaagagcgacgagcugcugcacaacgugaacgugggcaagagcaccaccaacaucaugaucaccaccaucaucaucgugaucaucgugauccugcugcugcugaucgccgugggccuguuccuguacugcaaggccagaagcacccccgugacccugagcaaggaccagcugagcggcaucaacaacaucgccuucagcaacugaggacuaguaauaaggaaacuguaugaaugucugugggcaggaagugaagagauccuucuguaaagguuuuuggaauuaugucugcugaauaauaaacuuuuuugaaauaauaaaucugguagaaaaaugagaucuaaaaaaaaaaaaaaaaaaaaaaaaaaaaaaaaaaaaaaaaaaaaaaaaaaaaaaaaaaaaaaaaugcaucccccccccccccccccccccccccccccccaaaggcucuuuucagagccaccagaauu

SEQ ID NO: 16296 - RNA, 1961 nt, Artificial Sequence
  mRNA product Design d-2 comprising derived and/or modified sequence from HRSV(Memphis-37)__AIY60640.1__F_DSCav1_mut4 (opt5)
gggagagcggcucggccauuuugucccagucaguccggaggcugcggcugcagaaguaccgccugcggaguaacugcaaagaagcuuaccauggagcugcccauccucaagaccaacgccauuacaacgauccuggcugccgugacccuuugcuucgcgagcucccagaauauuacagaagaguuuuaccaaucuaccuguagcgcugucuccaaaggcuaucugucugcccucagaacagggugguacaccagcguuaucacaauugaacuguccaacaucaaggagaauaaaugcaacggaaccgacgccaaggugaaacuuaucaagcaggaacuggauaaguauaaaaaugcugugacggagcuccagcugcugaugcagucuaccccugccgcuggcagcggguccgccauuuguagcggaaucgcggucugcaaggugcuccaccuggagggcgaaguuaacaaaauuaagaaugcccuucugucuacaaacaaagcuguggucucccucagcaauggggugucuguucugaccuucaaggugcuugaccugaagaacuacaucgauaaacaacuccugccgauucugaauaagcaguccuguagcaucucuaacauugagacagucaucgaauuucagcagaaaaauaaccggcuccuggagaucacccgcgaguucuccgugaaugccggagugacgacacccgucagcaccuauaugcuuacaaacuccgaacugcucucucugauuaacgacaugccuaucaccaaugaucaaaagaaacuuaugagcaacaauguucagauugugagacagcaguccuacagcaucaugugcauuaucaaggaggaagugcuggcuuaugucgugcaacucccccuguacggcguuaucgacaccccuuguuggaaacugcauacaucuccccucugcacgaccaacacaaaggagggcuccaauauuugucugacccggacagaucgcgggugguacugcgacaacgccggaagcgugagcuuuuucccucaggcggaaaccuguaagguccagucuaauagaguguuuugcgauacgaugaacuccagaacacugccgucugagguuaaucucugcaacaucgacauuuucaaucccaaauaugauuguaagaucaugaccagcaaaaccgacguguccagcucugucauuacaucccugggcgccaucgugagcugcuacgggaagaccaaauguacagcuucuaacaagaaucggggaaucauuaagacguuuuccaacggcugcgauuaugucagcaauaaagggguggacaccguuuccgugggaaacacacuuuacugugucaacaagcaagagggcaaaucucuguaugugaagggcgaaccuaucauuaauuucuacgacccccucguuuuuccuagcgaugaguucgacgccuccaucucucaggugaacgaaaagauuaaucagagccuggcuuuuauccgcaaguccgaugagcugcuccacaacgucaauguggggaaaagcaccacaaacauuaugaucaccacgaucauuaucgugauuaucguuauucugcuucugcucaucgccgucggacuguuccuguauugcaaagccagaucuacccccgugacacuuuccaaggaccagcucagcggcaucaauaacauugcuuucucuaauugaggacuaguaauaaggaaacuguaugaaugucugugggcaggaagugaagagauccuucuguaaagguuuuuggaauuaugucugcugaauaauaaacuuuuuugaaauaauaaaucugguagaaaaaugagaucuaaaaaaaaaaaaaaaaaaaaaaaaaaaaaaaaaaaaaaaaaaaaaaaaaaaaaaaaaaaaaaaaugcaucccccccccccccccccccccccccccccccaaaggcucuuuucagagccaccagaauu

SEQ ID NO: 16297 - RNA, 1961 nt, Artificial Sequence
  mRNA product Design d-2 comprising derived and/or modified sequence from HRSV(Memphis-37)__AIY60640.1__F_DSCav1_mut4 (opt6)
gggagagcggcucggccauuuugucccagucaguccggaggcugcggcugcagaaguaccgccugcggaguaacugcaaagaagcuuaccauggaacucccaauccuaaaaacaaacgcaauaacaacaauauuagcagccguaacacucuguuucgccucaucccaaaacauaacagaagaauuuuaucaaucuacauguuccgccgucaguaaaggauaucuaucagccuuaagaacaggcugguacacaucaguaaucaccauagaauuauccaacauaaaagaaaacaaaugcaauggcacagaugccaaaguaaaacuaaucaaacaagaacuugauaaauauaaaaacgcaguaacagaauuacaauuauuaaugcaaagcacaccagccgcaggaucaggaucagcaauauguucaggaauagcagucuguaaaguacuacacuuagaaggagaaguaaacaaaauuaaaaacgcauuacuaagcaccaauaaagcaguaguaucacuaucaaacggcguauccguauuaacguucaaaguccucgaccugaaaaacuacauagauaaacaacuacuaccaauacuaaauaaacaaucaugcucaauaucaaacauagaaacuguuaucgaauuucaacagaaaaauaaccgacuacuagaaaucaccagagaauuuucaguaaacgcaggcgucacuacaccaguauccacauacaugcuaaccaacucggaauuacuuucccucauaaacgacaugccaauaacaaacgaccaaaagaaacuuaugucaaacaacguucaaauaguccgccaacaaucauacucaauaauguguaucauaaaagaagaaguccuagcauaugucguacaacuaccauuauacggaguaauugacacaccuugcuggaaacuacacacauccccacuauguacaacaaacacuaaagaaggaucaaacaucugccuaaccagaacagacagaggcugguauugcgacaacgcaggaucaguaucauucuucccacaagcagaaacaugcaaaguacaaucaaacagagucuucugcgacaccaugaacagcagaacccucccauccgaaguaaacuuaugcaacaucgauaucuucaacccaaaauacgacuguaaaauaaugacaucaaaaacagacguuucauccucaguaauaacaucauuaggugccauaguuucauguuacggaaaaaccaaauguaccgcaucaaacaaaaacagaggcauuauuaaaacauucucuaacggaugcgacuaugucaguaacaaaggaguagacacaguaucagucggaaacacauuauauugcguaaauaaacaagaaggaaaaagucuauacguaaaaggagaaccaauaauaaacuuuuacgacccucucguauucccaucagacgaauuugaugcauccauaucacaagucaacgaaaagauaaaccaaucccuagcauucauaagaaaaucagacgaacuacuccauaacguaaacguaggaaaaagcacaaccaauauaaugauaaccacaauaaucauaguaauaauagucauauuauuacuuuuaauugcaguaggacucuuucuauacugcaaagcaagaagcacaccaguaacacuaagcaaagaccaacuaucaggcaucaacaauaucgccuuuucaaauuaaggacuaguaauaaggaaacuguaugaaugucugugggcaggaagugaagagauccuucuguaaagguuuuuggaauuaugucugcugaauaauaaacuuuuuugaaauaauaaaucugguagaaaaaugagaucuaaaaaaaaaaaaaaaaaaaaaaaaaaaaaaaaaaaaaaaaaaaaaaaaaaaaaaaaaaaaaaaaugcaucccccccccccccccccccccccccccccccaaaggcucuuuucagagccaccagaauu

SEQ ID NO: 16298 - RNA, 1961 nt, Artificial Sequence
  mRNA product Design d-2 comprising derived and/or modified sequence from HRSV(Memphis-37)__AIY60640.1__F_DSCav1_mut4 (opt11)
gggagagcggcucggccauuuugucccagucaguccggaggcugcggcugcagaaguaccgccugcggaguaacugcaaagaagcuuaccauggagcugcccauccucaagaccaacgccaucaccacgauccuggccgcggugacccugugcuucgcgagcucccagaacaucaccgaggaguucuaccagagcacgugcuccgccgucagcaagggcuaccucuccgcccugcgcaccgggugguacaccagcgugaucaccaucgagcuguccaacaucaaggagaacaagugcaacggcaccgacgccaaggugaaacucaucaagcaggagcuggacaaguacaagaacgccgucaccgagcugcagcuccugaugcagagcaccccggccgccggguccggcagcgcuaucugcuccgggaucgcggugugcaaggugcugcaccucgagggcgaggucaacaagaucaagaaugcccugcugagcaccaacaaggccguggugucccucagcaacggagucagcgugcuuaccuucaaggugcuggaccucaagaacuacaucgacaagcagcugcugccuauccucaacaagcagagcugcuccaucagcaacaucgagacggucaucgaguuccagcagaagaacaaccggcugcuggagaucacccgcgaguucuccgugaacgccggggugaccacccccgucagcacguacaugcucaccaacagcgaacugcugucccucaucaacgacaugcccaucaccaacgaccagaagaagcugaugagcaacaacgugcagaucgugcggcagcaguccuacagcaucaugugcaucaucaaggaggaaguccuggccuacguggugcagcucccucuguacggcgucaucgacacccccugcuggaagcugcacacgagcccccucugcaccaccaacaccaaggagggguccaacaucugccugacgcgcaccgaccggggcugguacugcgacaacgcgggguccgugagcuucuucccccaggccgagaccugcaaggugcagagcaaccgcgucuucugcgacacuaugaacagcagaacgcucccguccgaggugaaccugugcaacauagacauauucaaccccaaguacgacugcaagaucaugaccagcaagaccgacgucuccagcuccgugauuaccagccugggcgcaaucguguccugcuacggcaagacgaagugcaccgccagcaacaagaaccgggggaucaucaagaccuucuccaacggcugcgacuaugucagcaacaaggggguggacaccgugagcgucggaaacacgcucuacugcgugaacaagcaagagggcaaguccuuauacgugaagggggagcccaucaucaacuucuacgacccccuggucuucccgagcgacgaguucgacgccagcauaagccaggugaacgagaagaucaaccagucccucgcguucauccgcaagagcgacgagcugcugcacaacgugaacgucggcaaguccaccaccaacaucaugaucaccaccaucaucaucgugaucaucgugauccuccugcugcucaucgccgucgggcuguuccuguacugcaaggcccggagcacgcccgugaccuuguccaaggaccagcucagcggcaucaacaacaucgccuucuccaacugaggacuaguaauaaggaaacuguaugaaugucugugggcaggaagugaagagauccuucuguaaagguuuuuggaauuaugucugcugaauaauaaacuuuuuugaaauaauaaaucugguagaaaaaugagaucuaaaaaaaaaaaaaaaaaaaaaaaaaaaaaaaaaaaaaaaaaaaaaaaaaaaaaaaaaaaaaaaaugcaucccccccccccccccccccccccccccccccaaaggcucuuuucagagccaccagaauu

SEQ ID NO: 16299 - RNA, 2277 nt, Artificial Sequence
  mRNA product Design d-3 comprising derived and/or modified sequence from HRSV(Memphis-37)__AIY60640.1__F_DSCav1_mut4 (opt1)
gggagagggcgcuuggcuugcaaggacccugagcugcggcauugaagcacacccaacccaacucgacugaagucagccucacugaaccggaucugagaaucuucucucucugggcuugccagggcucuccgaaccuagcuagcauccucuucaauuccaacuagaaagcuuaccauggagcugcccauccucaagaccaacgccaucaccacgauccuggccgcggugacccugugcuucgccagcucccagaacaucaccgaggaguucuaccagagcacgugcuccgccgucagcaagggcuaccucuccgcccugcgcaccgggugguacaccagcgugaucaccaucgagcuguccaacaucaaggagaacaagugcaacggcaccgacgccaaggugaagcucaucaagcaggagcuggacaaguacaagaacgcggucacggagcugcagcuccugaugcagagcaccccggccgccggcuccgggagcgcgaucugcuccggcaucgccgucugcaaggugcugcaccucgagggcgaggugaacaagaucaagaacgcccugcuguccaccaacaaggccgucgugagccucuccaacggggugagcguccugaccuucaaggugcuggaccucaagaacuacaucgacaagcagcugcugcccauccugaacaagcagagcugcuccaucagcaacaucgagaccgucaucgaguuccagcagaagaacaaccgccuccuggagaucacgcgggaguucagcgugaacgcgggcgugaccacccccgucuccaccuacaugcugacgaacagcgagcuccugucccugaucaacgacaugccgaucaccaacgaccagaagaagcucaugagcaacaacgugcagaucgugcgccagcaguccuacagcaucaugugcaucaucaaggaggagguccuggccuacguggugcagcugccccucuacggggucaucgacacccccugcuggaagcugcacaccagcccccugugcacgaccaacaccaaggagggcuccaacaucugccucacccggacggaccgcgggugguacugcgacaacgccggcagcguguccuucuucccgcaggccgagaccugcaagguccagagcaaccggguguucugcgacaccaugaacucccggacccugcccagcgaggugaaccucugcaacaucgacaucuucaaccccaaguacgacugcaagaucaugacguccaagaccgacgucagcuccagcgugaucaccucccugggcgccaucgugagcugcuacgggaagaccaagugcacggcgagcaacaagaaccgcggcaucaucaagaccuucuccaacgggugcgacuacgucagcaacaagggcguggacaccguguccgucggcaacacccuguacugcgugaacaagcaggagggcaagagccucuacgugaagggggagcccaucaucaacuucuacgacccgcuggucuuccccuccgacgaguucgacgccagcaucucccaggugaacgagaagaucaaccagagccuggccuucauccggaaguccgacgagcuccugcacaacgugaacgucggcaagagcaccacgaacaucaugaucaccaccaucaucaucgugaucaucgugauccugcugcuccugaucgccgucgggcuguuccucuacugcaaggcccgcuccacccccgugacgcugagcaaggaccagcuguccgggaucaacaacaucgcguucagcaacugaggacuagugaagggaacacccaaauuuaauucagccuuaagcacaauuaauuaagagugaaacguaauuguacaagcaguuggucacccaccauagggcaugaucaacaccgcaaccuuuccuuuuucccccagugauucugaaaaaccccucuucccuucagcuugcuuagauguuccaaauuuaguaagcuuaaggcggccuacagaagaaaaagaaaaaaaaggccacaaaaguucccucucacuuucaguaaauaaaauaaaagcagcaacagaaauaaagaaauaaaugaaauucaaaaugaaauaaauauuguguugugcagcauuaaaaaaucaauaaaaauuaaaaaugagcaagaucuaaaaaaaaaaaaaaaaaaaaaaaaaaaaaaaaaaaaaaaaaaaaaaaaaaaaaaaaaaaaaaaaugcaucccccccccccccccccccccccccccccccaaaggcucuuuucagagccaccagaauu

SEQ ID NO: 16300 - RNA, 2277 nt, Artificial Sequence
  mRNA product Design d-3 comprising derived and/or modified sequence from HRSV(Memphis-37)__AIY60640.1__F_DSCav1_mut4 (opt1)
gggagagggcgcuuggcuugcaaggacccugagcugcggcauugaagcacacccaacccaacucgacugaagucagccucacugaaccggaucugagaaucuucucucucugggcuugccagggcucuccgaaccuagcuagcauccucuucaauuccaacuagaaagcuuaccauggagcugcccauccucaagaccaacgccaucaccacgauccuggccgcggugacccugugcuucgccagcucccagaacaucaccgaggaguucuaccagagcacgugcuccgccgucagcaagggcuaccucuccgcccugcgcaccgggugguacaccagcgugaucaccaucgagcuguccaacaucaaggagaacaagugcaacggcaccgacgccaaggugaagcucaucaagcaggagcuggacaaguacaagaacgcggucacggagcugcagcuccugaugcagagcaccccggccgccggguccggcagcgccaucugcuccgggaucgcggugugcaaggugcugcaccucgagggcgaggucaacaagaucaagaacgcccugcugagcaccaacaaggccguggugucccucagcaacggcgucuccgugcugaccuucaaggugcuggaccucaagaacuacaucgacaagcagcugcugcccauccucaacaagcagagcugcuccaucagcaacaucgagacggucaucgaguuccagcagaagaacaaccggcugcuggagaucacccgcgaguucuccgugaacgccggggugaccacccccgucagcacguacaugcucaccaacagcgagcugcugucccucaucaacgacaugcccaucaccaacgaccagaagaagcugaugagcaacaacgugcagaucgugcggcagcaguccuacagcaucaugugcaucaucaaggaggagguccuggccuacguggugcagcucccgcuguacggcgucaucgacacccccugcuggaagcugcacacgagcccccucugcaccaccaacaccaaggagggguccaacaucugccugacgcgcaccgaccggggcugguacugcgacaacgcgggguccgugagcuucuucccccaggccgagaccugcaaggugcaguccaaccgcgucuucugcgacaccaugaacagccggacgcucccguccgaggugaaccugugcaacaucgacaucuucaaccccaaguacgacugcaagaucaugaccagcaagaccgacgucuccagcuccgugaucaccagccugggcgccaucguguccugcuacggcaagacgaagugcaccgccagcaacaagaaccgggggaucaucaagaccuucuccaacggcugcgacuacgucagcaacaaggggguggacaccgugagcgucggcaacacgcucuacugcgugaacaagcaggagggcaagucccuguacgugaagggggagcccaucaucaacuucuacgacccccuggucuucccgagcgacgaguucgacgccuccaucagccaggugaacgagaagaucaaccagucccucgcguucauccgcaagagcgacgagcugcugcacaacgugaacgucggcaaguccaccaccaacaucaugaucaccaccaucaucaucgugaucaucgugauccuccugcugcucaucgccgucgggcuguuccuguacugcaaggcccggagcacgcccgugacccuguccaaggaccagcucagcggcaucaacaacaucgccuucuccaacugaggacuagugaagggaacacccaaauuuaauucagccuuaagcacaauuaauuaagagugaaacguaauuguacaagcaguuggucacccaccauagggcaugaucaacaccgcaaccuuuccuuuuucccccagugauucugaaaaaccccucuucccuucagcuugcuuagauguuccaaauuuaguaagcuuaaggcggccuacagaagaaaaagaaaaaaaaggccacaaaaguucccucucacuuucaguaaauaaaauaaaagcagcaacagaaauaaagaaauaaaugaaauucaaaaugaaauaaauauuguguugugcagcauuaaaaaaucaauaaaaauuaaaaaugagcaagaucuaaaaaaaaaaaaaaaaaaaaaaaaaaaaaaaaaaaaaaaaaaaaaaaaaaaaaaaaaaaaaaaaugcaucccccccccccccccccccccccccccccccaaaggcucuuuucagagccaccagaauu

SEQ ID NO: 16301 - RNA, 2277 nt, Artificial Sequence
  mRNA product Design d-3 comprising derived and/or modified sequence from HRSV(Memphis-37)__AIY60640.1__F_DSCav1_mut4 (opt2)
gggagagggcgcuuggcuugcaaggacccugagcugcggcauugaagcacacccaacccaacucgacugaagucagccucacugaaccggaucugagaaucuucucucucugggcuugccagggcucuccgaaccuagcuagcauccucuucaauuccaacuagaaagcuuaccauggagcuccccauccucaagaccaacgccaucaccaccauccucgccgccgucacccucugcuucgccuccucccagaacaucaccgaggaguucuaccaguccaccugcuccgccgucuccaagggcuaccucuccgcccuccgcaccggcugguacaccuccgucaucaccaucgagcucuccaacaucaaggagaacaagugcaacggcaccgacgccaaggucaagcucaucaagcaggagcucgacaaguacaagaacgccgucaccgagcuccagcuccucaugcaguccacccccgccgccggcuccggcuccgccaucugcuccggcaucgccgucugcaagguccuccaccucgagggcgaggucaacaagaucaagaacgcccuccucuccaccaacaaggccgucgucucccucuccaacggcgucuccguccucaccuucaagguccucgaccucaagaacuacaucgacaagcagcuccuccccauccucaacaagcaguccugcuccaucuccaacaucgagaccgucaucgaguuccagcagaagaacaaccgccuccucgagaucacccgcgaguucuccgucaacgccggcgucaccacccccgucuccaccuacaugcucaccaacuccgagcuccucucccucaucaacgacaugcccaucaccaacgaccagaagaagcucauguccaacaacguccagaucguccgccagcaguccuacuccaucaugugcaucaucaaggaggagguccucgccuacgucguccagcucccccucuacggcgucaucgacacccccugcuggaagcuccacaccuccccccucugcaccaccaacaccaaggagggcuccaacaucugccucacccgcaccgaccgcggcugguacugcgacaacgccggcuccgucuccuucuucccccaggccgagaccugcaagguccaguccaaccgcgucuucugcgacaccaugaacucccgcacccuccccuccgaggucaaccucugcaacaucgacaucuucaaccccaaguacgacugcaagaucaugaccuccaagaccgacgucuccuccuccgucaucaccucccucggcgccaucgucuccugcuacggcaagaccaagugcaccgccuccaacaagaaccgcggcaucaucaagaccuucuccaacggcugcgacuacgucuccaacaagggcgucgacaccgucuccgucggcaacacccucuacugcgucaacaagcaggagggcaagucccucuacgucaagggcgagcccaucaucaacuucuacgacccccucgucuuccccuccgacgaguucgacgccuccaucucccaggucaacgagaagaucaaccagucccucgccuucauccgcaaguccgacgagcuccuccacaacgucaacgucggcaaguccaccaccaacaucaugaucaccaccaucaucaucgucaucaucgucauccuccuccuccucaucgccgucggccucuuccucuacugcaaggcccgcuccacccccgucacccucuccaaggaccagcucuccggcaucaacaacaucgccuucuccaacugaggacuagugaagggaacacccaaauuuaauucagccuuaagcacaauuaauuaagagugaaacguaauuguacaagcaguuggucacccaccauagggcaugaucaacaccgcaaccuuuccuuuuucccccagugauucugaaaaaccccucuucccuucagcuugcuuagauguuccaaauuuaguaagcuuaaggcggccuacagaagaaaaagaaaaaaaaggccacaaaaguucccucucacuuucaguaaauaaaauaaaagcagcaacagaaauaaagaaauaaaugaaauucaaaaugaaauaaauauuguguugugcagcauuaaaaaaucaauaaaaauuaaaaaugagcaagaucuaaaaaaaaaaaaaaaaaaaaaaaaaaaaaaaaaaaaaaaaaaaaaaaaaaaaaaaaaaaaaaaaugcaucccccccccccccccccccccccccccccccaaaggcucuuuucagagccaccagaauu

SEQ ID NO: 16302 - RNA, 2277 nt, Artificial Sequence
  mRNA product Design d-3 comprising derived and/or modified sequence from HRSV(Memphis-37)__AIY60640.1__F_DSCav1_mut4 (opt3)
gggagagggcgcuuggcuugcaaggacccugagcugcggcauugaagcacacccaacccaacucgacugaagucagccucacugaaccggaucugagaaucuucucucucugggcuugccagggcucuccgaaccuagcuagcauccucuucaauuccaacuagaaagcuuaccauggagcugcccauccucaagaccaacgccauuacaacuauacuugcugcagugacgcugugcuucgccagcucccagaauaucaccgaagaguuuuaccaaucuacauguucagcggucaguaaaggcuauuugagcgcuuuaagaacugggugguacaccuccguuauuacaaucgaacugucuaacauuaaggagaauaaaugcaacggaaccgacgccaaggugaaacuaaucaagcaggaacucgauaaguauaaaaaugcaguaacugagcugcagcuucugaugcagucgaccccugccgcugguucaggcagcgcaauauguagugggaucgccgugugcaaggucuugcaccucgagggagaagugaacaaaauuaagaaugcucugcuguccacaaacaaagccguugugucucucagcaauggcgucuccguguuaacguucaagguacuggaccuuaagaacuacaucgauaaacaauugcugccaauucuaaauaagcagucauguaguaucagcaacauagagacuguuauugaauuucagcagaaaaauaacaggcuccuggagaucacccgggaguucucugugaaugcgggugucacaacuccgguguccaccuauaugcuuacaaacucagaacuguugagccucauuaacgacaugcccaucaccaaugaucaaaagaaacugaugaguaacaaugugcagaucguccgccagcagucuuacuccauuaugugcauaaucaaggaggaaguuuuagcauaugugguacaacugccucucuacggggugauugacacgccauguuggaaacuucauacuagcccccugugcacaaccaacacuaaggagggaucgaauaucuguuugacacgaaccgaucguggcugguacugcgacaacgccggcucugucuccuuuuucccucaggcugaaacguguaaggugcagucaaauagaguguuuugcgauaccaugaacaguagaacacugccaagcgaggugaaucucugcaacauagacauuuucaaucccaaauaugauuguaagaucaugacuuccaaaaccgacgucucuagcucagugaucacaagucugggggccauuguauccugcuacggaaagacuaaauguaccgcaagcaacaagaauagggguaucauuaagacauuuucuaacggcugcgauuauguuucaaauaaagggguggacaccgucagugugggaaacacucuuuacugugucaacaagcaagagggcaaaagccuguaugugaagggugaaccuauaaucaauuucuacgacccauugguuuuuccguccgaugaguucgacgcuucuauuucgcagguuaacgagaaaaucaaucagagccucgccuuuauccggaaguccgaugaacuguuacacaacguaaaugucgggaagucaacgacaaacauuaugauaaccacuaucauuaucgugauuaucguuauacugcuacuccugaucgcggugggacuuuucuuguauugcaaagcccgcaguacccccgucacacugucuaaggaccagcucagcggcauuaauaacaucgcauucuccaauugaggacuagugaagggaacacccaaauuuaauucagccuuaagcacaauuaauuaagagugaaacguaauuguacaagcaguuggucacccaccauagggcaugaucaacaccgcaaccuuuccuuuuucccccagugauucugaaaaaccccucuucccuucagcuugcuuagauguuccaaauuuaguaagcuuaaggcggccuacagaagaaaaagaaaaaaaaggccacaaaaguucccucucacuuucaguaaauaaaauaaaagcagcaacagaaauaaagaaauaaaugaaauucaaaaugaaauaaauauuguguugugcagcauuaaaaaaucaauaaaaauuaaaaaugagcaagaucuaaaaaaaaaaaaaaaaaaaaaaaaaaaaaaaaaaaaaaaaaaaaaaaaaaaaaaaaaaaaaaaaugcaucccccccccccccccccccccccccccccccaaaggcucuuuucagagccaccagaauu

SEQ ID NO: 16303 - RNA, 2277 nt, Artificial Sequence
  mRNA product Design d-3 comprising derived and/or modified sequence from HRSV(Memphis-37)__AIY60640.1__F_DSCav1_mut4 (opt4)
gggagagggcgcuuggcuugcaaggacccugagcugcggcauugaagcacacccaacccaacucgacugaagucagccucacugaaccggaucugagaaucuucucucucugggcuugccagggcucuccgaaccuagcuagcauccucuucaauuccaacuagaaagcuuaccauggagcugcccauccugaagaccaacgccaucaccaccauccuggccgccgugacccugugcuucgccagcagccagaacaucaccgaggaguucuaccagagcaccugcagcgccgugagcaagggcuaccugagcgcccugagaaccggcugguacaccagcgugaucaccaucgagcugagcaacaucaaggagaacaagugcaacggcaccgacgccaaggugaagcugaucaagcaggagcuggacaaguacaagaacgccgugaccgagcugcagcugcugaugcagagcacccccgccgccggcagcggcagcgccaucugcagcggcaucgccgugugcaaggugcugcaccuggagggcgaggugaacaagaucaagaacgcccugcugagcaccaacaaggccguggugagccugagcaacggcgugagcgugcugaccuucaaggugcuggaccugaagaacuacaucgacaagcagcugcugcccauccugaacaagcagagcugcagcaucagcaacaucgagaccgugaucgaguuccagcagaagaacaacagacugcuggagaucaccagagaguucagcgugaacgccggcgugaccacccccgugagcaccuacaugcugaccaacagcgagcugcugagccugaucaacgacaugcccaucaccaacgaccagaagaagcugaugagcaacaacgugcagaucgugagacagcagagcuacagcaucaugugcaucaucaaggaggaggugcuggccuacguggugcagcugccccuguacggcgugaucgacacccccugcuggaagcugcacaccagcccccugugcaccaccaacaccaaggagggcagcaacaucugccugaccagaaccgacagaggcugguacugcgacaacgccggcagcgugagcuucuucccccaggccgagaccugcaaggugcagagcaacagaguguucugcgacaccaugaacagcagaacccugcccagcgaggugaaccugugcaacaucgacaucuucaaccccaaguacgacugcaagaucaugaccagcaagaccgacgugagcagcagcgugaucaccagccugggcgccaucgugagcugcuacggcaagaccaagugcaccgccagcaacaagaacagaggcaucaucaagaccuucagcaacggcugcgacuacgugagcaacaagggcguggacaccgugagcgugggcaacacccuguacugcgugaacaagcaggagggcaagagccuguacgugaagggcgagcccaucaucaacuucuacgacccccugguguuccccagcgacgaguucgacgccagcaucagccaggugaacgagaagaucaaccagagccuggccuucaucagaaagagcgacgagcugcugcacaacgugaacgugggcaagagcaccaccaacaucaugaucaccaccaucaucaucgugaucaucgugauccugcugcugcugaucgccgugggccuguuccuguacugcaaggccagaagcacccccgugacccugagcaaggaccagcugagcggcaucaacaacaucgccuucagcaacugaggacuagugaagggaacacccaaauuuaauucagccuuaagcacaauuaauuaagagugaaacguaauuguacaagcaguuggucacccaccauagggcaugaucaacaccgcaaccuuuccuuuuucccccagugauucugaaaaaccccucuucccuucagcuugcuuagauguuccaaauuuaguaagcuuaaggcggccuacagaagaaaaagaaaaaaaaggccacaaaaguucccucucacuuucaguaaauaaaauaaaagcagcaacagaaauaaagaaauaaaugaaauucaaaaugaaauaaauauuguguugugcagcauuaaaaaaucaauaaaaauuaaaaaugagcaagaucuaaaaaaaaaaaaaaaaaaaaaaaaaaaaaaaaaaaaaaaaaaaaaaaaaaaaaaaaaaaaaaaaugcaucccccccccccccccccccccccccccccccaaaggcucuuuucagagccaccagaauu

SEQ ID NO: 16304 - RNA, 2277 nt, Artificial Sequence
  mRNA product Design d-3 comprising derived and/or modified sequence from HRSV(Memphis-37)__AIY60640.1__F_DSCav1_mut4 (opt5)
gggagagggcgcuuggcuugcaaggacccugagcugcggcauugaagcacacccaacccaacucgacugaagucagccucacugaaccggaucugagaaucuucucucucugggcuugccagggcucuccgaaccuagcuagcauccucuucaauuccaacuagaaagcuuaccauggagcugcccauccucaagaccaacgccauuacaacgauccuggcugccgugacccuuugcuucgcgagcucccagaauauuacagaagaguuuuaccaaucuaccuguagcgcugucuccaaaggcuaucugucugcccucagaacagggugguacaccagcguuaucacaauugaacuguccaacaucaaggagaauaaaugcaacggaaccgacgccaaggugaaacuuaucaagcaggaacuggauaaguauaaaaaugcugugacggagcuccagcugcugaugcagucuaccccugccgcuggcagcggguccgccauuuguagcggaaucgcggucugcaaggugcuccaccuggagggcgaaguuaacaaaauuaagaaugcccuucugucuacaaacaaagcuguggucucccucagcaauggggugucuguucugaccuucaaggugcuugaccugaagaacuacaucgauaaacaacuccugccgauucugaauaagcaguccuguagcaucucuaacauugagacagucaucgaauuucagcagaaaaauaaccggcuccuggagaucacccgcgaguucuccgugaaugccggagugacgacacccgucagcaccuauaugcuuacaaacuccgaacugcucucucugauuaacgacaugccuaucaccaaugaucaaaagaaacuuaugagcaacaauguucagauugugagacagcaguccuacagcaucaugugcauuaucaaggaggaagugcuggcuuaugucgugcaacucccccuguacggcguuaucgacaccccuuguuggaaacugcauacaucuccccucugcacgaccaacacaaaggagggcuccaauauuugucugacccggacagaucgcgggugguacugcgacaacgccggaagcgugagcuuuuucccucaggcggaaaccuguaagguccagucuaauagaguguuuugcgauacgaugaacuccagaacacugccgucugagguuaaucucugcaacaucgacauuuucaaucccaaauaugauuguaagaucaugaccagcaaaaccgacguguccagcucugucauuacaucccugggcgccaucgugagcugcuacgggaagaccaaauguacagcuucuaacaagaaucggggaaucauuaagacguuuuccaacggcugcgauuaugucagcaauaaagggguggacaccguuuccgugggaaacacacuuuacugugucaacaagcaagagggcaaaucucuguaugugaagggcgaaccuaucauuaauuucuacgacccccucguuuuuccuagcgaugaguucgacgccuccaucucucaggugaacgaaaagauuaaucagagccuggcuuuuauccgcaaguccgaugagcugcuccacaacgucaauguggggaaaagcaccacaaacauuaugaucaccacgaucauuaucgugauuaucguuauucugcuucugcucaucgccgucggacuguuccuguauugcaaagccagaucuacccccgugacacuuuccaaggaccagcucagcggcaucaauaacauugcuuucucuaauugaggacuagugaagggaacacccaaauuuaauucagccuuaagcacaauuaauuaagagugaaacguaauuguacaagcaguuggucacccaccauagggcaugaucaacaccgcaaccuuuccuuuuucccccagugauucugaaaaaccccucuucccuucagcuugcuuagauguuccaaauuuaguaagcuuaaggcggccuacagaagaaaaagaaaaaaaaggccacaaaaguucccucucacuuucaguaaauaaaauaaaagcagcaacagaaauaaagaaauaaaugaaauucaaaaugaaauaaauauuguguugugcagcauuaaaaaaucaauaaaaauuaaaaaugagcaagaucuaaaaaaaaaaaaaaaaaaaaaaaaaaaaaaaaaaaaaaaaaaaaaaaaaaaaaaaaaaaaaaaaugcaucccccccccccccccccccccccccccccccaaaggcucuuuucagagccaccagaauu

SEQ ID NO: 16305 - RNA, 2277 nt, Artificial Sequence
  mRNA product Design d-3 comprising derived and/or modified sequence from HRSV(Memphis-37)__AIY60640.1__F_DSCav1_mut4 (opt6)
gggagagggcgcuuggcuugcaaggacccugagcugcggcauugaagcacacccaacccaacucgacugaagucagccucacugaaccggaucugagaaucuucucucucugggcuugccagggcucuccgaaccuagcuagcauccucuucaauuccaacuagaaagcuuaccauggaacucccaauccuaaaaacaaacgcaauaacaacaauauuagcagccguaacacucuguuucgccucaucccaaaacauaacagaagaauuuuaucaaucuacauguuccgccgucaguaaaggauaucuaucagccuuaagaacaggcugguacacaucaguaaucaccauagaauuauccaacauaaaagaaaacaaaugcaauggcacagaugccaaaguaaaacuaaucaaacaagaacuugauaaauauaaaaacgcaguaacagaauuacaauuauuaaugcaaagcacaccagccgcaggaucaggaucagcaauauguucaggaauagcagucuguaaaguacuacacuuagaaggagaaguaaacaaaauuaaaaacgcauuacuaagcaccaauaaagcaguaguaucacuaucaaacggcguauccguauuaacguucaaaguccucgaccugaaaaacuacauagauaaacaacuacuaccaauacuaaauaaacaaucaugcucaauaucaaacauagaaacuguuaucgaauuucaacagaaaaauaaccgacuacuagaaaucaccagagaauuuucaguaaacgcaggcgucacuacaccaguauccacauacaugcuaaccaacucggaauuacuuucccucauaaacgacaugccaauaacaaacgaccaaaagaaacuuaugucaaacaacguucaaauaguccgccaacaaucauacucaauaauguguaucauaaaagaagaaguccuagcauaugucguacaacuaccauuauacggaguaauugacacaccuugcuggaaacuacacacauccccacuauguacaacaaacacuaaagaaggaucaaacaucugccuaaccagaacagacagaggcugguauugcgacaacgcaggaucaguaucauucuucccacaagcagaaacaugcaaaguacaaucaaacagagucuucugcgacaccaugaacagcagaacccucccauccgaaguaaacuuaugcaacaucgauaucuucaacccaaaauacgacuguaaaauaaugacaucaaaaacagacguuucauccucaguaauaacaucauuaggugccauaguuucauguuacggaaaaaccaaauguaccgcaucaaacaaaaacagaggcauuauuaaaacauucucuaacggaugcgacuaugucaguaacaaaggaguagacacaguaucagucggaaacacauuauauugcguaaauaaacaagaaggaaaaagucuauacguaaaaggagaaccaauaauaaacuuuuacgacccucucguauucccaucagacgaauuugaugcauccauaucacaagucaacgaaaagauaaaccaaucccuagcauucauaagaaaaucagacgaacuacuccauaacguaaacguaggaaaaagcacaaccaauauaaugauaaccacaauaaucauaguaauaauagucauauuauuacuuuuaauugcaguaggacucuuucuauacugcaaagcaagaagcacaccaguaacacuaagcaaagaccaacuaucaggcaucaacaauaucgccuuuucaaauuaaggacuagugaagggaacacccaaauuuaauucagccuuaagcacaauuaauuaagagugaaacguaauuguacaagcaguuggucacccaccauagggcaugaucaacaccgcaaccuuuccuuuuucccccagugauucugaaaaaccccucuucccuucagcuugcuuagauguuccaaauuuaguaagcuuaaggcggccuacagaagaaaaagaaaaaaaaggccacaaaaguucccucucacuuucaguaaauaaaauaaaagcagcaacagaaauaaagaaauaaaugaaauucaaaaugaaauaaauauuguguugugcagcauuaaaaaaucaauaaaaauuaaaaaugagcaagaucuaaaaaaaaaaaaaaaaaaaaaaaaaaaaaaaaaaaaaaaaaaaaaaaaaaaaaaaaaaaaaaaaugcaucccccccccccccccccccccccccccccccaaaggcucuuuucagagccaccagaauu

SEQ ID NO: 16306 - RNA, 2277 nt, Artificial Sequence
  mRNA product Design d-3 comprising derived and/or modified sequence from HRSV(Memphis-37)__AIY60640.1__F_DSCav1_mut4 (opt11)
gggagagggcgcuuggcuugcaaggacccugagcugcggcauugaagcacacccaacccaacucgacugaagucagccucacugaaccggaucugagaaucuucucucucugggcuugccagggcucuccgaaccuagcuagcauccucuucaauuccaacuagaaagcuuaccauggagcugcccauccucaagaccaacgccaucaccacgauccuggccgcggugacccugugcuucgcgagcucccagaacaucaccgaggaguucuaccagagcacgugcuccgccgucagcaagggcuaccucuccgcccugcgcaccgggugguacaccagcgugaucaccaucgagcuguccaacaucaaggagaacaagugcaacggcaccgacgccaaggugaaacucaucaagcaggagcuggacaaguacaagaacgccgucaccgagcugcagcuccugaugcagagcaccccggccgccggguccggcagcgcuaucugcuccgggaucgcggugugcaaggugcugcaccucgagggcgaggucaacaagaucaagaaugcccugcugagcaccaacaaggccguggugucccucagcaacggagucagcgugcuuaccuucaaggugcuggaccucaagaacuacaucgacaagcagcugcugccuauccucaacaagcagagcugcuccaucagcaacaucgagacggucaucgaguuccagcagaagaacaaccggcugcuggagaucacccgcgaguucuccgugaacgccggggugaccacccccgucagcacguacaugcucaccaacagcgaacugcugucccucaucaacgacaugcccaucaccaacgaccagaagaagcugaugagcaacaacgugcagaucgugcggcagcaguccuacagcaucaugugcaucaucaaggaggaaguccuggccuacguggugcagcucccucuguacggcgucaucgacacccccugcuggaagcugcacacgagcccccucugcaccaccaacaccaaggagggguccaacaucugccugacgcgcaccgaccggggcugguacugcgacaacgcgggguccgugagcuucuucccccaggccgagaccugcaaggugcagagcaaccgcgucuucugcgacacuaugaacagcagaacgcucccguccgaggugaaccugugcaacauagacauauucaaccccaaguacgacugcaagaucaugaccagcaagaccgacgucuccagcuccgugauuaccagccugggcgcaaucguguccugcuacggcaagacgaagugcaccgccagcaacaagaaccgggggaucaucaagaccuucuccaacggcugcgacuaugucagcaacaaggggguggacaccgugagcgucggaaacacgcucuacugcgugaacaagcaagagggcaaguccuuauacgugaagggggagcccaucaucaacuucuacgacccccuggucuucccgagcgacgaguucgacgccagcauaagccaggugaacgagaagaucaaccagucccucgcguucauccgcaagagcgacgagcugcugcacaacgugaacgucggcaaguccaccaccaacaucaugaucaccaccaucaucaucgugaucaucgugauccuccugcugcucaucgccgucgggcuguuccuguacugcaaggcccggagcacgcccgugaccuuguccaaggaccagcucagcggcaucaacaacaucgccuucuccaacugaggacuagugaagggaacacccaaauuuaauucagccuuaagcacaauuaauuaagagugaaacguaauuguacaagcaguuggucacccaccauagggcaugaucaacaccgcaaccuuuccuuuuucccccagugauucugaaaaaccccucuucccuucagcuugcuuagauguuccaaauuuaguaagcuuaaggcggccuacagaagaaaaagaaaaaaaaggccacaaaaguucccucucacuuucaguaaauaaaauaaaagcagcaacagaaauaaagaaauaaaugaaauucaaaaugaaauaaauauuguguugugcagcauuaaaaaaucaauaaaaauuaaaaaugagcaagaucuaaaaaaaaaaaaaaaaaaaaaaaaaaaaaaaaaaaaaaaaaaaaaaaaaaaaaaaaaaaaaaaaugcaucccccccccccccccccccccccccccccccaaaggcucuuuucagagccaccagaauu

SEQ ID NO: 16307 - RNA, 1960 nt, Artificial Sequence
  mRNA product Design d-4 comprising derived and/or modified sequence from HRSV(Memphis-37)__AIY60640.1__F_DSCav1_mut4 (opt1)
gggagagucccgcagucggcguccagcggcucugcuuguucgugugugugucguugcaggccuuauucaagcuuaccauggagcugcccauccucaagaccaacgccaucaccacgauccuggccgcggugacccugugcuucgccagcucccagaacaucaccgaggaguucuaccagagcacgugcuccgccgucagcaagggcuaccucuccgcccugcgcaccgggugguacaccagcgugaucaccaucgagcuguccaacaucaaggagaacaagugcaacggcaccgacgccaaggugaagcucaucaagcaggagcuggacaaguacaagaacgcggucacggagcugcagcuccugaugcagagcaccccggccgccggcuccgggagcgcgaucugcuccggcaucgccgucugcaaggugcugcaccucgagggcgaggugaacaagaucaagaacgcccugcuguccaccaacaaggccgucgugagccucuccaacggggugagcguccugaccuucaaggugcuggaccucaagaacuacaucgacaagcagcugcugcccauccugaacaagcagagcugcuccaucagcaacaucgagaccgucaucgaguuccagcagaagaacaaccgccuccuggagaucacgcgggaguucagcgugaacgcgggcgugaccacccccgucuccaccuacaugcugacgaacagcgagcuccugucccugaucaacgacaugccgaucaccaacgaccagaagaagcucaugagcaacaacgugcagaucgugcgccagcaguccuacagcaucaugugcaucaucaaggaggagguccuggccuacguggugcagcugccccucuacggggucaucgacacccccugcuggaagcugcacaccagcccccugugcacgaccaacaccaaggagggcuccaacaucugccucacccggacggaccgcgggugguacugcgacaacgccggcagcguguccuucuucccgcaggccgagaccugcaagguccagagcaaccggguguucugcgacaccaugaacucccggacccugcccagcgaggugaaccucugcaacaucgacaucuucaaccccaaguacgacugcaagaucaugacguccaagaccgacgucagcuccagcgugaucaccucccugggcgccaucgugagcugcuacgggaagaccaagugcacggcgagcaacaagaaccgcggcaucaucaagaccuucuccaacgggugcgacuacgucagcaacaagggcguggacaccguguccgucggcaacacccuguacugcgugaacaagcaggagggcaagagccucuacgugaagggggagcccaucaucaacuucuacgacccgcuggucuuccccuccgacgaguucgacgccagcaucucccaggugaacgagaagaucaaccagagccuggccuucauccggaaguccgacgagcuccugcacaacgugaacgucggcaagagcaccacgaacaucaugaucaccaccaucaucaucgugaucaucgugauccugcugcuccugaucgccgucgggcuguuccucuacugcaaggcccgcuccacccccgugacgcugagcaaggaccagcuguccgggaucaacaacaucgcguucagcaacugaggacuaguggaagcauuuuccuggcugauuaaaagaaauuacucagcuauggucaucuguuccuguuagaaggcuaugcagcauauuauauacuaugcgcauguuaugaaaugcauaauaaaaaauuuuaaaaaaucuaaaagaucuaaaaaaaaaaaaaaaaaaaaaaaaaaaaaaaaaaaaaaaaaaaaaaaaaaaaaaaaaaaaaaaaugcaucccccccccccccccccccccccccccccccaaaggcucuuuucagagccaccagaauu

SEQ ID NO: 16308 - RNA, 1960 nt, Artificial Sequence
  mRNA product Design d-4 comprising derived and/or modified sequence from HRSV(Memphis-37)__AIY60640.1__F_DSCav1_mut4 (opt1)
gggagagucccgcagucggcguccagcggcucugcuuguucgugugugugucguugcaggccuuauucaagcuuaccauggagcugcccauccucaagaccaacgccaucaccacgauccuggccgcggugacccugugcuucgccagcucccagaacaucaccgaggaguucuaccagagcacgugcuccgccgucagcaagggcuaccucuccgcccugcgcaccgggugguacaccagcgugaucaccaucgagcuguccaacaucaaggagaacaagugcaacggcaccgacgccaaggugaagcucaucaagcaggagcuggacaaguacaagaacgcggucacggagcugcagcuccugaugcagagcaccccggccgccggguccggcagcgccaucugcuccgggaucgcggugugcaaggugcugcaccucgagggcgaggucaacaagaucaagaacgcccugcugagcaccaacaaggccguggugucccucagcaacggcgucuccgugcugaccuucaaggugcuggaccucaagaacuacaucgacaagcagcugcugcccauccucaacaagcagagcugcuccaucagcaacaucgagacggucaucgaguuccagcagaagaacaaccggcugcuggagaucacccgcgaguucuccgugaacgccggggugaccacccccgucagcacguacaugcucaccaacagcgagcugcugucccucaucaacgacaugcccaucaccaacgaccagaagaagcugaugagcaacaacgugcagaucgugcggcagcaguccuacagcaucaugugcaucaucaaggaggagguccuggccuacguggugcagcucccgcuguacggcgucaucgacacccccugcuggaagcugcacacgagcccccucugcaccaccaacaccaaggagggguccaacaucugccugacgcgcaccgaccggggcugguacugcgacaacgcgggguccgugagcuucuucccccaggccgagaccugcaaggugcaguccaaccgcgucuucugcgacaccaugaacagccggacgcucccguccgaggugaaccugugcaacaucgacaucuucaaccccaaguacgacugcaagaucaugaccagcaagaccgacgucuccagcuccgugaucaccagccugggcgccaucguguccugcuacggcaagacgaagugcaccgccagcaacaagaaccgggggaucaucaagaccuucuccaacggcugcgacuacgucagcaacaaggggguggacaccgugagcgucggcaacacgcucuacugcgugaacaagcaggagggcaagucccuguacgugaagggggagcccaucaucaacuucuacgacccccuggucuucccgagcgacgaguucgacgccuccaucagccaggugaacgagaagaucaaccagucccucgcguucauccgcaagagcgacgagcugcugcacaacgugaacgucggcaaguccaccaccaacaucaugaucaccaccaucaucaucgugaucaucgugauccuccugcugcucaucgccgucgggcuguuccuguacugcaaggcccggagcacgcccgugacccuguccaaggaccagcucagcggcaucaacaacaucgccuucuccaacugaggacuaguggaagcauuuuccuggcugauuaaaagaaauuacucagcuauggucaucuguuccuguuagaaggcuaugcagcauauuauauacuaugcgcauguuaugaaaugcauaauaaaaaauuuuaaaaaaucuaaaagaucuaaaaaaaaaaaaaaaaaaaaaaaaaaaaaaaaaaaaaaaaaaaaaaaaaaaaaaaaaaaaaaaaugcaucccccccccccccccccccccccccccccccaaaggcucuuuucagagccaccagaauu

SEQ ID NO: 16309 - RNA, 1960 nt, Artificial Sequence
  mRNA product Design d-4 comprising derived and/or modified sequence from HRSV(Memphis-37)__AIY60640.1__F_DSCav1_mut4 (opt2)
gggagagucccgcagucggcguccagcggcucugcuuguucgugugugugucguugcaggccuuauucaagcuuaccauggagcuccccauccucaagaccaacgccaucaccaccauccucgccgccgucacccucugcuucgccuccucccagaacaucaccgaggaguucuaccaguccaccugcuccgccgucuccaagggcuaccucuccgcccuccgcaccggcugguacaccuccgucaucaccaucgagcucuccaacaucaaggagaacaagugcaacggcaccgacgccaaggucaagcucaucaagcaggagcucgacaaguacaagaacgccgucaccgagcuccagcuccucaugcaguccacccccgccgccggcuccggcuccgccaucugcuccggcaucgccgucugcaagguccuccaccucgagggcgaggucaacaagaucaagaacgcccuccucuccaccaacaaggccgucgucucccucuccaacggcgucuccguccucaccuucaagguccucgaccucaagaacuacaucgacaagcagcuccuccccauccucaacaagcaguccugcuccaucuccaacaucgagaccgucaucgaguuccagcagaagaacaaccgccuccucgagaucacccgcgaguucuccgucaacgccggcgucaccacccccgucuccaccuacaugcucaccaacuccgagcuccucucccucaucaacgacaugcccaucaccaacgaccagaagaagcucauguccaacaacguccagaucguccgccagcaguccuacuccaucaugugcaucaucaaggaggagguccucgccuacgucguccagcucccccucuacggcgucaucgacacccccugcuggaagcuccacaccuccccccucugcaccaccaacaccaaggagggcuccaacaucugccucacccgcaccgaccgcggcugguacugcgacaacgccggcuccgucuccuucuucccccaggccgagaccugcaagguccaguccaaccgcgucuucugcgacaccaugaacucccgcacccuccccuccgaggucaaccucugcaacaucgacaucuucaaccccaaguacgacugcaagaucaugaccuccaagaccgacgucuccuccuccgucaucaccucccucggcgccaucgucuccugcuacggcaagaccaagugcaccgccuccaacaagaaccgcggcaucaucaagaccuucuccaacggcugcgacuacgucuccaacaagggcgucgacaccgucuccgucggcaacacccucuacugcgucaacaagcaggagggcaagucccucuacgucaagggcgagcccaucaucaacuucuacgacccccucgucuuccccuccgacgaguucgacgccuccaucucccaggucaacgagaagaucaaccagucccucgccuucauccgcaaguccgacgagcuccuccacaacgucaacgucggcaaguccaccaccaacaucaugaucaccaccaucaucaucgucaucaucgucauccuccuccuccucaucgccgucggccucuuccucuacugcaaggcccgcuccacccccgucacccucuccaaggaccagcucuccggcaucaacaacaucgccuucuccaacugaggacuaguggaagcauuuuccuggcugauuaaaagaaauuacucagcuauggucaucuguuccuguuagaaggcuaugcagcauauuauauacuaugcgcauguuaugaaaugcauaauaaaaaauuuuaaaaaaucuaaaagaucuaaaaaaaaaaaaaaaaaaaaaaaaaaaaaaaaaaaaaaaaaaaaaaaaaaaaaaaaaaaaaaaaugcaucccccccccccccccccccccccccccccccaaaggcucuuuucagagccaccagaauu

SEQ ID NO: 16310 - RNA, 1960 nt, Artificial Sequence
  mRNA product Design d-4 comprising derived and/or modified sequence from HRSV(Memphis-37)__AIY60640.1__F_DSCav1_mut4 (opt3)
gggagagucccgcagucggcguccagcggcucugcuuguucgugugugugucguugcaggccuuauucaagcuuaccauggagcugcccauccucaagaccaacgccauuacaacuauacuugcugcagugacgcugugcuucgccagcucccagaauaucaccgaagaguuuuaccaaucuacauguucagcggucaguaaaggcuauuugagcgcuuuaagaacugggugguacaccuccguuauuacaaucgaacugucuaacauuaaggagaauaaaugcaacggaaccgacgccaaggugaaacuaaucaagcaggaacucgauaaguauaaaaaugcaguaacugagcugcagcuucugaugcagucgaccccugccgcugguucaggcagcgcaauauguagugggaucgccgugugcaaggucuugcaccucgagggagaagugaacaaaauuaagaaugcucugcuguccacaaacaaagccguugugucucucagcaauggcgucuccguguuaacguucaagguacuggaccuuaagaacuacaucgauaaacaauugcugccaauucuaaauaagcagucauguaguaucagcaacauagagacuguuauugaauuucagcagaaaaauaacaggcuccuggagaucacccgggaguucucugugaaugcgggugucacaacuccgguguccaccuauaugcuuacaaacucagaacuguugagccucauuaacgacaugcccaucaccaaugaucaaaagaaacugaugaguaacaaugugcagaucguccgccagcagucuuacuccauuaugugcauaaucaaggaggaaguuuuagcauaugugguacaacugccucucuacggggugauugacacgccauguuggaaacuucauacuagcccccugugcacaaccaacacuaaggagggaucgaauaucuguuugacacgaaccgaucguggcugguacugcgacaacgccggcucugucuccuuuuucccucaggcugaaacguguaaggugcagucaaauagaguguuuugcgauaccaugaacaguagaacacugccaagcgaggugaaucucugcaacauagacauuuucaaucccaaauaugauuguaagaucaugacuuccaaaaccgacgucucuagcucagugaucacaagucugggggccauuguauccugcuacggaaagacuaaauguaccgcaagcaacaagaauagggguaucauuaagacauuuucuaacggcugcgauuauguuucaaauaaagggguggacaccgucagugugggaaacacucuuuacugugucaacaagcaagagggcaaaagccuguaugugaagggugaaccuauaaucaauuucuacgacccauugguuuuuccguccgaugaguucgacgcuucuauuucgcagguuaacgagaaaaucaaucagagccucgccuuuauccggaaguccgaugaacuguuacacaacguaaaugucgggaagucaacgacaaacauuaugauaaccacuaucauuaucgugauuaucguuauacugcuacuccugaucgcggugggacuuuucuuguauugcaaagcccgcaguacccccgucacacugucuaaggaccagcucagcggcauuaauaacaucgcauucuccaauugaggacuaguggaagcauuuuccuggcugauuaaaagaaauuacucagcuauggucaucuguuccuguuagaaggcuaugcagcauauuauauacuaugcgcauguuaugaaaugcauaauaaaaaauuuuaaaaaaucuaaaagaucuaaaaaaaaaaaaaaaaaaaaaaaaaaaaaaaaaaaaaaaaaaaaaaaaaaaaaaaaaaaaaaaaugcaucccccccccccccccccccccccccccccccaaaggcucuuuucagagccaccagaauu

SEQ ID NO: 16311 - RNA, 1960 nt, Artificial Sequence
  mRNA product Design d-4 comprising derived and/or modified sequence from HRSV(Memphis-37)__AIY60640.1__F_DSCav1_mut4 (opt4)
gggagagucccgcagucggcguccagcggcucugcuuguucgugugugugucguugcaggccuuauucaagcuuaccauggagcugcccauccugaagaccaacgccaucaccaccauccuggccgccgugacccugugcuucgccagcagccagaacaucaccgaggaguucuaccagagcaccugcagcgccgugagcaagggcuaccugagcgcccugagaaccggcugguacaccagcgugaucaccaucgagcugagcaacaucaaggagaacaagugcaacggcaccgacgccaaggugaagcugaucaagcaggagcuggacaaguacaagaacgccgugaccgagcugcagcugcugaugcagagcacccccgccgccggcagcggcagcgccaucugcagcggcaucgccgugugcaaggugcugcaccuggagggcgaggugaacaagaucaagaacgcccugcugagcaccaacaaggccguggugagccugagcaacggcgugagcgugcugaccuucaaggugcuggaccugaagaacuacaucgacaagcagcugcugcccauccugaacaagcagagcugcagcaucagcaacaucgagaccgugaucgaguuccagcagaagaacaacagacugcuggagaucaccagagaguucagcgugaacgccggcgugaccacccccgugagcaccuacaugcugaccaacagcgagcugcugagccugaucaacgacaugcccaucaccaacgaccagaagaagcugaugagcaacaacgugcagaucgugagacagcagagcuacagcaucaugugcaucaucaaggaggaggugcuggccuacguggugcagcugccccuguacggcgugaucgacacccccugcuggaagcugcacaccagcccccugugcaccaccaacaccaaggagggcagcaacaucugccugaccagaaccgacagaggcugguacugcgacaacgccggcagcgugagcuucuucccccaggccgagaccugcaaggugcagagcaacagaguguucugcgacaccaugaacagcagaacccugcccagcgaggugaaccugugcaacaucgacaucuucaaccccaaguacgacugcaagaucaugaccagcaagaccgacgugagcagcagcgugaucaccagccugggcgccaucgugagcugcuacggcaagaccaagugcaccgccagcaacaagaacagaggcaucaucaagaccuucagcaacggcugcgacuacgugagcaacaagggcguggacaccgugagcgugggcaacacccuguacugcgugaacaagcaggagggcaagagccuguacgugaagggcgagcccaucaucaacuucuacgacccccugguguuccccagcgacgaguucgacgccagcaucagccaggugaacgagaagaucaaccagagccuggccuucaucagaaagagcgacgagcugcugcacaacgugaacgugggcaagagcaccaccaacaucaugaucaccaccaucaucaucgugaucaucgugauccugcugcugcugaucgccgugggccuguuccuguacugcaaggccagaagcacccccgugacccugagcaaggaccagcugagcggcaucaacaacaucgccuucagcaacugaggacuaguggaagcauuuuccuggcugauuaaaagaaauuacucagcuauggucaucuguuccuguuagaaggcuaugcagcauauuauauacuaugcgcauguuaugaaaugcauaauaaaaaauuuuaaaaaaucuaaaagaucuaaaaaaaaaaaaaaaaaaaaaaaaaaaaaaaaaaaaaaaaaaaaaaaaaaaaaaaaaaaaaaaaugcaucccccccccccccccccccccccccccccccaaaggcucuuuucagagccaccagaauu

SEQ ID NO: 16312 - RNA, 1960 nt, Artificial Sequence
  mRNA product Design d-4 comprising derived and/or modified sequence from HRSV(Memphis-37)__AIY60640.1__F_DSCav1_mut4 (opt5)
gggagagucccgcagucggcguccagcggcucugcuuguucgugugugugucguugcaggccuuauucaagcuuaccauggagcugcccauccucaagaccaacgccauuacaacgauccuggcugccgugacccuuugcuucgcgagcucccagaauauuacagaagaguuuuaccaaucuaccuguagcgcugucuccaaaggcuaucugucugcccucagaacagggugguacaccagcguuaucacaauugaacuguccaacaucaaggagaauaaaugcaacggaaccgacgccaaggugaaacuuaucaagcaggaacuggauaaguauaaaaaugcugugacggagcuccagcugcugaugcagucuaccccugccgcuggcagcggguccgccauuuguagcggaaucgcggucugcaaggugcuccaccuggagggcgaaguuaacaaaauuaagaaugcccuucugucuacaaacaaagcuguggucucccucagcaauggggugucuguucugaccuucaaggugcuugaccugaagaacuacaucgauaaacaacuccugccgauucugaauaagcaguccuguagcaucucuaacauugagacagucaucgaauuucagcagaaaaauaaccggcuccuggagaucacccgcgaguucuccgugaaugccggagugacgacacccgucagcaccuauaugcuuacaaacuccgaacugcucucucugauuaacgacaugccuaucaccaaugaucaaaagaaacuuaugagcaacaauguucagauugugagacagcaguccuacagcaucaugugcauuaucaaggaggaagugcuggcuuaugucgugcaacucccccuguacggcguuaucgacaccccuuguuggaaacugcauacaucuccccucugcacgaccaacacaaaggagggcuccaauauuugucugacccggacagaucgcgggugguacugcgacaacgccggaagcgugagcuuuuucccucaggcggaaaccuguaagguccagucuaauagaguguuuugcgauacgaugaacuccagaacacugccgucugagguuaaucucugcaacaucgacauuuucaaucccaaauaugauuguaagaucaugaccagcaaaaccgacguguccagcucugucauuacaucccugggcgccaucgugagcugcuacgggaagaccaaauguacagcuucuaacaagaaucggggaaucauuaagacguuuuccaacggcugcgauuaugucagcaauaaagggguggacaccguuuccgugggaaacacacuuuacugugucaacaagcaagagggcaaaucucuguaugugaagggcgaaccuaucauuaauuucuacgacccccucguuuuuccuagcgaugaguucgacgccuccaucucucaggugaacgaaaagauuaaucagagccuggcuuuuauccgcaaguccgaugagcugcuccacaacgucaauguggggaaaagcaccacaaacauuaugaucaccacgaucauuaucgugauuaucguuauucugcuucugcucaucgccgucggacuguuccuguauugcaaagccagaucuacccccgugacacuuuccaaggaccagcucagcggcaucaauaacauugcuuucucuaauugaggacuaguggaagcauuuuccuggcugauuaaaagaaauuacucagcuauggucaucuguuccuguuagaaggcuaugcagcauauuauauacuaugcgcauguuaugaaaugcauaauaaaaaauuuuaaaaaaucuaaaagaucuaaaaaaaaaaaaaaaaaaaaaaaaaaaaaaaaaaaaaaaaaaaaaaaaaaaaaaaaaaaaaaaaugcaucccccccccccccccccccccccccccccccaaaggcucuuuucagagccaccagaauu

SEQ ID NO: 16313 - RNA, 1960 nt, Artificial Sequence
  mRNA product Design d-4 comprising derived and/or modified sequence from HRSV(Memphis-37)__AIY60640.1__F_DSCav1_mut4 (opt6)
gggagagucccgcagucggcguccagcggcucugcuuguucgugugugugucguugcaggccuuauucaagcuuaccauggaacucccaauccuaaaaacaaacgcaauaacaacaauauuagcagccguaacacucuguuucgccucaucccaaaacauaacagaagaauuuuaucaaucuacauguuccgccgucaguaaaggauaucuaucagccuuaagaacaggcugguacacaucaguaaucaccauagaauuauccaacauaaaagaaaacaaaugcaauggcacagaugccaaaguaaaacuaaucaaacaagaacuugauaaauauaaaaacgcaguaacagaauuacaauuauuaaugcaaagcacaccagccgcaggaucaggaucagcaauauguucaggaauagcagucuguaaaguacuacacuuagaaggagaaguaaacaaaauuaaaaacgcauuacuaagcaccaauaaagcaguaguaucacuaucaaacggcguauccguauuaacguucaaaguccucgaccugaaaaacuacauagauaaacaacuacuaccaauacuaaauaaacaaucaugcucaauaucaaacauagaaacuguuaucgaauuucaacagaaaaauaaccgacuacuagaaaucaccagagaauuuucaguaaacgcaggcgucacuacaccaguauccacauacaugcuaaccaacucggaauuacuuucccucauaaacgacaugccaauaacaaacgaccaaaagaaacuuaugucaaacaacguucaaauaguccgccaacaaucauacucaauaauguguaucauaaaagaagaaguccuagcauaugucguacaacuaccauuauacggaguaauugacacaccuugcuggaaacuacacacauccccacuauguacaacaaacacuaaagaaggaucaaacaucugccuaaccagaacagacagaggcugguauugcgacaacgcaggaucaguaucauucuucccacaagcagaaacaugcaaaguacaaucaaacagagucuucugcgacaccaugaacagcagaacccucccauccgaaguaaacuuaugcaacaucgauaucuucaacccaaaauacgacuguaaaauaaugacaucaaaaacagacguuucauccucaguaauaacaucauuaggugccauaguuucauguuacggaaaaaccaaauguaccgcaucaaacaaaaacagaggcauuauuaaaacauucucuaacggaugcgacuaugucaguaacaaaggaguagacacaguaucagucggaaacacauuauauugcguaaauaaacaagaaggaaaaagucuauacguaaaaggagaaccaauaauaaacuuuuacgacccucucguauucccaucagacgaauuugaugcauccauaucacaagucaacgaaaagauaaaccaaucccuagcauucauaagaaaaucagacgaacuacuccauaacguaaacguaggaaaaagcacaaccaauauaaugauaaccacaauaaucauaguaauaauagucauauuauuacuuuuaauugcaguaggacucuuucuauacugcaaagcaagaagcacaccaguaacacuaagcaaagaccaacuaucaggcaucaacaauaucgccuuuucaaauuaaggacuaguggaagcauuuuccuggcugauuaaaagaaauuacucagcuauggucaucuguuccuguuagaaggcuaugcagcauauuauauacuaugcgcauguuaugaaaugcauaauaaaaaauuuuaaaaaaucuaaaagaucuaaaaaaaaaaaaaaaaaaaaaaaaaaaaaaaaaaaaaaaaaaaaaaaaaaaaaaaaaaaaaaaaugcaucccccccccccccccccccccccccccccccaaaggcucuuuucagagccaccagaauu

SEQ ID NO: 16314 - RNA, 1960 nt, Artificial Sequence
  mRNA product Design d-4 comprising derived and/or modified sequence from HRSV(Memphis-37)__AIY60640.1__F_DSCav1_mut4 (opt11)
gggagagucccgcagucggcguccagcggcucugcuuguucgugugugugucguugcaggccuuauucaagcuuaccauggagcugcccauccucaagaccaacgccaucaccacgauccuggccgcggugacccugugcuucgcgagcucccagaacaucaccgaggaguucuaccagagcacgugcuccgccgucagcaagggcuaccucuccgcccugcgcaccgggugguacaccagcgugaucaccaucgagcuguccaacaucaaggagaacaagugcaacggcaccgacgccaaggugaaacucaucaagcaggagcuggacaaguacaagaacgccgucaccgagcugcagcuccugaugcagagcaccccggccgccggguccggcagcgcuaucugcuccgggaucgcggugugcaaggugcugcaccucgagggcgaggucaacaagaucaagaaugcccugcugagcaccaacaaggccguggugucccucagcaacggagucagcgugcuuaccuucaaggugcuggaccucaagaacuacaucgacaagcagcugcugccuauccucaacaagcagagcugcuccaucagcaacaucgagacggucaucgaguuccagcagaagaacaaccggcugcuggagaucacccgcgaguucuccgugaacgccggggugaccacccccgucagcacguacaugcucaccaacagcgaacugcugucccucaucaacgacaugcccaucaccaacgaccagaagaagcugaugagcaacaacgugcagaucgugcggcagcaguccuacagcaucaugugcaucaucaaggaggaaguccuggccuacguggugcagcucccucuguacggcgucaucgacacccccugcuggaagcugcacacgagcccccucugcaccaccaacaccaaggagggguccaacaucugccugacgcgcaccgaccggggcugguacugcgacaacgcgggguccgugagcuucuucccccaggccgagaccugcaaggugcagagcaaccgcgucuucugcgacacuaugaacagcagaacgcucccguccgaggugaaccugugcaacauagacauauucaaccccaaguacgacugcaagaucaugaccagcaagaccgacgucuccagcuccgugauuaccagccugggcgcaaucguguccugcuacggcaagacgaagugcaccgccagcaacaagaaccgggggaucaucaagaccuucuccaacggcugcgacuaugucagcaacaaggggguggacaccgugagcgucggaaacacgcucuacugcgugaacaagcaagagggcaaguccuuauacgugaagggggagcccaucaucaacuucuacgacccccuggucuucccgagcgacgaguucgacgccagcauaagccaggugaacgagaagaucaaccagucccucgcguucauccgcaagagcgacgagcugcugcacaacgugaacgucggcaaguccaccaccaacaucaugaucaccaccaucaucaucgugaucaucgugauccuccugcugcucaucgccgucgggcuguuccuguacugcaaggcccggagcacgcccgugaccuuguccaaggaccagcucagcggcaucaacaacaucgccuucuccaacugaggacuaguggaagcauuuuccuggcugauuaaaagaaauuacucagcuauggucaucuguuccuguuagaaggcuaugcagcauauuauauacuaugcgcauguuaugaaaugcauaauaaaaaauuuuaaaaaaucuaaaagaucuaaaaaaaaaaaaaaaaaaaaaaaaaaaaaaaaaaaaaaaaaaaaaaaaaaaaaaaaaaaaaaaaugcaucccccccccccccccccccccccccccccccaaaggcucuuuucagagccaccagaauu

SEQ ID NO: 16315 - RNA, 2057 nt, Artificial Sequence
  mRNA product Design d-5 comprising derived and/or modified sequence from HRSV(Memphis-37)__AIY60640.1__F_DSCav1_mut4 (opt1)
gggagagggcgcuuggcuugcaaggacccugagcugcggcauugaagcacacccaacccaacucgacugaagucagccucacugaaccggaucugagaaucuucucucucugggcuugccagggcucuccgaaccuagcuagcauccucuucaauuccaacuagaaagcuuaccauggagcugcccauccucaagaccaacgccaucaccacgauccuggccgcggugacccugugcuucgccagcucccagaacaucaccgaggaguucuaccagagcacgugcuccgccgucagcaagggcuaccucuccgcccugcgcaccgggugguacaccagcgugaucaccaucgagcuguccaacaucaaggagaacaagugcaacggcaccgacgccaaggugaagcucaucaagcaggagcuggacaaguacaagaacgcggucacggagcugcagcuccugaugcagagcaccccggccgccggcuccgggagcgcgaucugcuccggcaucgccgucugcaaggugcugcaccucgagggcgaggugaacaagaucaagaacgcccugcuguccaccaacaaggccgucgugagccucuccaacggggugagcguccugaccuucaaggugcuggaccucaagaacuacaucgacaagcagcugcugcccauccugaacaagcagagcugcuccaucagcaacaucgagaccgucaucgaguuccagcagaagaacaaccgccuccuggagaucacgcgggaguucagcgugaacgcgggcgugaccacccccgucuccaccuacaugcugacgaacagcgagcuccugucccugaucaacgacaugccgaucaccaacgaccagaagaagcucaugagcaacaacgugcagaucgugcgccagcaguccuacagcaucaugugcaucaucaaggaggagguccuggccuacguggugcagcugccccucuacggggucaucgacacccccugcuggaagcugcacaccagcccccugugcacgaccaacaccaaggagggcuccaacaucugccucacccggacggaccgcgggugguacugcgacaacgccggcagcguguccuucuucccgcaggccgagaccugcaagguccagagcaaccggguguucugcgacaccaugaacucccggacccugcccagcgaggugaaccucugcaacaucgacaucuucaaccccaaguacgacugcaagaucaugacguccaagaccgacgucagcuccagcgugaucaccucccugggcgccaucgugagcugcuacgggaagaccaagugcacggcgagcaacaagaaccgcggcaucaucaagaccuucuccaacgggugcgacuacgucagcaacaagggcguggacaccguguccgucggcaacacccuguacugcgugaacaagcaggagggcaagagccucuacgugaagggggagcccaucaucaacuucuacgacccgcuggucuuccccuccgacgaguucgacgccagcaucucccaggugaacgagaagaucaaccagagccuggccuucauccggaaguccgacgagcuccugcacaacgugaacgucggcaagagcaccacgaacaucaugaucaccaccaucaucaucgugaucaucgugauccugcugcuccugaucgccgucgggcuguuccucuacugcaaggcccgcuccacccccgugacgcugagcaaggaccagcuguccgggaucaacaacaucgcguucagcaacugaggacuaguggaagcauuuuccuggcugauuaaaagaaauuacucagcuauggucaucuguuccuguuagaaggcuaugcagcauauuauauacuaugcgcauguuaugaaaugcauaauaaaaaauuuuaaaaaaucuaaaagaucuaaaaaaaaaaaaaaaaaaaaaaaaaaaaaaaaaaaaaaaaaaaaaaaaaaaaaaaaaaaaaaaaugcaucccccccccccccccccccccccccccccccaaaggcucuuuucagagccaccagaauu

SEQ ID NO: 16316 - RNA, 2057 nt, Artificial Sequence
  mRNA product Design d-5 comprising derived and/or modified sequence from HRSV(Memphis-37)__AIY60640.1__F_DSCav1_mut4 (opt1)
gggagagggcgcuuggcuugcaaggacccugagcugcggcauugaagcacacccaacccaacucgacugaagucagccucacugaaccggaucugagaaucuucucucucugggcuugccagggcucuccgaaccuagcuagcauccucuucaauuccaacuagaaagcuuaccauggagcugcccauccucaagaccaacgccaucaccacgauccuggccgcggugacccugugcuucgccagcucccagaacaucaccgaggaguucuaccagagcacgugcuccgccgucagcaagggcuaccucuccgcccugcgcaccgggugguacaccagcgugaucaccaucgagcuguccaacaucaaggagaacaagugcaacggcaccgacgccaaggugaagcucaucaagcaggagcuggacaaguacaagaacgcggucacggagcugcagcuccugaugcagagcaccccggccgccggguccggcagcgccaucugcuccgggaucgcggugugcaaggugcugcaccucgagggcgaggucaacaagaucaagaacgcccugcugagcaccaacaaggccguggugucccucagcaacggcgucuccgugcugaccuucaaggugcuggaccucaagaacuacaucgacaagcagcugcugcccauccucaacaagcagagcugcuccaucagcaacaucgagacggucaucgaguuccagcagaagaacaaccggcugcuggagaucacccgcgaguucuccgugaacgccggggugaccacccccgucagcacguacaugcucaccaacagcgagcugcugucccucaucaacgacaugcccaucaccaacgaccagaagaagcugaugagcaacaacgugcagaucgugcggcagcaguccuacagcaucaugugcaucaucaaggaggagguccuggccuacguggugcagcucccgcuguacggcgucaucgacacccccugcuggaagcugcacacgagcccccucugcaccaccaacaccaaggagggguccaacaucugccugacgcgcaccgaccggggcugguacugcgacaacgcgggguccgugagcuucuucccccaggccgagaccugcaaggugcaguccaaccgcgucuucugcgacaccaugaacagccggacgcucccguccgaggugaaccugugcaacaucgacaucuucaaccccaaguacgacugcaagaucaugaccagcaagaccgacgucuccagcuccgugaucaccagccugggcgccaucguguccugcuacggcaagacgaagugcaccgccagcaacaagaaccgggggaucaucaagaccuucuccaacggcugcgacuacgucagcaacaaggggguggacaccgugagcgucggcaacacgcucuacugcgugaacaagcaggagggcaagucccuguacgugaagggggagcccaucaucaacuucuacgacccccuggucuucccgagcgacgaguucgacgccuccaucagccaggugaacgagaagaucaaccagucccucgcguucauccgcaagagcgacgagcugcugcacaacgugaacgucggcaaguccaccaccaacaucaugaucaccaccaucaucaucgugaucaucgugauccuccugcugcucaucgccgucgggcuguuccuguacugcaaggcccggagcacgcccgugacccuguccaaggaccagcucagcggcaucaacaacaucgccuucuccaacugaggacuaguggaagcauuuuccuggcugauuaaaagaaauuacucagcuauggucaucuguuccuguuagaaggcuaugcagcauauuauauacuaugcgcauguuaugaaaugcauaauaaaaaauuuuaaaaaaucuaaaagaucuaaaaaaaaaaaaaaaaaaaaaaaaaaaaaaaaaaaaaaaaaaaaaaaaaaaaaaaaaaaaaaaaugcaucccccccccccccccccccccccccccccccaaaggcucuuuucagagccaccagaauu

SEQ ID NO: 16317 - RNA, 2057 nt, Artificial Sequence
  mRNA product Design d-5 comprising derived and/or modified sequence from HRSV(Memphis-37)__AIY60640.1__F_DSCav1_mut4 (opt2)
gggagagggcgcuuggcuugcaaggacccugagcugcggcauugaagcacacccaacccaacucgacugaagucagccucacugaaccggaucugagaaucuucucucucugggcuugccagggcucuccgaaccuagcuagcauccucuucaauuccaacuagaaagcuuaccauggagcuccccauccucaagaccaacgccaucaccaccauccucgccgccgucacccucugcuucgccuccucccagaacaucaccgaggaguucuaccaguccaccugcuccgccgucuccaagggcuaccucuccgcccuccgcaccggcugguacaccuccgucaucaccaucgagcucuccaacaucaaggagaacaagugcaacggcaccgacgccaaggucaagcucaucaagcaggagcucgacaaguacaagaacgccgucaccgagcuccagcuccucaugcaguccacccccgccgccggcuccggcuccgccaucugcuccggcaucgccgucugcaagguccuccaccucgagggcgaggucaacaagaucaagaacgcccuccucuccaccaacaaggccgucgucucccucuccaacggcgucuccguccucaccuucaagguccucgaccucaagaacuacaucgacaagcagcuccuccccauccucaacaagcaguccugcuccaucuccaacaucgagaccgucaucgaguuccagcagaagaacaaccgccuccucgagaucacccgcgaguucuccgucaacgccggcgucaccacccccgucuccaccuacaugcucaccaacuccgagcuccucucccucaucaacgacaugcccaucaccaacgaccagaagaagcucauguccaacaacguccagaucguccgccagcaguccuacuccaucaugugcaucaucaaggaggagguccucgccuacgucguccagcucccccucuacggcgucaucgacacccccugcuggaagcuccacaccuccccccucugcaccaccaacaccaaggagggcuccaacaucugccucacccgcaccgaccgcggcugguacugcgacaacgccggcuccgucuccuucuucccccaggccgagaccugcaagguccaguccaaccgcgucuucugcgacaccaugaacucccgcacccuccccuccgaggucaaccucugcaacaucgacaucuucaaccccaaguacgacugcaagaucaugaccuccaagaccgacgucuccuccuccgucaucaccucccucggcgccaucgucuccugcuacggcaagaccaagugcaccgccuccaacaagaaccgcggcaucaucaagaccuucuccaacggcugcgacuacgucuccaacaagggcgucgacaccgucuccgucggcaacacccucuacugcgucaacaagcaggagggcaagucccucuacgucaagggcgagcccaucaucaacuucuacgacccccucgucuuccccuccgacgaguucgacgccuccaucucccaggucaacgagaagaucaaccagucccucgccuucauccgcaaguccgacgagcuccuccacaacgucaacgucggcaaguccaccaccaacaucaugaucaccaccaucaucaucgucaucaucgucauccuccuccuccucaucgccgucggccucuuccucuacugcaaggcccgcuccacccccgucacccucuccaaggaccagcucuccggcaucaacaacaucgccuucuccaacugaggacuaguggaagcauuuuccuggcugauuaaaagaaauuacucagcuauggucaucuguuccuguuagaaggcuaugcagcauauuauauacuaugcgcauguuaugaaaugcauaauaaaaaauuuuaaaaaaucuaaaagaucuaaaaaaaaaaaaaaaaaaaaaaaaaaaaaaaaaaaaaaaaaaaaaaaaaaaaaaaaaaaaaaaaugcaucccccccccccccccccccccccccccccccaaaggcucuuuucagagccaccagaauu

SEQ ID NO: 16318 - RNA, 2057 nt, Artificial Sequence
  mRNA product Design d-5 comprising derived and/or modified sequence from HRSV(Memphis-37)__AIY60640.1__F_DSCav1_mut4 (opt3)
gggagagggcgcuuggcuugcaaggacccugagcugcggcauugaagcacacccaacccaacucgacugaagucagccucacugaaccggaucugagaaucuucucucucugggcuugccagggcucuccgaaccuagcuagcauccucuucaauuccaacuagaaagcuuaccauggagcugcccauccucaagaccaacgccauuacaacuauacuugcugcagugacgcugugcuucgccagcucccagaauaucaccgaagaguuuuaccaaucuacauguucagcggucaguaaaggcuauuugagcgcuuuaagaacugggugguacaccuccguuauuacaaucgaacugucuaacauuaaggagaauaaaugcaacggaaccgacgccaaggugaaacuaaucaagcaggaacucgauaaguauaaaaaugcaguaacugagcugcagcuucugaugcagucgaccccugccgcugguucaggcagcgcaauauguagugggaucgccgugugcaaggucuugcaccucgagggagaagugaacaaaauuaagaaugcucugcuguccacaaacaaagccguugugucucucagcaauggcgucuccguguuaacguucaagguacuggaccuuaagaacuacaucgauaaacaauugcugccaauucuaaauaagcagucauguaguaucagcaacauagagacuguuauugaauuucagcagaaaaauaacaggcuccuggagaucacccgggaguucucugugaaugcgggugucacaacuccgguguccaccuauaugcuuacaaacucagaacuguugagccucauuaacgacaugcccaucaccaaugaucaaaagaaacugaugaguaacaaugugcagaucguccgccagcagucuuacuccauuaugugcauaaucaaggaggaaguuuuagcauaugugguacaacugccucucuacggggugauugacacgccauguuggaaacuucauacuagcccccugugcacaaccaacacuaaggagggaucgaauaucuguuugacacgaaccgaucguggcugguacugcgacaacgccggcucugucuccuuuuucccucaggcugaaacguguaaggugcagucaaauagaguguuuugcgauaccaugaacaguagaacacugccaagcgaggugaaucucugcaacauagacauuuucaaucccaaauaugauuguaagaucaugacuuccaaaaccgacgucucuagcucagugaucacaagucugggggccauuguauccugcuacggaaagacuaaauguaccgcaagcaacaagaauagggguaucauuaagacauuuucuaacggcugcgauuauguuucaaauaaagggguggacaccgucagugugggaaacacucuuuacugugucaacaagcaagagggcaaaagccuguaugugaagggugaaccuauaaucaauuucuacgacccauugguuuuuccguccgaugaguucgacgcuucuauuucgcagguuaacgagaaaaucaaucagagccucgccuuuauccggaaguccgaugaacuguuacacaacguaaaugucgggaagucaacgacaaacauuaugauaaccacuaucauuaucgugauuaucguuauacugcuacuccugaucgcggugggacuuuucuuguauugcaaagcccgcaguacccccgucacacugucuaaggaccagcucagcggcauuaauaacaucgcauucuccaauugaggacuaguggaagcauuuuccuggcugauuaaaagaaauuacucagcuauggucaucuguuccuguuagaaggcuaugcagcauauuauauacuaugcgcauguuaugaaaugcauaauaaaaaauuuuaaaaaaucuaaaagaucuaaaaaaaaaaaaaaaaaaaaaaaaaaaaaaaaaaaaaaaaaaaaaaaaaaaaaaaaaaaaaaaaugcaucccccccccccccccccccccccccccccccaaaggcucuuuucagagccaccagaauu

SEQ ID NO: 16319 - RNA, 2057 nt, Artificial Sequence
  mRNA product Design d-5 comprising derived and/or modified sequence from HRSV(Memphis-37)__AIY60640.1__F_DSCav1_mut4 (opt4)
gggagagggcgcuuggcuugcaaggacccugagcugcggcauugaagcacacccaacccaacucgacugaagucagccucacugaaccggaucugagaaucuucucucucugggcuugccagggcucuccgaaccuagcuagcauccucuucaauuccaacuagaaagcuuaccauggagcugcccauccugaagaccaacgccaucaccaccauccuggccgccgugacccugugcuucgccagcagccagaacaucaccgaggaguucuaccagagcaccugcagcgccgugagcaagggcuaccugagcgcccugagaaccggcugguacaccagcgugaucaccaucgagcugagcaacaucaaggagaacaagugcaacggcaccgacgccaaggugaagcugaucaagcaggagcuggacaaguacaagaacgccgugaccgagcugcagcugcugaugcagagcacccccgccgccggcagcggcagcgccaucugcagcggcaucgccgugugcaaggugcugcaccuggagggcgaggugaacaagaucaagaacgcccugcugagcaccaacaaggccguggugagccugagcaacggcgugagcgugcugaccuucaaggugcuggaccugaagaacuacaucgacaagcagcugcugcccauccugaacaagcagagcugcagcaucagcaacaucgagaccgugaucgaguuccagcagaagaacaacagacugcuggagaucaccagagaguucagcgugaacgccggcgugaccacccccgugagcaccuacaugcugaccaacagcgagcugcugagccugaucaacgacaugcccaucaccaacgaccagaagaagcugaugagcaacaacgugcagaucgugagacagcagagcuacagcaucaugugcaucaucaaggaggaggugcuggccuacguggugcagcugccccuguacggcgugaucgacacccccugcuggaagcugcacaccagcccccugugcaccaccaacaccaaggagggcagcaacaucugccugaccagaaccgacagaggcugguacugcgacaacgccggcagcgugagcuucuucccccaggccgagaccugcaaggugcagagcaacagaguguucugcgacaccaugaacagcagaacccugcccagcgaggugaaccugugcaacaucgacaucuucaaccccaaguacgacugcaagaucaugaccagcaagaccgacgugagcagcagcgugaucaccagccugggcgccaucgugagcugcuacggcaagaccaagugcaccgccagcaacaagaacagaggcaucaucaagaccuucagcaacggcugcgacuacgugagcaacaagggcguggacaccgugagcgugggcaacacccuguacugcgugaacaagcaggagggcaagagccuguacgugaagggcgagcccaucaucaacuucuacgacccccugguguuccccagcgacgaguucgacgccagcaucagccaggugaacgagaagaucaaccagagccuggccuucaucagaaagagcgacgagcugcugcacaacgugaacgugggcaagagcaccaccaacaucaugaucaccaccaucaucaucgugaucaucgugauccugcugcugcugaucgccgugggccuguuccuguacugcaaggccagaagcacccccgugacccugagcaaggaccagcugagcggcaucaacaacaucgccuucagcaacugaggacuaguggaagcauuuuccuggcugauuaaaagaaauuacucagcuauggucaucuguuccuguuagaaggcuaugcagcauauuauauacuaugcgcauguuaugaaaugcauaauaaaaaauuuuaaaaaaucuaaaagaucuaaaaaaaaaaaaaaaaaaaaaaaaaaaaaaaaaaaaaaaaaaaaaaaaaaaaaaaaaaaaaaaaugcaucccccccccccccccccccccccccccccccaaaggcucuuuucagagccaccagaauu

SEQ ID NO: 16320 - RNA, 2057 nt, Artificial Sequence
  mRNA product Design d-5 comprising derived and/or modified sequence from HRSV(Memphis-37)__AIY60640.1__F_DSCav1_mut4 (opt5)
gggagagggcgcuuggcuugcaaggacccugagcugcggcauugaagcacacccaacccaacucgacugaagucagccucacugaaccggaucugagaaucuucucucucugggcuugccagggcucuccgaaccuagcuagcauccucuucaauuccaacuagaaagcuuaccauggagcugcccauccucaagaccaacgccauuacaacgauccuggcugccgugacccuuugcuucgcgagcucccagaauauuacagaagaguuuuaccaaucuaccuguagcgcugucuccaaaggcuaucugucugcccucagaacagggugguacaccagcguuaucacaauugaacuguccaacaucaaggagaauaaaugcaacggaaccgacgccaaggugaaacuuaucaagcaggaacuggauaaguauaaaaaugcugugacggagcuccagcugcugaugcagucuaccccugccgcuggcagcggguccgccauuuguagcggaaucgcggucugcaaggugcuccaccuggagggcgaaguuaacaaaauuaagaaugcccuucugucuacaaacaaagcuguggucucccucagcaauggggugucuguucugaccuucaaggugcuugaccugaagaacuacaucgauaaacaacuccugccgauucugaauaagcaguccuguagcaucucuaacauugagacagucaucgaauuucagcagaaaaauaaccggcuccuggagaucacccgcgaguucuccgugaaugccggagugacgacacccgucagcaccuauaugcuuacaaacuccgaacugcucucucugauuaacgacaugccuaucaccaaugaucaaaagaaacuuaugagcaacaauguucagauugugagacagcaguccuacagcaucaugugcauuaucaaggaggaagugcuggcuuaugucgugcaacucccccuguacggcguuaucgacaccccuuguuggaaacugcauacaucuccccucugcacgaccaacacaaaggagggcuccaauauuugucugacccggacagaucgcgggugguacugcgacaacgccggaagcgugagcuuuuucccucaggcggaaaccuguaagguccagucuaauagaguguuuugcgauacgaugaacuccagaacacugccgucugagguuaaucucugcaacaucgacauuuucaaucccaaauaugauuguaagaucaugaccagcaaaaccgacguguccagcucugucauuacaucccugggcgccaucgugagcugcuacgggaagaccaaauguacagcuucuaacaagaaucggggaaucauuaagacguuuuccaacggcugcgauuaugucagcaauaaagggguggacaccguuuccgugggaaacacacuuuacugugucaacaagcaagagggcaaaucucuguaugugaagggcgaaccuaucauuaauuucuacgacccccucguuuuuccuagcgaugaguucgacgccuccaucucucaggugaacgaaaagauuaaucagagccuggcuuuuauccgcaaguccgaugagcugcuccacaacgucaauguggggaaaagcaccacaaacauuaugaucaccacgaucauuaucgugauuaucguuauucugcuucugcucaucgccgucggacuguuccuguauugcaaagccagaucuacccccgugacacuuuccaaggaccagcucagcggcaucaauaacauugcuuucucuaauugaggacuaguggaagcauuuuccuggcugauuaaaagaaauuacucagcuauggucaucuguuccuguuagaaggcuaugcagcauauuauauacuaugcgcauguuaugaaaugcauaauaaaaaauuuuaaaaaaucuaaaagaucuaaaaaaaaaaaaaaaaaaaaaaaaaaaaaaaaaaaaaaaaaaaaaaaaaaaaaaaaaaaaaaaaugcaucccccccccccccccccccccccccccccccaaaggcucuuuucagagccaccagaauu

SEQ ID NO: 16321 - RNA, 2057 nt, Artificial Sequence
  mRNA product Design d-5 comprising derived and/or modified sequence from HRSV(Memphis-37)__AIY60640.1__F_DSCav1_mut4 (opt6)
gggagagggcgcuuggcuugcaaggacccugagcugcggcauugaagcacacccaacccaacucgacugaagucagccucacugaaccggaucugagaaucuucucucucugggcuugccagggcucuccgaaccuagcuagcauccucuucaauuccaacuagaaagcuuaccauggaacucccaauccuaaaaacaaacgcaauaacaacaauauuagcagccguaacacucuguuucgccucaucccaaaacauaacagaagaauuuuaucaaucuacauguuccgccgucaguaaaggauaucuaucagccuuaagaacaggcugguacacaucaguaaucaccauagaauuauccaacauaaaagaaaacaaaugcaauggcacagaugccaaaguaaaacuaaucaaacaagaacuugauaaauauaaaaacgcaguaacagaauuacaauuauuaaugcaaagcacaccagccgcaggaucaggaucagcaauauguucaggaauagcagucuguaaaguacuacacuuagaaggagaaguaaacaaaauuaaaaacgcauuacuaagcaccaauaaagcaguaguaucacuaucaaacggcguauccguauuaacguucaaaguccucgaccugaaaaacuacauagauaaacaacuacuaccaauacuaaauaaacaaucaugcucaauaucaaacauagaaacuguuaucgaauuucaacagaaaaauaaccgacuacuagaaaucaccagagaauuuucaguaaacgcaggcgucacuacaccaguauccacauacaugcuaaccaacucggaauuacuuucccucauaaacgacaugccaauaacaaacgaccaaaagaaacuuaugucaaacaacguucaaauaguccgccaacaaucauacucaauaauguguaucauaaaagaagaaguccuagcauaugucguacaacuaccauuauacggaguaauugacacaccuugcuggaaacuacacacauccccacuauguacaacaaacacuaaagaaggaucaaacaucugccuaaccagaacagacagaggcugguauugcgacaacgcaggaucaguaucauucuucccacaagcagaaacaugcaaaguacaaucaaacagagucuucugcgacaccaugaacagcagaacccucccauccgaaguaaacuuaugcaacaucgauaucuucaacccaaaauacgacuguaaaauaaugacaucaaaaacagacguuucauccucaguaauaacaucauuaggugccauaguuucauguuacggaaaaaccaaauguaccgcaucaaacaaaaacagaggcauuauuaaaacauucucuaacggaugcgacuaugucaguaacaaaggaguagacacaguaucagucggaaacacauuauauugcguaaauaaacaagaaggaaaaagucuauacguaaaaggagaaccaauaauaaacuuuuacgacccucucguauucccaucagacgaauuugaugcauccauaucacaagucaacgaaaagauaaaccaaucccuagcauucauaagaaaaucagacgaacuacuccauaacguaaacguaggaaaaagcacaaccaauauaaugauaaccacaauaaucauaguaauaauagucauauuauuacuuuuaauugcaguaggacucuuucuauacugcaaagcaagaagcacaccaguaacacuaagcaaagaccaacuaucaggcaucaacaauaucgccuuuucaaauuaaggacuaguggaagcauuuuccuggcugauuaaaagaaauuacucagcuauggucaucuguuccuguuagaaggcuaugcagcauauuauauacuaugcgcauguuaugaaaugcauaauaaaaaauuuuaaaaaaucuaaaagaucuaaaaaaaaaaaaaaaaaaaaaaaaaaaaaaaaaaaaaaaaaaaaaaaaaaaaaaaaaaaaaaaaugcaucccccccccccccccccccccccccccccccaaaggcucuuuucagagccaccagaauu

SEQ ID NO: 16322 - RNA, 2057 nt, Artificial Sequence
  mRNA product Design d-5 comprising derived and/or modified sequence from HRSV(Memphis-37)__AIY60640.1__F_DSCav1_mut4 (opt11)
gggagagggcgcuuggcuugcaaggacccugagcugcggcauugaagcacacccaacccaacucgacugaagucagccucacugaaccggaucugagaaucuucucucucugggcuugccagggcucuccgaaccuagcuagcauccucuucaauuccaacuagaaagcuuaccauggagcugcccauccucaagaccaacgccaucaccacgauccuggccgcggugacccugugcuucgcgagcucccagaacaucaccgaggaguucuaccagagcacgugcuccgccgucagcaagggcuaccucuccgcccugcgcaccgggugguacaccagcgugaucaccaucgagcuguccaacaucaaggagaacaagugcaacggcaccgacgccaaggugaaacucaucaagcaggagcuggacaaguacaagaacgccgucaccgagcugcagcuccugaugcagagcaccccggccgccggguccggcagcgcuaucugcuccgggaucgcggugugcaaggugcugcaccucgagggcgaggucaacaagaucaagaaugcccugcugagcaccaacaaggccguggugucccucagcaacggagucagcgugcuuaccuucaaggugcuggaccucaagaacuacaucgacaagcagcugcugccuauccucaacaagcagagcugcuccaucagcaacaucgagacggucaucgaguuccagcagaagaacaaccggcugcuggagaucacccgcgaguucuccgugaacgccggggugaccacccccgucagcacguacaugcucaccaacagcgaacugcugucccucaucaacgacaugcccaucaccaacgaccagaagaagcugaugagcaacaacgugcagaucgugcggcagcaguccuacagcaucaugugcaucaucaaggaggaaguccuggccuacguggugcagcucccucuguacggcgucaucgacacccccugcuggaagcugcacacgagcccccucugcaccaccaacaccaaggagggguccaacaucugccugacgcgcaccgaccggggcugguacugcgacaacgcgggguccgugagcuucuucccccaggccgagaccugcaaggugcagagcaaccgcgucuucugcgacacuaugaacagcagaacgcucccguccgaggugaaccugugcaacauagacauauucaaccccaaguacgacugcaagaucaugaccagcaagaccgacgucuccagcuccgugauuaccagccugggcgcaaucguguccugcuacggcaagacgaagugcaccgccagcaacaagaaccgggggaucaucaagaccuucuccaacggcugcgacuaugucagcaacaaggggguggacaccgugagcgucggaaacacgcucuacugcgugaacaagcaagagggcaaguccuuauacgugaagggggagcccaucaucaacuucuacgacccccuggucuucccgagcgacgaguucgacgccagcauaagccaggugaacgagaagaucaaccagucccucgcguucauccgcaagagcgacgagcugcugcacaacgugaacgucggcaaguccaccaccaacaucaugaucaccaccaucaucaucgugaucaucgugauccuccugcugcucaucgccgucgggcuguuccuguacugcaaggcccggagcacgcccgugaccuuguccaaggaccagcucagcggcaucaacaacaucgccuucuccaacugaggacuaguggaagcauuuuccuggcugauuaaaagaaauuacucagcuauggucaucuguuccuguuagaaggcuaugcagcauauuauauacuaugcgcauguuaugaaaugcauaauaaaaaauuuuaaaaaaucuaaaagaucuaaaaaaaaaaaaaaaaaaaaaaaaaaaaaaaaaaaaaaaaaaaaaaaaaaaaaaaaaaaaaaaaugcaucccccccccccccccccccccccccccccccaaaggcucuuuucagagccaccagaauu

SEQ ID NO: 16323 - RNA, 1937 nt, Artificial Sequence
  mRNA product Design e-1 comprising derived and/or modified sequence from HRSV(Memphis-37)__AIY60640.1__F_DSCav1_mut4 (opt1)
gggagaauauaagcguuggcggagcgucgguuguagcacucugcgcgcccgcucuucugcugcuguuugucuacuuccuccugcuuccccgccgccgccgccgccaucaagcuuaccauggagcugcccauccucaagaccaacgccaucaccacgauccuggccgcggugacccugugcuucgccagcucccagaacaucaccgaggaguucuaccagagcacgugcuccgccgucagcaagggcuaccucuccgcccugcgcaccgggugguacaccagcgugaucaccaucgagcuguccaacaucaaggagaacaagugcaacggcaccgacgccaaggugaagcucaucaagcaggagcuggacaaguacaagaacgcggucacggagcugcagcuccugaugcagagcaccccggccgccggcuccgggagcgcgaucugcuccggcaucgccgucugcaaggugcugcaccucgagggcgaggugaacaagaucaagaacgcccugcuguccaccaacaaggccgucgugagccucuccaacggggugagcguccugaccuucaaggugcuggaccucaagaacuacaucgacaagcagcugcugcccauccugaacaagcagagcugcuccaucagcaacaucgagaccgucaucgaguuccagcagaagaacaaccgccuccuggagaucacgcgggaguucagcgugaacgcgggcgugaccacccccgucuccaccuacaugcugacgaacagcgagcuccugucccugaucaacgacaugccgaucaccaacgaccagaagaagcucaugagcaacaacgugcagaucgugcgccagcaguccuacagcaucaugugcaucaucaaggaggagguccuggccuacguggugcagcugccccucuacggggucaucgacacccccugcuggaagcugcacaccagcccccugugcacgaccaacaccaaggagggcuccaacaucugccucacccggacggaccgcgggugguacugcgacaacgccggcagcguguccuucuucccgcaggccgagaccugcaagguccagagcaaccggguguucugcgacaccaugaacucccggacccugcccagcgaggugaaccucugcaacaucgacaucuucaaccccaaguacgacugcaagaucaugacguccaagaccgacgucagcuccagcgugaucaccucccugggcgccaucgugagcugcuacgggaagaccaagugcacggcgagcaacaagaaccgcggcaucaucaagaccuucuccaacgggugcgacuacgucagcaacaagggcguggacaccguguccgucggcaacacccuguacugcgugaacaagcaggagggcaagagccucuacgugaagggggagcccaucaucaacuucuacgacccgcuggucuuccccuccgacgaguucgacgccagcaucucccaggugaacgagaagaucaaccagagccuggccuucauccggaaguccgacgagcuccugcacaacgugaacgucggcaagagcaccacgaacaucaugaucaccaccaucaucaucgugaucaucgugauccugcugcuccugaucgccgucgggcuguuccucuacugcaaggcccgcuccacccccgugacgcugagcaaggaccagcuguccgggaucaacaacaucgcguucagcaacugaggacuaguguccaccugucccuccugggcugcuggauugucucguuuuccugccaaauaaacaggaucagcgcuuuacagaucuaaaaaaaaaaaaaaaaaaaaaaaaaaaaaaaaaaaaaaaaaaaaaaaaaaaaaaaaaaaaaaaaugcaucccccccccccccccccccccccccccccccaaaggcucuuuucagagccaccagaauu

SEQ ID NO: 16324 - RNA, 1937 nt, Artificial Sequence
  mRNA product Design e-1 comprising derived and/or modified sequence from HRSV(Memphis-37)__AIY60640.1__F_DSCav1_mut4 (opt1)
gggagaauauaagcguuggcggagcgucgguuguagcacucugcgcgcccgcucuucugcugcuguuugucuacuuccuccugcuuccccgccgccgccgccgccaucaagcuuaccauggagcugcccauccucaagaccaacgccaucaccacgauccuggccgcggugacccugugcuucgccagcucccagaacaucaccgaggaguucuaccagagcacgugcuccgccgucagcaagggcuaccucuccgcccugcgcaccgggugguacaccagcgugaucaccaucgagcuguccaacaucaaggagaacaagugcaacggcaccgacgccaaggugaagcucaucaagcaggagcuggacaaguacaagaacgcggucacggagcugcagcuccugaugcagagcaccccggccgccggguccggcagcgccaucugcuccgggaucgcggugugcaaggugcugcaccucgagggcgaggucaacaagaucaagaacgcccugcugagcaccaacaaggccguggugucccucagcaacggcgucuccgugcugaccuucaaggugcuggaccucaagaacuacaucgacaagcagcugcugcccauccucaacaagcagagcugcuccaucagcaacaucgagacggucaucgaguuccagcagaagaacaaccggcugcuggagaucacccgcgaguucuccgugaacgccggggugaccacccccgucagcacguacaugcucaccaacagcgagcugcugucccucaucaacgacaugcccaucaccaacgaccagaagaagcugaugagcaacaacgugcagaucgugcggcagcaguccuacagcaucaugugcaucaucaaggaggagguccuggccuacguggugcagcucccgcuguacggcgucaucgacacccccugcuggaagcugcacacgagcccccucugcaccaccaacaccaaggagggguccaacaucugccugacgcgcaccgaccggggcugguacugcgacaacgcgggguccgugagcuucuucccccaggccgagaccugcaaggugcaguccaaccgcgucuucugcgacaccaugaacagccggacgcucccguccgaggugaaccugugcaacaucgacaucuucaaccccaaguacgacugcaagaucaugaccagcaagaccgacgucuccagcuccgugaucaccagccugggcgccaucguguccugcuacggcaagacgaagugcaccgccagcaacaagaaccgggggaucaucaagaccuucuccaacggcugcgacuacgucagcaacaaggggguggacaccgugagcgucggcaacacgcucuacugcgugaacaagcaggagggcaagucccuguacgugaagggggagcccaucaucaacuucuacgacccccuggucuucccgagcgacgaguucgacgccuccaucagccaggugaacgagaagaucaaccagucccucgcguucauccgcaagagcgacgagcugcugcacaacgugaacgucggcaaguccaccaccaacaucaugaucaccaccaucaucaucgugaucaucgugauccuccugcugcucaucgccgucgggcuguuccuguacugcaaggcccggagcacgcccgugacccuguccaaggaccagcucagcggcaucaacaacaucgccuucuccaacugaggacuaguguccaccugucccuccugggcugcuggauugucucguuuuccugccaaauaaacaggaucagcgcuuuacagaucuaaaaaaaaaaaaaaaaaaaaaaaaaaaaaaaaaaaaaaaaaaaaaaaaaaaaaaaaaaaaaaaaugcaucccccccccccccccccccccccccccccccaaaggcucuuuucagagccaccagaauu

SEQ ID NO: 16325 - RNA, 1937 nt, Artificial Sequence
  mRNA product Design e-1 comprising derived and/or modified sequence from HRSV(Memphis-37)__AIY60640.1__F_DSCav1_mut4 (opt2)
gggagaauauaagcguuggcggagcgucgguuguagcacucugcgcgcccgcucuucugcugcuguuugucuacuuccuccugcuuccccgccgccgccgccgccaucaagcuuaccauggagcuccccauccucaagaccaacgccaucaccaccauccucgccgccgucacccucugcuucgccuccucccagaacaucaccgaggaguucuaccaguccaccugcuccgccgucuccaagggcuaccucuccgcccuccgcaccggcugguacaccuccgucaucaccaucgagcucuccaacaucaaggagaacaagugcaacggcaccgacgccaaggucaagcucaucaagcaggagcucgacaaguacaagaacgccgucaccgagcuccagcuccucaugcaguccacccccgccgccggcuccggcuccgccaucugcuccggcaucgccgucugcaagguccuccaccucgagggcgaggucaacaagaucaagaacgcccuccucuccaccaacaaggccgucgucucccucuccaacggcgucuccguccucaccuucaagguccucgaccucaagaacuacaucgacaagcagcuccuccccauccucaacaagcaguccugcuccaucuccaacaucgagaccgucaucgaguuccagcagaagaacaaccgccuccucgagaucacccgcgaguucuccgucaacgccggcgucaccacccccgucuccaccuacaugcucaccaacuccgagcuccucucccucaucaacgacaugcccaucaccaacgaccagaagaagcucauguccaacaacguccagaucguccgccagcaguccuacuccaucaugugcaucaucaaggaggagguccucgccuacgucguccagcucccccucuacggcgucaucgacacccccugcuggaagcuccacaccuccccccucugcaccaccaacaccaaggagggcuccaacaucugccucacccgcaccgaccgcggcugguacugcgacaacgccggcuccgucuccuucuucccccaggccgagaccugcaagguccaguccaaccgcgucuucugcgacaccaugaacucccgcacccuccccuccgaggucaaccucugcaacaucgacaucuucaaccccaaguacgacugcaagaucaugaccuccaagaccgacgucuccuccuccgucaucaccucccucggcgccaucgucuccugcuacggcaagaccaagugcaccgccuccaacaagaaccgcggcaucaucaagaccuucuccaacggcugcgacuacgucuccaacaagggcgucgacaccgucuccgucggcaacacccucuacugcgucaacaagcaggagggcaagucccucuacgucaagggcgagcccaucaucaacuucuacgacccccucgucuuccccuccgacgaguucgacgccuccaucucccaggucaacgagaagaucaaccagucccucgccuucauccgcaaguccgacgagcuccuccacaacgucaacgucggcaaguccaccaccaacaucaugaucaccaccaucaucaucgucaucaucgucauccuccuccuccucaucgccgucggccucuuccucuacugcaaggcccgcuccacccccgucacccucuccaaggaccagcucuccggcaucaacaacaucgccuucuccaacugaggacuaguguccaccugucccuccugggcugcuggauugucucguuuuccugccaaauaaacaggaucagcgcuuuacagaucuaaaaaaaaaaaaaaaaaaaaaaaaaaaaaaaaaaaaaaaaaaaaaaaaaaaaaaaaaaaaaaaaugcaucccccccccccccccccccccccccccccccaaaggcucuuuucagagccaccagaauu

SEQ ID NO: 16326 - RNA, 1937 nt, Artificial Sequence
  mRNA product Design e-1 comprising derived and/or modified sequence from HRSV(Memphis-37)__AIY60640.1__F_DSCav1_mut4 (opt3)
gggagaauauaagcguuggcggagcgucgguuguagcacucugcgcgcccgcucuucugcugcuguuugucuacuuccuccugcuuccccgccgccgccgccgccaucaagcuuaccauggagcugcccauccucaagaccaacgccauuacaacuauacuugcugcagugacgcugugcuucgccagcucccagaauaucaccgaagaguuuuaccaaucuacauguucagcggucaguaaaggcuauuugagcgcuuuaagaacugggugguacaccuccguuauuacaaucgaacugucuaacauuaaggagaauaaaugcaacggaaccgacgccaaggugaaacuaaucaagcaggaacucgauaaguauaaaaaugcaguaacugagcugcagcuucugaugcagucgaccccugccgcugguucaggcagcgcaauauguagugggaucgccgugugcaaggucuugcaccucgagggagaagugaacaaaauuaagaaugcucugcuguccacaaacaaagccguugugucucucagcaauggcgucuccguguuaacguucaagguacuggaccuuaagaacuacaucgauaaacaauugcugccaauucuaaauaagcagucauguaguaucagcaacauagagacuguuauugaauuucagcagaaaaauaacaggcuccuggagaucacccgggaguucucugugaaugcgggugucacaacuccgguguccaccuauaugcuuacaaacucagaacuguugagccucauuaacgacaugcccaucaccaaugaucaaaagaaacugaugaguaacaaugugcagaucguccgccagcagucuuacuccauuaugugcauaaucaaggaggaaguuuuagcauaugugguacaacugccucucuacggggugauugacacgccauguuggaaacuucauacuagcccccugugcacaaccaacacuaaggagggaucgaauaucuguuugacacgaaccgaucguggcugguacugcgacaacgccggcucugucuccuuuuucccucaggcugaaacguguaaggugcagucaaauagaguguuuugcgauaccaugaacaguagaacacugccaagcgaggugaaucucugcaacauagacauuuucaaucccaaauaugauuguaagaucaugacuuccaaaaccgacgucucuagcucagugaucacaagucugggggccauuguauccugcuacggaaagacuaaauguaccgcaagcaacaagaauagggguaucauuaagacauuuucuaacggcugcgauuauguuucaaauaaagggguggacaccgucagugugggaaacacucuuuacugugucaacaagcaagagggcaaaagccuguaugugaagggugaaccuauaaucaauuucuacgacccauugguuuuuccguccgaugaguucgacgcuucuauuucgcagguuaacgagaaaaucaaucagagccucgccuuuauccggaaguccgaugaacuguuacacaacguaaaugucgggaagucaacgacaaacauuaugauaaccacuaucauuaucgugauuaucguuauacugcuacuccugaucgcggugggacuuuucuuguauugcaaagcccgcaguacccccgucacacugucuaaggaccagcucagcggcauuaauaacaucgcauucuccaauugaggacuaguguccaccugucccuccugggcugcuggauugucucguuuuccugccaaauaaacaggaucagcgcuuuacagaucuaaaaaaaaaaaaaaaaaaaaaaaaaaaaaaaaaaaaaaaaaaaaaaaaaaaaaaaaaaaaaaaaugcaucccccccccccccccccccccccccccccccaaaggcucuuuucagagccaccagaauu

SEQ ID NO: 16327 - RNA, 1937 nt, Artificial Sequence
  mRNA product Design e-1 comprising derived and/or modified sequence from HRSV(Memphis-37)__AIY60640.1__F_DSCav1_mut4 (opt4)
gggagaauauaagcguuggcggagcgucgguuguagcacucugcgcgcccgcucuucugcugcuguuugucuacuuccuccugcuuccccgccgccgccgccgccaucaagcuuaccauggagcugcccauccugaagaccaacgccaucaccaccauccuggccgccgugacccugugcuucgccagcagccagaacaucaccgaggaguucuaccagagcaccugcagcgccgugagcaagggcuaccugagcgcccugagaaccggcugguacaccagcgugaucaccaucgagcugagcaacaucaaggagaacaagugcaacggcaccgacgccaaggugaagcugaucaagcaggagcuggacaaguacaagaacgccgugaccgagcugcagcugcugaugcagagcacccccgccgccggcagcggcagcgccaucugcagcggcaucgccgugugcaaggugcugcaccuggagggcgaggugaacaagaucaagaacgcccugcugagcaccaacaaggccguggugagccugagcaacggcgugagcgugcugaccuucaaggugcuggaccugaagaacuacaucgacaagcagcugcugcccauccugaacaagcagagcugcagcaucagcaacaucgagaccgugaucgaguuccagcagaagaacaacagacugcuggagaucaccagagaguucagcgugaacgccggcgugaccacccccgugagcaccuacaugcugaccaacagcgagcugcugagccugaucaacgacaugcccaucaccaacgaccagaagaagcugaugagcaacaacgugcagaucgugagacagcagagcuacagcaucaugugcaucaucaaggaggaggugcuggccuacguggugcagcugccccuguacggcgugaucgacacccccugcuggaagcugcacaccagcccccugugcaccaccaacaccaaggagggcagcaacaucugccugaccagaaccgacagaggcugguacugcgacaacgccggcagcgugagcuucuucccccaggccgagaccugcaaggugcagagcaacagaguguucugcgacaccaugaacagcagaacccugcccagcgaggugaaccugugcaacaucgacaucuucaaccccaaguacgacugcaagaucaugaccagcaagaccgacgugagcagcagcgugaucaccagccugggcgccaucgugagcugcuacggcaagaccaagugcaccgccagcaacaagaacagaggcaucaucaagaccuucagcaacggcugcgacuacgugagcaacaagggcguggacaccgugagcgugggcaacacccuguacugcgugaacaagcaggagggcaagagccuguacgugaagggcgagcccaucaucaacuucuacgacccccugguguuccccagcgacgaguucgacgccagcaucagccaggugaacgagaagaucaaccagagccuggccuucaucagaaagagcgacgagcugcugcacaacgugaacgugggcaagagcaccaccaacaucaugaucaccaccaucaucaucgugaucaucgugauccugcugcugcugaucgccgugggccuguuccuguacugcaaggccagaagcacccccgugacccugagcaaggaccagcugagcggcaucaacaacaucgccuucagcaacugaggacuaguguccaccugucccuccugggcugcuggauugucucguuuuccugccaaauaaacaggaucagcgcuuuacagaucuaaaaaaaaaaaaaaaaaaaaaaaaaaaaaaaaaaaaaaaaaaaaaaaaaaaaaaaaaaaaaaaaugcaucccccccccccccccccccccccccccccccaaaggcucuuuucagagccaccagaauu

SEQ ID NO: 16328 - RNA, 1937 nt, Artificial Sequence
  mRNA product Design e-1 comprising derived and/or modified sequence from HRSV(Memphis-37)__AIY60640.1__F_DSCav1_mut4 (opt5)
gggagaauauaagcguuggcggagcgucgguuguagcacucugcgcgcccgcucuucugcugcuguuugucuacuuccuccugcuuccccgccgccgccgccgccaucaagcuuaccauggagcugcccauccucaagaccaacgccauuacaacgauccuggcugccgugacccuuugcuucgcgagcucccagaauauuacagaagaguuuuaccaaucuaccuguagcgcugucuccaaaggcuaucugucugcccucagaacagggugguacaccagcguuaucacaauugaacuguccaacaucaaggagaauaaaugcaacggaaccgacgccaaggugaaacuuaucaagcaggaacuggauaaguauaaaaaugcugugacggagcuccagcugcugaugcagucuaccccugccgcuggcagcggguccgccauuuguagcggaaucgcggucugcaaggugcuccaccuggagggcgaaguuaacaaaauuaagaaugcccuucugucuacaaacaaagcuguggucucccucagcaauggggugucuguucugaccuucaaggugcuugaccugaagaacuacaucgauaaacaacuccugccgauucugaauaagcaguccuguagcaucucuaacauugagacagucaucgaauuucagcagaaaaauaaccggcuccuggagaucacccgcgaguucuccgugaaugccggagugacgacacccgucagcaccuauaugcuuacaaacuccgaacugcucucucugauuaacgacaugccuaucaccaaugaucaaaagaaacuuaugagcaacaauguucagauugugagacagcaguccuacagcaucaugugcauuaucaaggaggaagugcuggcuuaugucgugcaacucccccuguacggcguuaucgacaccccuuguuggaaacugcauacaucuccccucugcacgaccaacacaaaggagggcuccaauauuugucugacccggacagaucgcgggugguacugcgacaacgccggaagcgugagcuuuuucccucaggcggaaaccuguaagguccagucuaauagaguguuuugcgauacgaugaacuccagaacacugccgucugagguuaaucucugcaacaucgacauuuucaaucccaaauaugauuguaagaucaugaccagcaaaaccgacguguccagcucugucauuacaucccugggcgccaucgugagcugcuacgggaagaccaaauguacagcuucuaacaagaaucggggaaucauuaagacguuuuccaacggcugcgauuaugucagcaauaaagggguggacaccguuuccgugggaaacacacuuuacugugucaacaagcaagagggcaaaucucuguaugugaagggcgaaccuaucauuaauuucuacgacccccucguuuuuccuagcgaugaguucgacgccuccaucucucaggugaacgaaaagauuaaucagagccuggcuuuuauccgcaaguccgaugagcugcuccacaacgucaauguggggaaaagcaccacaaacauuaugaucaccacgaucauuaucgugauuaucguuauucugcuucugcucaucgccgucggacuguuccuguauugcaaagccagaucuacccccgugacacuuuccaaggaccagcucagcggcaucaauaacauugcuuucucuaauugaggacuaguguccaccugucccuccugggcugcuggauugucucguuuuccugccaaauaaacaggaucagcgcuuuacagaucuaaaaaaaaaaaaaaaaaaaaaaaaaaaaaaaaaaaaaaaaaaaaaaaaaaaaaaaaaaaaaaaaugcaucccccccccccccccccccccccccccccccaaaggcucuuuucagagccaccagaauu

SEQ ID NO: 16329 - RNA, 1937 nt, Artificial Sequence
  mRNA product Design e-1 comprising derived and/or modified sequence from HRSV(Memphis-37)__AIY60640.1__F_DSCav1_mut4 (opt6)
gggagaauauaagcguuggcggagcgucgguuguagcacucugcgcgcccgcucuucugcugcuguuugucuacuuccuccugcuuccccgccgccgccgccgccaucaagcuuaccauggaacucccaauccuaaaaacaaacgcaauaacaacaauauuagcagccguaacacucuguuucgccucaucccaaaacauaacagaagaauuuuaucaaucuacauguuccgccgucaguaaaggauaucuaucagccuuaagaacaggcugguacacaucaguaaucaccauagaauuauccaacauaaaagaaaacaaaugcaauggcacagaugccaaaguaaaacuaaucaaacaagaacuugauaaauauaaaaacgcaguaacagaauuacaauuauuaaugcaaagcacaccagccgcaggaucaggaucagcaauauguucaggaauagcagucuguaaaguacuacacuuagaaggagaaguaaacaaaauuaaaaacgcauuacuaagcaccaauaaagcaguaguaucacuaucaaacggcguauccguauuaacguucaaaguccucgaccugaaaaacuacauagauaaacaacuacuaccaauacuaaauaaacaaucaugcucaauaucaaacauagaaacuguuaucgaauuucaacagaaaaauaaccgacuacuagaaaucaccagagaauuuucaguaaacgcaggcgucacuacaccaguauccacauacaugcuaaccaacucggaauuacuuucccucauaaacgacaugccaauaacaaacgaccaaaagaaacuuaugucaaacaacguucaaauaguccgccaacaaucauacucaauaauguguaucauaaaagaagaaguccuagcauaugucguacaacuaccauuauacggaguaauugacacaccuugcuggaaacuacacacauccccacuauguacaacaaacacuaaagaaggaucaaacaucugccuaaccagaacagacagaggcugguauugcgacaacgcaggaucaguaucauucuucccacaagcagaaacaugcaaaguacaaucaaacagagucuucugcgacaccaugaacagcagaacccucccauccgaaguaaacuuaugcaacaucgauaucuucaacccaaaauacgacuguaaaauaaugacaucaaaaacagacguuucauccucaguaauaacaucauuaggugccauaguuucauguuacggaaaaaccaaauguaccgcaucaaacaaaaacagaggcauuauuaaaacauucucuaacggaugcgacuaugucaguaacaaaggaguagacacaguaucagucggaaacacauuauauugcguaaauaaacaagaaggaaaaagucuauacguaaaaggagaaccaauaauaaacuuuuacgacccucucguauucccaucagacgaauuugaugcauccauaucacaagucaacgaaaagauaaaccaaucccuagcauucauaagaaaaucagacgaacuacuccauaacguaaacguaggaaaaagcacaaccaauauaaugauaaccacaauaaucauaguaauaauagucauauuauuacuuuuaauugcaguaggacucuuucuauacugcaaagcaagaagcacaccaguaacacuaagcaaagaccaacuaucaggcaucaacaauaucgccuuuucaaauuaaggacuaguguccaccugucccuccugggcugcuggauugucucguuuuccugccaaauaaacaggaucagcgcuuuacagaucuaaaaaaaaaaaaaaaaaaaaaaaaaaaaaaaaaaaaaaaaaaaaaaaaaaaaaaaaaaaaaaaaugcaucccccccccccccccccccccccccccccccaaaggcucuuuucagagccaccagaauu

SEQ ID NO: 16330 - RNA, 1937 nt, Artificial Sequence
  mRNA product Design e-1 comprising derived and/or modified sequence from HRSV(Memphis-37)__AIY60640.1__F_DSCav1_mut4 (opt11)
gggagaauauaagcguuggcggagcgucgguuguagcacucugcgcgcccgcucuucugcugcuguuugucuacuuccuccugcuuccccgccgccgccgccgccaucaagcuuaccauggagcugcccauccucaagaccaacgccaucaccacgauccuggccgcggugacccugugcuucgcgagcucccagaacaucaccgaggaguucuaccagagcacgugcuccgccgucagcaagggcuaccucuccgcccugcgcaccgggugguacaccagcgugaucaccaucgagcuguccaacaucaaggagaacaagugcaacggcaccgacgccaaggugaaacucaucaagcaggagcuggacaaguacaagaacgccgucaccgagcugcagcuccugaugcagagcaccccggccgccggguccggcagcgcuaucugcuccgggaucgcggugugcaaggugcugcaccucgagggcgaggucaacaagaucaagaaugcccugcugagcaccaacaaggccguggugucccucagcaacggagucagcgugcuuaccuucaaggugcuggaccucaagaacuacaucgacaagcagcugcugccuauccucaacaagcagagcugcuccaucagcaacaucgagacggucaucgaguuccagcagaagaacaaccggcugcuggagaucacccgcgaguucuccgugaacgccggggugaccacccccgucagcacguacaugcucaccaacagcgaacugcugucccucaucaacgacaugcccaucaccaacgaccagaagaagcugaugagcaacaacgugcagaucgugcggcagcaguccuacagcaucaugugcaucaucaaggaggaaguccuggccuacguggugcagcucccucuguacggcgucaucgacacccccugcuggaagcugcacacgagcccccucugcaccaccaacaccaaggagggguccaacaucugccugacgcgcaccgaccggggcugguacugcgacaacgcgggguccgugagcuucuucccccaggccgagaccugcaaggugcagagcaaccgcgucuucugcgacacuaugaacagcagaacgcucccguccgaggugaaccugugcaacauagacauauucaaccccaaguacgacugcaagaucaugaccagcaagaccgacgucuccagcuccgugauuaccagccugggcgcaaucguguccugcuacggcaagacgaagugcaccgccagcaacaagaaccgggggaucaucaagaccuucuccaacggcugcgacuaugucagcaacaaggggguggacaccgugagcgucggaaacacgcucuacugcgugaacaagcaagagggcaaguccuuauacgugaagggggagcccaucaucaacuucuacgacccccuggucuucccgagcgacgaguucgacgccagcauaagccaggugaacgagaagaucaaccagucccucgcguucauccgcaagagcgacgagcugcugcacaacgugaacgucggcaaguccaccaccaacaucaugaucaccaccaucaucaucgugaucaucgugauccuccugcugcucaucgccgucgggcuguuccuguacugcaaggcccggagcacgcccgugaccuuguccaaggaccagcucagcggcaucaacaacaucgccuucuccaacugaggacuaguguccaccugucccuccugggcugcuggauugucucguuuuccugccaaauaaacaggaucagcgcuuuacagaucuaaaaaaaaaaaaaaaaaaaaaaaaaaaaaaaaaaaaaaaaaaaaaaaaaaaaaaaaaaaaaaaaugcaucccccccccccccccccccccccccccccccaaaggcucuuuucagagccaccagaauu

SEQ ID NO: 16331 - RNA, 1919 nt, Artificial Sequence
  mRNA product Design e-2 comprising derived and/or modified sequence from HRSV(Memphis-37)__AIY60640.1__F_DSCav1_mut4 (opt1)
gggagacccgugacccggaaguuguacggcuacgcgacuuucccucccacaaacccucgcgcccuuccuuuccuacuugggcccggcagaaagcuuaccauggagcugcccauccucaagaccaacgccaucaccacgauccuggccgcggugacccugugcuucgccagcucccagaacaucaccgaggaguucuaccagagcacgugcuccgccgucagcaagggcuaccucuccgcccugcgcaccgggugguacaccagcgugaucaccaucgagcuguccaacaucaaggagaacaagugcaacggcaccgacgccaaggugaagcucaucaagcaggagcuggacaaguacaagaacgcggucacggagcugcagcuccugaugcagagcaccccggccgccggcuccgggagcgcgaucugcuccggcaucgccgucugcaaggugcugcaccucgagggcgaggugaacaagaucaagaacgcccugcuguccaccaacaaggccgucgugagccucuccaacggggugagcguccugaccuucaaggugcuggaccucaagaacuacaucgacaagcagcugcugcccauccugaacaagcagagcugcuccaucagcaacaucgagaccgucaucgaguuccagcagaagaacaaccgccuccuggagaucacgcgggaguucagcgugaacgcgggcgugaccacccccgucuccaccuacaugcugacgaacagcgagcuccugucccugaucaacgacaugccgaucaccaacgaccagaagaagcucaugagcaacaacgugcagaucgugcgccagcaguccuacagcaucaugugcaucaucaaggaggagguccuggccuacguggugcagcugccccucuacggggucaucgacacccccugcuggaagcugcacaccagcccccugugcacgaccaacaccaaggagggcuccaacaucugccucacccggacggaccgcgggugguacugcgacaacgccggcagcguguccuucuucccgcaggccgagaccugcaagguccagagcaaccggguguucugcgacaccaugaacucccggacccugcccagcgaggugaaccucugcaacaucgacaucuucaaccccaaguacgacugcaagaucaugacguccaagaccgacgucagcuccagcgugaucaccucccugggcgccaucgugagcugcuacgggaagaccaagugcacggcgagcaacaagaaccgcggcaucaucaagaccuucuccaacgggugcgacuacgucagcaacaagggcguggacaccguguccgucggcaacacccuguacugcgugaacaagcaggagggcaagagccucuacgugaagggggagcccaucaucaacuucuacgacccgcuggucuuccccuccgacgaguucgacgccagcaucucccaggugaacgagaagaucaaccagagccuggccuucauccggaaguccgacgagcuccugcacaacgugaacgucggcaagagcaccacgaacaucaugaucaccaccaucaucaucgugaucaucgugauccugcugcuccugaucgccgucgggcuguuccucuacugcaaggcccgcuccacccccgugacgcugagcaaggaccagcuguccgggaucaacaacaucgcguucagcaacugaggacuaguguccaccugucccuccugggcugcuggauugucucguuuuccugccaaauaaacaggaucagcgcuuuacagaucuaaaaaaaaaaaaaaaaaaaaaaaaaaaaaaaaaaaaaaaaaaaaaaaaaaaaaaaaaaaaaaaaugcaucccccccccccccccccccccccccccccccaaaggcucuuuucagagccaccagaauu

SEQ ID NO: 16332 - RNA, 1919 nt, Artificial Sequence
  mRNA product Design e-2 comprising derived and/or modified sequence from HRSV(Memphis-37)__AIY60640.1__F_DSCav1_mut4 (opt1)
gggagacccgugacccggaaguuguacggcuacgcgacuuucccucccacaaacccucgcgcccuuccuuuccuacuugggcccggcagaaagcuuaccauggagcugcccauccucaagaccaacgccaucaccacgauccuggccgcggugacccugugcuucgccagcucccagaacaucaccgaggaguucuaccagagcacgugcuccgccgucagcaagggcuaccucuccgcccugcgcaccgggugguacaccagcgugaucaccaucgagcuguccaacaucaaggagaacaagugcaacggcaccgacgccaaggugaagcucaucaagcaggagcuggacaaguacaagaacgcggucacggagcugcagcuccugaugcagagcaccccggccgccggguccggcagcgccaucugcuccgggaucgcggugugcaaggugcugcaccucgagggcgaggucaacaagaucaagaacgcccugcugagcaccaacaaggccguggugucccucagcaacggcgucuccgugcugaccuucaaggugcuggaccucaagaacuacaucgacaagcagcugcugcccauccucaacaagcagagcugcuccaucagcaacaucgagacggucaucgaguuccagcagaagaacaaccggcugcuggagaucacccgcgaguucuccgugaacgccggggugaccacccccgucagcacguacaugcucaccaacagcgagcugcugucccucaucaacgacaugcccaucaccaacgaccagaagaagcugaugagcaacaacgugcagaucgugcggcagcaguccuacagcaucaugugcaucaucaaggaggagguccuggccuacguggugcagcucccgcuguacggcgucaucgacacccccugcuggaagcugcacacgagcccccucugcaccaccaacaccaaggagggguccaacaucugccugacgcgcaccgaccggggcugguacugcgacaacgcgggguccgugagcuucuucccccaggccgagaccugcaaggugcaguccaaccgcgucuucugcgacaccaugaacagccggacgcucccguccgaggugaaccugugcaacaucgacaucuucaaccccaaguacgacugcaagaucaugaccagcaagaccgacgucuccagcuccgugaucaccagccugggcgccaucguguccugcuacggcaagacgaagugcaccgccagcaacaagaaccgggggaucaucaagaccuucuccaacggcugcgacuacgucagcaacaaggggguggacaccgugagcgucggcaacacgcucuacugcgugaacaagcaggagggcaagucccuguacgugaagggggagcccaucaucaacuucuacgacccccuggucuucccgagcgacgaguucgacgccuccaucagccaggugaacgagaagaucaaccagucccucgcguucauccgcaagagcgacgagcugcugcacaacgugaacgucggcaaguccaccaccaacaucaugaucaccaccaucaucaucgugaucaucgugauccuccugcugcucaucgccgucgggcuguuccuguacugcaaggcccggagcacgcccgugacccuguccaaggaccagcucagcggcaucaacaacaucgccuucuccaacugaggacuaguguccaccugucccuccugggcugcuggauugucucguuuuccugccaaauaaacaggaucagcgcuuuacagaucuaaaaaaaaaaaaaaaaaaaaaaaaaaaaaaaaaaaaaaaaaaaaaaaaaaaaaaaaaaaaaaaaugcaucccccccccccccccccccccccccccccccaaaggcucuuuucagagccaccagaauu

SEQ ID NO: 16333 - RNA, 1919 nt, Artificial Sequence
  mRNA product Design e-2 comprising derived and/or modified sequence from HRSV(Memphis-37)__AIY60640.1__F_DSCav1_mut4 (opt2)
gggagacccgugacccggaaguuguacggcuacgcgacuuucccucccacaaacccucgcgcccuuccuuuccuacuugggcccggcagaaagcuuaccauggagcuccccauccucaagaccaacgccaucaccaccauccucgccgccgucacccucugcuucgccuccucccagaacaucaccgaggaguucuaccaguccaccugcuccgccgucuccaagggcuaccucuccgcccuccgcaccggcugguacaccuccgucaucaccaucgagcucuccaacaucaaggagaacaagugcaacggcaccgacgccaaggucaagcucaucaagcaggagcucgacaaguacaagaacgccgucaccgagcuccagcuccucaugcaguccacccccgccgccggcuccggcuccgccaucugcuccggcaucgccgucugcaagguccuccaccucgagggcgaggucaacaagaucaagaacgcccuccucuccaccaacaaggccgucgucucccucuccaacggcgucuccguccucaccuucaagguccucgaccucaagaacuacaucgacaagcagcuccuccccauccucaacaagcaguccugcuccaucuccaacaucgagaccgucaucgaguuccagcagaagaacaaccgccuccucgagaucacccgcgaguucuccgucaacgccggcgucaccacccccgucuccaccuacaugcucaccaacuccgagcuccucucccucaucaacgacaugcccaucaccaacgaccagaagaagcucauguccaacaacguccagaucguccgccagcaguccuacuccaucaugugcaucaucaaggaggagguccucgccuacgucguccagcucccccucuacggcgucaucgacacccccugcuggaagcuccacaccuccccccucugcaccaccaacaccaaggagggcuccaacaucugccucacccgcaccgaccgcggcugguacugcgacaacgccggcuccgucuccuucuucccccaggccgagaccugcaagguccaguccaaccgcgucuucugcgacaccaugaacucccgcacccuccccuccgaggucaaccucugcaacaucgacaucuucaaccccaaguacgacugcaagaucaugaccuccaagaccgacgucuccuccuccgucaucaccucccucggcgccaucgucuccugcuacggcaagaccaagugcaccgccuccaacaagaaccgcggcaucaucaagaccuucuccaacggcugcgacuacgucuccaacaagggcgucgacaccgucuccgucggcaacacccucuacugcgucaacaagcaggagggcaagucccucuacgucaagggcgagcccaucaucaacuucuacgacccccucgucuuccccuccgacgaguucgacgccuccaucucccaggucaacgagaagaucaaccagucccucgccuucauccgcaaguccgacgagcuccuccacaacgucaacgucggcaaguccaccaccaacaucaugaucaccaccaucaucaucgucaucaucgucauccuccuccuccucaucgccgucggccucuuccucuacugcaaggcccgcuccacccccgucacccucuccaaggaccagcucuccggcaucaacaacaucgccuucuccaacugaggacuaguguccaccugucccuccugggcugcuggauugucucguuuuccugccaaauaaacaggaucagcgcuuuacagaucuaaaaaaaaaaaaaaaaaaaaaaaaaaaaaaaaaaaaaaaaaaaaaaaaaaaaaaaaaaaaaaaaugcaucccccccccccccccccccccccccccccccaaaggcucuuuucagagccaccagaauu

SEQ ID NO: 16334 - RNA, 1919 nt, Artificial Sequence
  mRNA product Design e-2 comprising derived and/or modified sequence from HRSV(Memphis-37)__AIY60640.1__F_DSCav1_mut4 (opt3)
gggagacccgugacccggaaguuguacggcuacgcgacuuucccucccacaaacccucgcgcccuuccuuuccuacuugggcccggcagaaagcuuaccauggagcugcccauccucaagaccaacgccauuacaacuauacuugcugcagugacgcugugcuucgccagcucccagaauaucaccgaagaguuuuaccaaucuacauguucagcggucaguaaaggcuauuugagcgcuuuaagaacugggugguacaccuccguuauuacaaucgaacugucuaacauuaaggagaauaaaugcaacggaaccgacgccaaggugaaacuaaucaagcaggaacucgauaaguauaaaaaugcaguaacugagcugcagcuucugaugcagucgaccccugccgcugguucaggcagcgcaauauguagugggaucgccgugugcaaggucuugcaccucgagggagaagugaacaaaauuaagaaugcucugcuguccacaaacaaagccguugugucucucagcaauggcgucuccguguuaacguucaagguacuggaccuuaagaacuacaucgauaaacaauugcugccaauucuaaauaagcagucauguaguaucagcaacauagagacuguuauugaauuucagcagaaaaauaacaggcuccuggagaucacccgggaguucucugugaaugcgggugucacaacuccgguguccaccuauaugcuuacaaacucagaacuguugagccucauuaacgacaugcccaucaccaaugaucaaaagaaacugaugaguaacaaugugcagaucguccgccagcagucuuacuccauuaugugcauaaucaaggaggaaguuuuagcauaugugguacaacugccucucuacggggugauugacacgccauguuggaaacuucauacuagcccccugugcacaaccaacacuaaggagggaucgaauaucuguuugacacgaaccgaucguggcugguacugcgacaacgccggcucugucuccuuuuucccucaggcugaaacguguaaggugcagucaaauagaguguuuugcgauaccaugaacaguagaacacugccaagcgaggugaaucucugcaacauagacauuuucaaucccaaauaugauuguaagaucaugacuuccaaaaccgacgucucuagcucagugaucacaagucugggggccauuguauccugcuacggaaagacuaaauguaccgcaagcaacaagaauagggguaucauuaagacauuuucuaacggcugcgauuauguuucaaauaaagggguggacaccgucagugugggaaacacucuuuacugugucaacaagcaagagggcaaaagccuguaugugaagggugaaccuauaaucaauuucuacgacccauugguuuuuccguccgaugaguucgacgcuucuauuucgcagguuaacgagaaaaucaaucagagccucgccuuuauccggaaguccgaugaacuguuacacaacguaaaugucgggaagucaacgacaaacauuaugauaaccacuaucauuaucgugauuaucguuauacugcuacuccugaucgcggugggacuuuucuuguauugcaaagcccgcaguacccccgucacacugucuaaggaccagcucagcggcauuaauaacaucgcauucuccaauugaggacuaguguccaccugucccuccugggcugcuggauugucucguuuuccugccaaauaaacaggaucagcgcuuuacagaucuaaaaaaaaaaaaaaaaaaaaaaaaaaaaaaaaaaaaaaaaaaaaaaaaaaaaaaaaaaaaaaaaugcaucccccccccccccccccccccccccccccccaaaggcucuuuucagagccaccagaauu

SEQ ID NO: 16335 - RNA, 1919 nt, Artificial Sequence
  mRNA product Design e-2 comprising derived and/or modified sequence from HRSV(Memphis-37)__AIY60640.1__F_DSCav1_mut4 (opt4)
gggagacccgugacccggaaguuguacggcuacgcgacuuucccucccacaaacccucgcgcccuuccuuuccuacuugggcccggcagaaagcuuaccauggagcugcccauccugaagaccaacgccaucaccaccauccuggccgccgugacccugugcuucgccagcagccagaacaucaccgaggaguucuaccagagcaccugcagcgccgugagcaagggcuaccugagcgcccugagaaccggcugguacaccagcgugaucaccaucgagcugagcaacaucaaggagaacaagugcaacggcaccgacgccaaggugaagcugaucaagcaggagcuggacaaguacaagaacgccgugaccgagcugcagcugcugaugcagagcacccccgccgccggcagcggcagcgccaucugcagcggcaucgccgugugcaaggugcugcaccuggagggcgaggugaacaagaucaagaacgcccugcugagcaccaacaaggccguggugagccugagcaacggcgugagcgugcugaccuucaaggugcuggaccugaagaacuacaucgacaagcagcugcugcccauccugaacaagcagagcugcagcaucagcaacaucgagaccgugaucgaguuccagcagaagaacaacagacugcuggagaucaccagagaguucagcgugaacgccggcgugaccacccccgugagcaccuacaugcugaccaacagcgagcugcugagccugaucaacgacaugcccaucaccaacgaccagaagaagcugaugagcaacaacgugcagaucgugagacagcagagcuacagcaucaugugcaucaucaaggaggaggugcuggccuacguggugcagcugccccuguacggcgugaucgacacccccugcuggaagcugcacaccagcccccugugcaccaccaacaccaaggagggcagcaacaucugccugaccagaaccgacagaggcugguacugcgacaacgccggcagcgugagcuucuucccccaggccgagaccugcaaggugcagagcaacagaguguucugcgacaccaugaacagcagaacccugcccagcgaggugaaccugugcaacaucgacaucuucaaccccaaguacgacugcaagaucaugaccagcaagaccgacgugagcagcagcgugaucaccagccugggcgccaucgugagcugcuacggcaagaccaagugcaccgccagcaacaagaacagaggcaucaucaagaccuucagcaacggcugcgacuacgugagcaacaagggcguggacaccgugagcgugggcaacacccuguacugcgugaacaagcaggagggcaagagccuguacgugaagggcgagcccaucaucaacuucuacgacccccugguguuccccagcgacgaguucgacgccagcaucagccaggugaacgagaagaucaaccagagccuggccuucaucagaaagagcgacgagcugcugcacaacgugaacgugggcaagagcaccaccaacaucaugaucaccaccaucaucaucgugaucaucgugauccugcugcugcugaucgccgugggccuguuccuguacugcaaggccagaagcacccccgugacccugagcaaggaccagcugagcggcaucaacaacaucgccuucagcaacugaggacuaguguccaccugucccuccugggcugcuggauugucucguuuuccugccaaauaaacaggaucagcgcuuuacagaucuaaaaaaaaaaaaaaaaaaaaaaaaaaaaaaaaaaaaaaaaaaaaaaaaaaaaaaaaaaaaaaaaugcaucccccccccccccccccccccccccccccccaaaggcucuuuucagagccaccagaauu

SEQ ID NO: 16336 - RNA, 1919 nt, Artificial Sequence
  mRNA product Design e-2 comprising derived and/or modified sequence from HRSV(Memphis-37)__AIY60640.1__F_DSCav1_mut4 (opt5)
gggagacccgugacccggaaguuguacggcuacgcgacuuucccucccacaaacccucgcgcccuuccuuuccuacuugggcccggcagaaagcuuaccauggagcugcccauccucaagaccaacgccauuacaacgauccuggcugccgugacccuuugcuucgcgagcucccagaauauuacagaagaguuuuaccaaucuaccuguagcgcugucuccaaaggcuaucugucugcccucagaacagggugguacaccagcguuaucacaauugaacuguccaacaucaaggagaauaaaugcaacggaaccgacgccaaggugaaacuuaucaagcaggaacuggauaaguauaaaaaugcugugacggagcuccagcugcugaugcagucuaccccugccgcuggcagcggguccgccauuuguagcggaaucgcggucugcaaggugcuccaccuggagggcgaaguuaacaaaauuaagaaugcccuucugucuacaaacaaagcuguggucucccucagcaauggggugucuguucugaccuucaaggugcuugaccugaagaacuacaucgauaaacaacuccugccgauucugaauaagcaguccuguagcaucucuaacauugagacagucaucgaauuucagcagaaaaauaaccggcuccuggagaucacccgcgaguucuccgugaaugccggagugacgacacccgucagcaccuauaugcuuacaaacuccgaacugcucucucugauuaacgacaugccuaucaccaaugaucaaaagaaacuuaugagcaacaauguucagauugugagacagcaguccuacagcaucaugugcauuaucaaggaggaagugcuggcuuaugucgugcaacucccccuguacggcguuaucgacaccccuuguuggaaacugcauacaucuccccucugcacgaccaacacaaaggagggcuccaauauuugucugacccggacagaucgcgggugguacugcgacaacgccggaagcgugagcuuuuucccucaggcggaaaccuguaagguccagucuaauagaguguuuugcgauacgaugaacuccagaacacugccgucugagguuaaucucugcaacaucgacauuuucaaucccaaauaugauuguaagaucaugaccagcaaaaccgacguguccagcucugucauuacaucccugggcgccaucgugagcugcuacgggaagaccaaauguacagcuucuaacaagaaucggggaaucauuaagacguuuuccaacggcugcgauuaugucagcaauaaagggguggacaccguuuccgugggaaacacacuuuacugugucaacaagcaagagggcaaaucucuguaugugaagggcgaaccuaucauuaauuucuacgacccccucguuuuuccuagcgaugaguucgacgccuccaucucucaggugaacgaaaagauuaaucagagccuggcuuuuauccgcaaguccgaugagcugcuccacaacgucaauguggggaaaagcaccacaaacauuaugaucaccacgaucauuaucgugauuaucguuauucugcuucugcucaucgccgucggacuguuccuguauugcaaagccagaucuacccccgugacacuuuccaaggaccagcucagcggcaucaauaacauugcuuucucuaauugaggacuaguguccaccugucccuccugggcugcuggauugucucguuuuccugccaaauaaacaggaucagcgcuuuacagaucuaaaaaaaaaaaaaaaaaaaaaaaaaaaaaaaaaaaaaaaaaaaaaaaaaaaaaaaaaaaaaaaaugcaucccccccccccccccccccccccccccccccaaaggcucuuuucagagccaccagaauu

SEQ ID NO: 16337 - RNA, 1919 nt, Artificial Sequence
  mRNA product Design e-2 comprising derived and/or modified sequence from HRSV(Memphis-37)__AIY60640.1__F_DSCav1_mut4 (opt6)
gggagacccgugacccggaaguuguacggcuacgcgacuuucccucccacaaacccucgcgcccuuccuuuccuacuugggcccggcagaaagcuuaccauggaacucccaauccuaaaaacaaacgcaauaacaacaauauuagcagccguaacacucuguuucgccucaucccaaaacauaacagaagaauuuuaucaaucuacauguuccgccgucaguaaaggauaucuaucagccuuaagaacaggcugguacacaucaguaaucaccauagaauuauccaacauaaaagaaaacaaaugcaauggcacagaugccaaaguaaaacuaaucaaacaagaacuugauaaauauaaaaacgcaguaacagaauuacaauuauuaaugcaaagcacaccagccgcaggaucaggaucagcaauauguucaggaauagcagucuguaaaguacuacacuuagaaggagaaguaaacaaaauuaaaaacgcauuacuaagcaccaauaaagcaguaguaucacuaucaaacggcguauccguauuaacguucaaaguccucgaccugaaaaacuacauagauaaacaacuacuaccaauacuaaauaaacaaucaugcucaauaucaaacauagaaacuguuaucgaauuucaacagaaaaauaaccgacuacuagaaaucaccagagaauuuucaguaaacgcaggcgucacuacaccaguauccacauacaugcuaaccaacucggaauuacuuucccucauaaacgacaugccaauaacaaacgaccaaaagaaacuuaugucaaacaacguucaaauaguccgccaacaaucauacucaauaauguguaucauaaaagaagaaguccuagcauaugucguacaacuaccauuauacggaguaauugacacaccuugcuggaaacuacacacauccccacuauguacaacaaacacuaaagaaggaucaaacaucugccuaaccagaacagacagaggcugguauugcgacaacgcaggaucaguaucauucuucccacaagcagaaacaugcaaaguacaaucaaacagagucuucugcgacaccaugaacagcagaacccucccauccgaaguaaacuuaugcaacaucgauaucuucaacccaaaauacgacuguaaaauaaugacaucaaaaacagacguuucauccucaguaauaacaucauuaggugccauaguuucauguuacggaaaaaccaaauguaccgcaucaaacaaaaacagaggcauuauuaaaacauucucuaacggaugcgacuaugucaguaacaaaggaguagacacaguaucagucggaaacacauuauauugcguaaauaaacaagaaggaaaaagucuauacguaaaaggagaaccaauaauaaacuuuuacgacccucucguauucccaucagacgaauuugaugcauccauaucacaagucaacgaaaagauaaaccaaucccuagcauucauaagaaaaucagacgaacuacuccauaacguaaacguaggaaaaagcacaaccaauauaaugauaaccacaauaaucauaguaauaauagucauauuauuacuuuuaauugcaguaggacucuuucuauacugcaaagcaagaagcacaccaguaacacuaagcaaagaccaacuaucaggcaucaacaauaucgccuuuucaaauuaaggacuaguguccaccugucccuccugggcugcuggauugucucguuuuccugccaaauaaacaggaucagcgcuuuacagaucuaaaaaaaaaaaaaaaaaaaaaaaaaaaaaaaaaaaaaaaaaaaaaaaaaaaaaaaaaaaaaaaaugcaucccccccccccccccccccccccccccccccaaaggcucuuuucagagccaccagaauu

SEQ ID NO: 16338 - RNA, 1919 nt, Artificial Sequence
  mRNA product Design e-2 comprising derived and/or modified sequence from HRSV(Memphis-37)__AIY60640.1__F_DSCav1_mut4 (opt11)
gggagacccgugacccggaaguuguacggcuacgcgacuuucccucccacaaacccucgcgcccuuccuuuccuacuugggcccggcagaaagcuuaccauggagcugcccauccucaagaccaacgccaucaccacgauccuggccgcggugacccugugcuucgcgagcucccagaacaucaccgaggaguucuaccagagcacgugcuccgccgucagcaagggcuaccucuccgcccugcgcaccgggugguacaccagcgugaucaccaucgagcuguccaacaucaaggagaacaagugcaacggcaccgacgccaaggugaaacucaucaagcaggagcuggacaaguacaagaacgccgucaccgagcugcagcuccugaugcagagcaccccggccgccggguccggcagcgcuaucugcuccgggaucgcggugugcaaggugcugcaccucgagggcgaggucaacaagaucaagaaugcccugcugagcaccaacaaggccguggugucccucagcaacggagucagcgugcuuaccuucaaggugcuggaccucaagaacuacaucgacaagcagcugcugccuauccucaacaagcagagcugcuccaucagcaacaucgagacggucaucgaguuccagcagaagaacaaccggcugcuggagaucacccgcgaguucuccgugaacgccggggugaccacccccgucagcacguacaugcucaccaacagcgaacugcugucccucaucaacgacaugcccaucaccaacgaccagaagaagcugaugagcaacaacgugcagaucgugcggcagcaguccuacagcaucaugugcaucaucaaggaggaaguccuggccuacguggugcagcucccucuguacggcgucaucgacacccccugcuggaagcugcacacgagcccccucugcaccaccaacaccaaggagggguccaacaucugccugacgcgcaccgaccggggcugguacugcgacaacgcgggguccgugagcuucuucccccaggccgagaccugcaaggugcagagcaaccgcgucuucugcgacacuaugaacagcagaacgcucccguccgaggugaaccugugcaacauagacauauucaaccccaaguacgacugcaagaucaugaccagcaagaccgacgucuccagcuccgugauuaccagccugggcgcaaucguguccugcuacggcaagacgaagugcaccgccagcaacaagaaccgggggaucaucaagaccuucuccaacggcugcgacuaugucagcaacaaggggguggacaccgugagcgucggaaacacgcucuacugcgugaacaagcaagagggcaaguccuuauacgugaagggggagcccaucaucaacuucuacgacccccuggucuucccgagcgacgaguucgacgccagcauaagccaggugaacgagaagaucaaccagucccucgcguucauccgcaagagcgacgagcugcugcacaacgugaacgucggcaaguccaccaccaacaucaugaucaccaccaucaucaucgugaucaucgugauccuccugcugcucaucgccgucgggcuguuccuguacugcaaggcccggagcacgcccgugaccuuguccaaggaccagcucagcggcaucaacaacaucgccuucuccaacugaggacuaguguccaccugucccuccugggcugcuggauugucucguuuuccugccaaauaaacaggaucagcgcuuuacagaucuaaaaaaaaaaaaaaaaaaaaaaaaaaaaaaaaaaaaaaaaaaaaaaaaaaaaaaaaaaaaaaaaugcaucccccccccccccccccccccccccccccccaaaggcucuuuucagagccaccagaauu

SEQ ID NO: 16339 - RNA, 1889 nt, Artificial Sequence
  mRNA product Design e-3 comprising derived and/or modified sequence from HRSV(Memphis-37)__AIY60640.1__F_DSCav1_mut4 (opt1)
gggagacuuucccauucuguagcagaauuugguguugccuguggucuuggucccgcggagaagcuuaccauggagcugcccauccucaagaccaacgccaucaccacgauccuggccgcggugacccugugcuucgccagcucccagaacaucaccgaggaguucuaccagagcacgugcuccgccgucagcaagggcuaccucuccgcccugcgcaccgggugguacaccagcgugaucaccaucgagcuguccaacaucaaggagaacaagugcaacggcaccgacgccaaggugaagcucaucaagcaggagcuggacaaguacaagaacgcggucacggagcugcagcuccugaugcagagcaccccggccgccggcuccgggagcgcgaucugcuccggcaucgccgucugcaaggugcugcaccucgagggcgaggugaacaagaucaagaacgcccugcuguccaccaacaaggccgucgugagccucuccaacggggugagcguccugaccuucaaggugcuggaccucaagaacuacaucgacaagcagcugcugcccauccugaacaagcagagcugcuccaucagcaacaucgagaccgucaucgaguuccagcagaagaacaaccgccuccuggagaucacgcgggaguucagcgugaacgcgggcgugaccacccccgucuccaccuacaugcugacgaacagcgagcuccugucccugaucaacgacaugccgaucaccaacgaccagaagaagcucaugagcaacaacgugcagaucgugcgccagcaguccuacagcaucaugugcaucaucaaggaggagguccuggccuacguggugcagcugccccucuacggggucaucgacacccccugcuggaagcugcacaccagcccccugugcacgaccaacaccaaggagggcuccaacaucugccucacccggacggaccgcgggugguacugcgacaacgccggcagcguguccuucuucccgcaggccgagaccugcaagguccagagcaaccggguguucugcgacaccaugaacucccggacccugcccagcgaggugaaccucugcaacaucgacaucuucaaccccaaguacgacugcaagaucaugacguccaagaccgacgucagcuccagcgugaucaccucccugggcgccaucgugagcugcuacgggaagaccaagugcacggcgagcaacaagaaccgcggcaucaucaagaccuucuccaacgggugcgacuacgucagcaacaagggcguggacaccguguccgucggcaacacccuguacugcgugaacaagcaggagggcaagagccucuacgugaagggggagcccaucaucaacuucuacgacccgcuggucuuccccuccgacgaguucgacgccagcaucucccaggugaacgagaagaucaaccagagccuggccuucauccggaaguccgacgagcuccugcacaacgugaacgucggcaagagcaccacgaacaucaugaucaccaccaucaucaucgugaucaucgugauccugcugcuccugaucgccgucgggcuguuccucuacugcaaggcccgcuccacccccgugacgcugagcaaggaccagcuguccgggaucaacaacaucgcguucagcaacugaggacuaguguccaccugucccuccugggcugcuggauugucucguuuuccugccaaauaaacaggaucagcgcuuuacagaucuaaaaaaaaaaaaaaaaaaaaaaaaaaaaaaaaaaaaaaaaaaaaaaaaaaaaaaaaaaaaaaaaugcaucccccccccccccccccccccccccccccccaaaggcucuuuucagagccaccagaauu

SEQ ID NO: 16340 - RNA, 1889 nt, Artificial Sequence
  mRNA product Design e-3 comprising derived and/or modified sequence from HRSV(Memphis-37)__AIY60640.1__F_DSCav1_mut4 (opt1)
gggagacuuucccauucuguagcagaauuugguguugccuguggucuuggucccgcggagaagcuuaccauggagcugcccauccucaagaccaacgccaucaccacgauccuggccgcggugacccugugcuucgccagcucccagaacaucaccgaggaguucuaccagagcacgugcuccgccgucagcaagggcuaccucuccgcccugcgcaccgggugguacaccagcgugaucaccaucgagcuguccaacaucaaggagaacaagugcaacggcaccgacgccaaggugaagcucaucaagcaggagcuggacaaguacaagaacgcggucacggagcugcagcuccugaugcagagcaccccggccgccggguccggcagcgccaucugcuccgggaucgcggugugcaaggugcugcaccucgagggcgaggucaacaagaucaagaacgcccugcugagcaccaacaaggccguggugucccucagcaacggcgucuccgugcugaccuucaaggugcuggaccucaagaacuacaucgacaagcagcugcugcccauccucaacaagcagagcugcuccaucagcaacaucgagacggucaucgaguuccagcagaagaacaaccggcugcuggagaucacccgcgaguucuccgugaacgccggggugaccacccccgucagcacguacaugcucaccaacagcgagcugcugucccucaucaacgacaugcccaucaccaacgaccagaagaagcugaugagcaacaacgugcagaucgugcggcagcaguccuacagcaucaugugcaucaucaaggaggagguccuggccuacguggugcagcucccgcuguacggcgucaucgacacccccugcuggaagcugcacacgagcccccucugcaccaccaacaccaaggagggguccaacaucugccugacgcgcaccgaccggggcugguacugcgacaacgcgggguccgugagcuucuucccccaggccgagaccugcaaggugcaguccaaccgcgucuucugcgacaccaugaacagccggacgcucccguccgaggugaaccugugcaacaucgacaucuucaaccccaaguacgacugcaagaucaugaccagcaagaccgacgucuccagcuccgugaucaccagccugggcgccaucguguccugcuacggcaagacgaagugcaccgccagcaacaagaaccgggggaucaucaagaccuucuccaacggcugcgacuacgucagcaacaaggggguggacaccgugagcgucggcaacacgcucuacugcgugaacaagcaggagggcaagucccuguacgugaagggggagcccaucaucaacuucuacgacccccuggucuucccgagcgacgaguucgacgccuccaucagccaggugaacgagaagaucaaccagucccucgcguucauccgcaagagcgacgagcugcugcacaacgugaacgucggcaaguccaccaccaacaucaugaucaccaccaucaucaucgugaucaucgugauccuccugcugcucaucgccgucgggcuguuccuguacugcaaggcccggagcacgcccgugacccuguccaaggaccagcucagcggcaucaacaacaucgccuucuccaacugaggacuaguguccaccugucccuccugggcugcuggauugucucguuuuccugccaaauaaacaggaucagcgcuuuacagaucuaaaaaaaaaaaaaaaaaaaaaaaaaaaaaaaaaaaaaaaaaaaaaaaaaaaaaaaaaaaaaaaaugcaucccccccccccccccccccccccccccccccaaaggcucuuuucagagccaccagaauu

SEQ ID NO: 16341 - RNA, 1889 nt, Artificial Sequence
  mRNA product Design e-3 comprising derived and/or modified sequence from HRSV(Memphis-37)__AIY60640.1__F_DSCav1_mut4 (opt2)
gggagacuuucccauucuguagcagaauuugguguugccuguggucuuggucccgcggagaagcuuaccauggagcuccccauccucaagaccaacgccaucaccaccauccucgccgccgucacccucugcuucgccuccucccagaacaucaccgaggaguucuaccaguccaccugcuccgccgucuccaagggcuaccucuccgcccuccgcaccggcugguacaccuccgucaucaccaucgagcucuccaacaucaaggagaacaagugcaacggcaccgacgccaaggucaagcucaucaagcaggagcucgacaaguacaagaacgccgucaccgagcuccagcuccucaugcaguccacccccgccgccggcuccggcuccgccaucugcuccggcaucgccgucugcaagguccuccaccucgagggcgaggucaacaagaucaagaacgcccuccucuccaccaacaaggccgucgucucccucuccaacggcgucuccguccucaccuucaagguccucgaccucaagaacuacaucgacaagcagcuccuccccauccucaacaagcaguccugcuccaucuccaacaucgagaccgucaucgaguuccagcagaagaacaaccgccuccucgagaucacccgcgaguucuccgucaacgccggcgucaccacccccgucuccaccuacaugcucaccaacuccgagcuccucucccucaucaacgacaugcccaucaccaacgaccagaagaagcucauguccaacaacguccagaucguccgccagcaguccuacuccaucaugugcaucaucaaggaggagguccucgccuacgucguccagcucccccucuacggcgucaucgacacccccugcuggaagcuccacaccuccccccucugcaccaccaacaccaaggagggcuccaacaucugccucacccgcaccgaccgcggcugguacugcgacaacgccggcuccgucuccuucuucccccaggccgagaccugcaagguccaguccaaccgcgucuucugcgacaccaugaacucccgcacccuccccuccgaggucaaccucugcaacaucgacaucuucaaccccaaguacgacugcaagaucaugaccuccaagaccgacgucuccuccuccgucaucaccucccucggcgccaucgucuccugcuacggcaagaccaagugcaccgccuccaacaagaaccgcggcaucaucaagaccuucuccaacggcugcgacuacgucuccaacaagggcgucgacaccgucuccgucggcaacacccucuacugcgucaacaagcaggagggcaagucccucuacgucaagggcgagcccaucaucaacuucuacgacccccucgucuuccccuccgacgaguucgacgccuccaucucccaggucaacgagaagaucaaccagucccucgccuucauccgcaaguccgacgagcuccuccacaacgucaacgucggcaaguccaccaccaacaucaugaucaccaccaucaucaucgucaucaucgucauccuccuccuccucaucgccgucggccucuuccucuacugcaaggcccgcuccacccccgucacccucuccaaggaccagcucuccggcaucaacaacaucgccuucuccaacugaggacuaguguccaccugucccuccugggcugcuggauugucucguuuuccugccaaauaaacaggaucagcgcuuuacagaucuaaaaaaaaaaaaaaaaaaaaaaaaaaaaaaaaaaaaaaaaaaaaaaaaaaaaaaaaaaaaaaaaugcaucccccccccccccccccccccccccccccccaaaggcucuuuucagagccaccagaauu

SEQ ID NO: 16342 - RNA, 1889 nt, Artificial Sequence
  mRNA product Design e-3 comprising derived and/or modified sequence from HRSV(Memphis-37)__AIY60640.1__F_DSCav1_mut4 (opt3)
gggagacuuucccauucuguagcagaauuugguguugccuguggucuuggucccgcggagaagcuuaccauggagcugcccauccucaagaccaacgccauuacaacuauacuugcugcagugacgcugugcuucgccagcucccagaauaucaccgaagaguuuuaccaaucuacauguucagcggucaguaaaggcuauuugagcgcuuuaagaacugggugguacaccuccguuauuacaaucgaacugucuaacauuaaggagaauaaaugcaacggaaccgacgccaaggugaaacuaaucaagcaggaacucgauaaguauaaaaaugcaguaacugagcugcagcuucugaugcagucgaccccugccgcugguucaggcagcgcaauauguagugggaucgccgugugcaaggucuugcaccucgagggagaagugaacaaaauuaagaaugcucugcuguccacaaacaaagccguugugucucucagcaauggcgucuccguguuaacguucaagguacuggaccuuaagaacuacaucgauaaacaauugcugccaauucuaaauaagcagucauguaguaucagcaacauagagacuguuauugaauuucagcagaaaaauaacaggcuccuggagaucacccgggaguucucugugaaugcgggugucacaacuccgguguccaccuauaugcuuacaaacucagaacuguugagccucauuaacgacaugcccaucaccaaugaucaaaagaaacugaugaguaacaaugugcagaucguccgccagcagucuuacuccauuaugugcauaaucaaggaggaaguuuuagcauaugugguacaacugccucucuacggggugauugacacgccauguuggaaacuucauacuagcccccugugcacaaccaacacuaaggagggaucgaauaucuguuugacacgaaccgaucguggcugguacugcgacaacgccggcucugucuccuuuuucccucaggcugaaacguguaaggugcagucaaauagaguguuuugcgauaccaugaacaguagaacacugccaagcgaggugaaucucugcaacauagacauuuucaaucccaaauaugauuguaagaucaugacuuccaaaaccgacgucucuagcucagugaucacaagucugggggccauuguauccugcuacggaaagacuaaauguaccgcaagcaacaagaauagggguaucauuaagacauuuucuaacggcugcgauuauguuucaaauaaagggguggacaccgucagugugggaaacacucuuuacugugucaacaagcaagagggcaaaagccuguaugugaagggugaaccuauaaucaauuucuacgacccauugguuuuuccguccgaugaguucgacgcuucuauuucgcagguuaacgagaaaaucaaucagagccucgccuuuauccggaaguccgaugaacuguuacacaacguaaaugucgggaagucaacgacaaacauuaugauaaccacuaucauuaucgugauuaucguuauacugcuacuccugaucgcggugggacuuuucuuguauugcaaagcccgcaguacccccgucacacugucuaaggaccagcucagcggcauuaauaacaucgcauucuccaauugaggacuaguguccaccugucccuccugggcugcuggauugucucguuuuccugccaaauaaacaggaucagcgcuuuacagaucuaaaaaaaaaaaaaaaaaaaaaaaaaaaaaaaaaaaaaaaaaaaaaaaaaaaaaaaaaaaaaaaaugcaucccccccccccccccccccccccccccccccaaaggcucuuuucagagccaccagaauu

SEQ ID NO: 16343 - RNA, 1889 nt, Artificial Sequence
  mRNA product Design e-3 comprising derived and/or modified sequence from HRSV(Memphis-37)__AIY60640.1__F_DSCav1_mut4 (opt4)
gggagacuuucccauucuguagcagaauuugguguugccuguggucuuggucccgcggagaagcuuaccauggagcugcccauccugaagaccaacgccaucaccaccauccuggccgccgugacccugugcuucgccagcagccagaacaucaccgaggaguucuaccagagcaccugcagcgccgugagcaagggcuaccugagcgcccugagaaccggcugguacaccagcgugaucaccaucgagcugagcaacaucaaggagaacaagugcaacggcaccgacgccaaggugaagcugaucaagcaggagcuggacaaguacaagaacgccgugaccgagcugcagcugcugaugcagagcacccccgccgccggcagcggcagcgccaucugcagcggcaucgccgugugcaaggugcugcaccuggagggcgaggugaacaagaucaagaacgcccugcugagcaccaacaaggccguggugagccugagcaacggcgugagcgugcugaccuucaaggugcuggaccugaagaacuacaucgacaagcagcugcugcccauccugaacaagcagagcugcagcaucagcaacaucgagaccgugaucgaguuccagcagaagaacaacagacugcuggagaucaccagagaguucagcgugaacgccggcgugaccacccccgugagcaccuacaugcugaccaacagcgagcugcugagccugaucaacgacaugcccaucaccaacgaccagaagaagcugaugagcaacaacgugcagaucgugagacagcagagcuacagcaucaugugcaucaucaaggaggaggugcuggccuacguggugcagcugccccuguacggcgugaucgacacccccugcuggaagcugcacaccagcccccugugcaccaccaacaccaaggagggcagcaacaucugccugaccagaaccgacagaggcugguacugcgacaacgccggcagcgugagcuucuucccccaggccgagaccugcaaggugcagagcaacagaguguucugcgacaccaugaacagcagaacccugcccagcgaggugaaccugugcaacaucgacaucuucaaccccaaguacgacugcaagaucaugaccagcaagaccgacgugagcagcagcgugaucaccagccugggcgccaucgugagcugcuacggcaagaccaagugcaccgccagcaacaagaacagaggcaucaucaagaccuucagcaacggcugcgacuacgugagcaacaagggcguggacaccgugagcgugggcaacacccuguacugcgugaacaagcaggagggcaagagccuguacgugaagggcgagcccaucaucaacuucuacgacccccugguguuccccagcgacgaguucgacgccagcaucagccaggugaacgagaagaucaaccagagccuggccuucaucagaaagagcgacgagcugcugcacaacgugaacgugggcaagagcaccaccaacaucaugaucaccaccaucaucaucgugaucaucgugauccugcugcugcugaucgccgugggccuguuccuguacugcaaggccagaagcacccccgugacccugagcaaggaccagcugagcggcaucaacaacaucgccuucagcaacugaggacuaguguccaccugucccuccugggcugcuggauugucucguuuuccugccaaauaaacaggaucagcgcuuuacagaucuaaaaaaaaaaaaaaaaaaaaaaaaaaaaaaaaaaaaaaaaaaaaaaaaaaaaaaaaaaaaaaaaugcaucccccccccccccccccccccccccccccccaaaggcucuuuucagagccaccagaauu

SEQ ID NO: 16344 - RNA, 1889 nt, Artificial Sequence
  mRNA product Design e-3 comprising derived and/or modified sequence from HRSV(Memphis-37)__AIY60640.1__F_DSCav1_mut4 (opt5)
gggagacuuucccauucuguagcagaauuugguguugccuguggucuuggucccgcggagaagcuuaccauggagcugcccauccucaagaccaacgccauuacaacgauccuggcugccgugacccuuugcuucgcgagcucccagaauauuacagaagaguuuuaccaaucuaccuguagcgcugucuccaaaggcuaucugucugcccucagaacagggugguacaccagcguuaucacaauugaacuguccaacaucaaggagaauaaaugcaacggaaccgacgccaaggugaaacuuaucaagcaggaacuggauaaguauaaaaaugcugugacggagcuccagcugcugaugcagucuaccccugccgcuggcagcggguccgccauuuguagcggaaucgcggucugcaaggugcuccaccuggagggcgaaguuaacaaaauuaagaaugcccuucugucuacaaacaaagcuguggucucccucagcaauggggugucuguucugaccuucaaggugcuugaccugaagaacuacaucgauaaacaacuccugccgauucugaauaagcaguccuguagcaucucuaacauugagacagucaucgaauuucagcagaaaaauaaccggcuccuggagaucacccgcgaguucuccgugaaugccggagugacgacacccgucagcaccuauaugcuuacaaacuccgaacugcucucucugauuaacgacaugccuaucaccaaugaucaaaagaaacuuaugagcaacaauguucagauugugagacagcaguccuacagcaucaugugcauuaucaaggaggaagugcuggcuuaugucgugcaacucccccuguacggcguuaucgacaccccuuguuggaaacugcauacaucuccccucugcacgaccaacacaaaggagggcuccaauauuugucugacccggacagaucgcgggugguacugcgacaacgccggaagcgugagcuuuuucccucaggcggaaaccuguaagguccagucuaauagaguguuuugcgauacgaugaacuccagaacacugccgucugagguuaaucucugcaacaucgacauuuucaaucccaaauaugauuguaagaucaugaccagcaaaaccgacguguccagcucugucauuacaucccugggcgccaucgugagcugcuacgggaagaccaaauguacagcuucuaacaagaaucggggaaucauuaagacguuuuccaacggcugcgauuaugucagcaauaaagggguggacaccguuuccgugggaaacacacuuuacugugucaacaagcaagagggcaaaucucuguaugugaagggcgaaccuaucauuaauuucuacgacccccucguuuuuccuagcgaugaguucgacgccuccaucucucaggugaacgaaaagauuaaucagagccuggcuuuuauccgcaaguccgaugagcugcuccacaacgucaauguggggaaaagcaccacaaacauuaugaucaccacgaucauuaucgugauuaucguuauucugcuucugcucaucgccgucggacuguuccuguauugcaaagccagaucuacccccgugacacuuuccaaggaccagcucagcggcaucaauaacauugcuuucucuaauugaggacuaguguccaccugucccuccugggcugcuggauugucucguuuuccugccaaauaaacaggaucagcgcuuuacagaucuaaaaaaaaaaaaaaaaaaaaaaaaaaaaaaaaaaaaaaaaaaaaaaaaaaaaaaaaaaaaaaaaugcaucccccccccccccccccccccccccccccccaaaggcucuuuucagagccaccagaauu

SEQ ID NO: 16345 - RNA, 1889 nt, Artificial Sequence
  mRNA product Design e-3 comprising derived and/or modified sequence from HRSV(Memphis-37)__AIY60640.1__F_DSCav1_mut4 (opt6)
gggagacuuucccauucuguagcagaauuugguguugccuguggucuuggucccgcggagaagcuuaccauggaacucccaauccuaaaaacaaacgcaauaacaacaauauuagcagccguaacacucuguuucgccucaucccaaaacauaacagaagaauuuuaucaaucuacauguuccgccgucaguaaaggauaucuaucagccuuaagaacaggcugguacacaucaguaaucaccauagaauuauccaacauaaaagaaaacaaaugcaauggcacagaugccaaaguaaaacuaaucaaacaagaacuugauaaauauaaaaacgcaguaacagaauuacaauuauuaaugcaaagcacaccagccgcaggaucaggaucagcaauauguucaggaauagcagucuguaaaguacuacacuuagaaggagaaguaaacaaaauuaaaaacgcauuacuaagcaccaauaaagcaguaguaucacuaucaaacggcguauccguauuaacguucaaaguccucgaccugaaaaacuacauagauaaacaacuacuaccaauacuaaauaaacaaucaugcucaauaucaaacauagaaacuguuaucgaauuucaacagaaaaauaaccgacuacuagaaaucaccagagaauuuucaguaaacgcaggcgucacuacaccaguauccacauacaugcuaaccaacucggaauuacuuucccucauaaacgacaugccaauaacaaacgaccaaaagaaacuuaugucaaacaacguucaaauaguccgccaacaaucauacucaauaauguguaucauaaaagaagaaguccuagcauaugucguacaacuaccauuauacggaguaauugacacaccuugcuggaaacuacacacauccccacuauguacaacaaacacuaaagaaggaucaaacaucugccuaaccagaacagacagaggcugguauugcgacaacgcaggaucaguaucauucuucccacaagcagaaacaugcaaaguacaaucaaacagagucuucugcgacaccaugaacagcagaacccucccauccgaaguaaacuuaugcaacaucgauaucuucaacccaaaauacgacuguaaaauaaugacaucaaaaacagacguuucauccucaguaauaacaucauuaggugccauaguuucauguuacggaaaaaccaaauguaccgcaucaaacaaaaacagaggcauuauuaaaacauucucuaacggaugcgacuaugucaguaacaaaggaguagacacaguaucagucggaaacacauuauauugcguaaauaaacaagaaggaaaaagucuauacguaaaaggagaaccaauaauaaacuuuuacgacccucucguauucccaucagacgaauuugaugcauccauaucacaagucaacgaaaagauaaaccaaucccuagcauucauaagaaaaucagacgaacuacuccauaacguaaacguaggaaaaagcacaaccaauauaaugauaaccacaauaaucauaguaauaauagucauauuauuacuuuuaauugcaguaggacucuuucuauacugcaaagcaagaagcacaccaguaacacuaagcaaagaccaacuaucaggcaucaacaauaucgccuuuucaaauuaaggacuaguguccaccugucccuccugggcugcuggauugucucguuuuccugccaaauaaacaggaucagcgcuuuacagaucuaaaaaaaaaaaaaaaaaaaaaaaaaaaaaaaaaaaaaaaaaaaaaaaaaaaaaaaaaaaaaaaaugcaucccccccccccccccccccccccccccccccaaaggcucuuuucagagccaccagaauu

SEQ ID NO: 16346 - RNA, 1889 nt, Artificial Sequence
  mRNA product Design e-3 comprising derived and/or modified sequence from HRSV(Memphis-37)__AIY60640.1__F_DSCav1_mut4 (opt11)
gggagacuuucccauucuguagcagaauuugguguugccuguggucuuggucccgcggagaagcuuaccauggagcugcccauccucaagaccaacgccaucaccacgauccuggccgcggugacccugugcuucgcgagcucccagaacaucaccgaggaguucuaccagagcacgugcuccgccgucagcaagggcuaccucuccgcccugcgcaccgggugguacaccagcgugaucaccaucgagcuguccaacaucaaggagaacaagugcaacggcaccgacgccaaggugaaacucaucaagcaggagcuggacaaguacaagaacgccgucaccgagcugcagcuccugaugcagagcaccccggccgccggguccggcagcgcuaucugcuccgggaucgcggugugcaaggugcugcaccucgagggcgaggucaacaagaucaagaaugcccugcugagcaccaacaaggccguggugucccucagcaacggagucagcgugcuuaccuucaaggugcuggaccucaagaacuacaucgacaagcagcugcugccuauccucaacaagcagagcugcuccaucagcaacaucgagacggucaucgaguuccagcagaagaacaaccggcugcuggagaucacccgcgaguucuccgugaacgccggggugaccacccccgucagcacguacaugcucaccaacagcgaacugcugucccucaucaacgacaugcccaucaccaacgaccagaagaagcugaugagcaacaacgugcagaucgugcggcagcaguccuacagcaucaugugcaucaucaaggaggaaguccuggccuacguggugcagcucccucuguacggcgucaucgacacccccugcuggaagcugcacacgagcccccucugcaccaccaacaccaaggagggguccaacaucugccugacgcgcaccgaccggggcugguacugcgacaacgcgggguccgugagcuucuucccccaggccgagaccugcaaggugcagagcaaccgcgucuucugcgacacuaugaacagcagaacgcucccguccgaggugaaccugugcaacauagacauauucaaccccaaguacgacugcaagaucaugaccagcaagaccgacgucuccagcuccgugauuaccagccugggcgcaaucguguccugcuacggcaagacgaagugcaccgccagcaacaagaaccgggggaucaucaagaccuucuccaacggcugcgacuaugucagcaacaaggggguggacaccgugagcgucggaaacacgcucuacugcgugaacaagcaagagggcaaguccuuauacgugaagggggagcccaucaucaacuucuacgacccccuggucuucccgagcgacgaguucgacgccagcauaagccaggugaacgagaagaucaaccagucccucgcguucauccgcaagagcgacgagcugcugcacaacgugaacgucggcaaguccaccaccaacaucaugaucaccaccaucaucaucgugaucaucgugauccuccugcugcucaucgccgucgggcuguuccuguacugcaaggcccggagcacgcccgugaccuuguccaaggaccagcucagcggcaucaacaacaucgccuucuccaacugaggacuaguguccaccugucccuccugggcugcuggauugucucguuuuccugccaaauaaacaggaucagcgcuuuacagaucuaaaaaaaaaaaaaaaaaaaaaaaaaaaaaaaaaaaaaaaaaaaaaaaaaaaaaaaaaaaaaaaaugcaucccccccccccccccccccccccccccccccaaaggcucuuuucagagccaccagaauu

SEQ ID NO: 16347 - RNA, 1943 nt, Artificial Sequence
  mRNA product Design e-4 comprising derived and/or modified sequence from HRSV(Memphis-37)__AIY60640.1__F_DSCav1_mut4 (opt1)
gggagacuccugucgggcggaaguaggaggaguagaguuuaaaaacaguacucuuuuuccgguucgggacguaguugaagcaacgacaagccggauaaccgcucuugagacaggaagcuuaccauggagcugcccauccucaagaccaacgccaucaccacgauccuggccgcggugacccugugcuucgccagcucccagaacaucaccgaggaguucuaccagagcacgugcuccgccgucagcaagggcuaccucuccgcccugcgcaccgggugguacaccagcgugaucaccaucgagcuguccaacaucaaggagaacaagugcaacggcaccgacgccaaggugaagcucaucaagcaggagcuggacaaguacaagaacgcggucacggagcugcagcuccugaugcagagcaccccggccgccggcuccgggagcgcgaucugcuccggcaucgccgucugcaaggugcugcaccucgagggcgaggugaacaagaucaagaacgcccugcuguccaccaacaaggccgucgugagccucuccaacggggugagcguccugaccuucaaggugcuggaccucaagaacuacaucgacaagcagcugcugcccauccugaacaagcagagcugcuccaucagcaacaucgagaccgucaucgaguuccagcagaagaacaaccgccuccuggagaucacgcgggaguucagcgugaacgcgggcgugaccacccccgucuccaccuacaugcugacgaacagcgagcuccugucccugaucaacgacaugccgaucaccaacgaccagaagaagcucaugagcaacaacgugcagaucgugcgccagcaguccuacagcaucaugugcaucaucaaggaggagguccuggccuacguggugcagcugccccucuacggggucaucgacacccccugcuggaagcugcacaccagcccccugugcacgaccaacaccaaggagggcuccaacaucugccucacccggacggaccgcgggugguacugcgacaacgccggcagcguguccuucuucccgcaggccgagaccugcaagguccagagcaaccggguguucugcgacaccaugaacucccggacccugcccagcgaggugaaccucugcaacaucgacaucuucaaccccaaguacgacugcaagaucaugacguccaagaccgacgucagcuccagcgugaucaccucccugggcgccaucgugagcugcuacgggaagaccaagugcacggcgagcaacaagaaccgcggcaucaucaagaccuucuccaacgggugcgacuacgucagcaacaagggcguggacaccguguccgucggcaacacccuguacugcgugaacaagcaggagggcaagagccucuacgugaagggggagcccaucaucaacuucuacgacccgcuggucuuccccuccgacgaguucgacgccagcaucucccaggugaacgagaagaucaaccagagccuggccuucauccggaaguccgacgagcuccugcacaacgugaacgucggcaagagcaccacgaacaucaugaucaccaccaucaucaucgugaucaucgugauccugcugcuccugaucgccgucgggcuguuccucuacugcaaggcccgcuccacccccgugacgcugagcaaggaccagcuguccgggaucaacaacaucgcguucagcaacugaggacuaguguccaccugucccuccugggcugcuggauugucucguuuuccugccaaauaaacaggaucagcgcuuuacagaucuaaaaaaaaaaaaaaaaaaaaaaaaaaaaaaaaaaaaaaaaaaaaaaaaaaaaaaaaaaaaaaaaugcaucccccccccccccccccccccccccccccccaaaggcucuuuucagagccaccagaauu

SEQ ID NO: 16348 - RNA, 1943 nt, Artificial Sequence
  mRNA product Design e-4 comprising derived and/or modified sequence from HRSV(Memphis-37)__AIY60640.1__F_DSCav1_mut4 (opt1)
gggagacuccugucgggcggaaguaggaggaguagaguuuaaaaacaguacucuuuuuccgguucgggacguaguugaagcaacgacaagccggauaaccgcucuugagacaggaagcuuaccauggagcugcccauccucaagaccaacgccaucaccacgauccuggccgcggugacccugugcuucgccagcucccagaacaucaccgaggaguucuaccagagcacgugcuccgccgucagcaagggcuaccucuccgcccugcgcaccgggugguacaccagcgugaucaccaucgagcuguccaacaucaaggagaacaagugcaacggcaccgacgccaaggugaagcucaucaagcaggagcuggacaaguacaagaacgcggucacggagcugcagcuccugaugcagagcaccccggccgccggguccggcagcgccaucugcuccgggaucgcggugugcaaggugcugcaccucgagggcgaggucaacaagaucaagaacgcccugcugagcaccaacaaggccguggugucccucagcaacggcgucuccgugcugaccuucaaggugcuggaccucaagaacuacaucgacaagcagcugcugcccauccucaacaagcagagcugcuccaucagcaacaucgagacggucaucgaguuccagcagaagaacaaccggcugcuggagaucacccgcgaguucuccgugaacgccggggugaccacccccgucagcacguacaugcucaccaacagcgagcugcugucccucaucaacgacaugcccaucaccaacgaccagaagaagcugaugagcaacaacgugcagaucgugcggcagcaguccuacagcaucaugugcaucaucaaggaggagguccuggccuacguggugcagcucccgcuguacggcgucaucgacacccccugcuggaagcugcacacgagcccccucugcaccaccaacaccaaggagggguccaacaucugccugacgcgcaccgaccggggcugguacugcgacaacgcgggguccgugagcuucuucccccaggccgagaccugcaaggugcaguccaaccgcgucuucugcgacaccaugaacagccggacgcucccguccgaggugaaccugugcaacaucgacaucuucaaccccaaguacgacugcaagaucaugaccagcaagaccgacgucuccagcuccgugaucaccagccugggcgccaucguguccugcuacggcaagacgaagugcaccgccagcaacaagaaccgggggaucaucaagaccuucuccaacggcugcgacuacgucagcaacaaggggguggacaccgugagcgucggcaacacgcucuacugcgugaacaagcaggagggcaagucccuguacgugaagggggagcccaucaucaacuucuacgacccccuggucuucccgagcgacgaguucgacgccuccaucagccaggugaacgagaagaucaaccagucccucgcguucauccgcaagagcgacgagcugcugcacaacgugaacgucggcaaguccaccaccaacaucaugaucaccaccaucaucaucgugaucaucgugauccuccugcugcucaucgccgucgggcuguuccuguacugcaaggcccggagcacgcccgugacccuguccaaggaccagcucagcggcaucaacaacaucgccuucuccaacugaggacuaguguccaccugucccuccugggcugcuggauugucucguuuuccugccaaauaaacaggaucagcgcuuuacagaucuaaaaaaaaaaaaaaaaaaaaaaaaaaaaaaaaaaaaaaaaaaaaaaaaaaaaaaaaaaaaaaaaugcaucccccccccccccccccccccccccccccccaaaggcucuuuucagagccaccagaauu

SEQ ID NO: 16349 - RNA, 1943 nt, Artificial Sequence
  mRNA product Design e-4 comprising derived and/or modified sequence from HRSV(Memphis-37)__AIY60640.1__F_DSCav1_mut4 (opt2)
gggagacuccugucgggcggaaguaggaggaguagaguuuaaaaacaguacucuuuuuccgguucgggacguaguugaagcaacgacaagccggauaaccgcucuugagacaggaagcuuaccauggagcuccccauccucaagaccaacgccaucaccaccauccucgccgccgucacccucugcuucgccuccucccagaacaucaccgaggaguucuaccaguccaccugcuccgccgucuccaagggcuaccucuccgcccuccgcaccggcugguacaccuccgucaucaccaucgagcucuccaacaucaaggagaacaagugcaacggcaccgacgccaaggucaagcucaucaagcaggagcucgacaaguacaagaacgccgucaccgagcuccagcuccucaugcaguccacccccgccgccggcuccggcuccgccaucugcuccggcaucgccgucugcaagguccuccaccucgagggcgaggucaacaagaucaagaacgcccuccucuccaccaacaaggccgucgucucccucuccaacggcgucuccguccucaccuucaagguccucgaccucaagaacuacaucgacaagcagcuccuccccauccucaacaagcaguccugcuccaucuccaacaucgagaccgucaucgaguuccagcagaagaacaaccgccuccucgagaucacccgcgaguucuccgucaacgccggcgucaccacccccgucuccaccuacaugcucaccaacuccgagcuccucucccucaucaacgacaugcccaucaccaacgaccagaagaagcucauguccaacaacguccagaucguccgccagcaguccuacuccaucaugugcaucaucaaggaggagguccucgccuacgucguccagcucccccucuacggcgucaucgacacccccugcuggaagcuccacaccuccccccucugcaccaccaacaccaaggagggcuccaacaucugccucacccgcaccgaccgcggcugguacugcgacaacgccggcuccgucuccuucuucccccaggccgagaccugcaagguccaguccaaccgcgucuucugcgacaccaugaacucccgcacccuccccuccgaggucaaccucugcaacaucgacaucuucaaccccaaguacgacugcaagaucaugaccuccaagaccgacgucuccuccuccgucaucaccucccucggcgccaucgucuccugcuacggcaagaccaagugcaccgccuccaacaagaaccgcggcaucaucaagaccuucuccaacggcugcgacuacgucuccaacaagggcgucgacaccgucuccgucggcaacacccucuacugcgucaacaagcaggagggcaagucccucuacgucaagggcgagcccaucaucaacuucuacgacccccucgucuuccccuccgacgaguucgacgccuccaucucccaggucaacgagaagaucaaccagucccucgccuucauccgcaaguccgacgagcuccuccacaacgucaacgucggcaaguccaccaccaacaucaugaucaccaccaucaucaucgucaucaucgucauccuccuccuccucaucgccgucggccucuuccucuacugcaaggcccgcuccacccccgucacccucuccaaggaccagcucuccggcaucaacaacaucgccuucuccaacugaggacuaguguccaccugucccuccugggcugcuggauugucucguuuuccugccaaauaaacaggaucagcgcuuuacagaucuaaaaaaaaaaaaaaaaaaaaaaaaaaaaaaaaaaaaaaaaaaaaaaaaaaaaaaaaaaaaaaaaugcaucccccccccccccccccccccccccccccccaaaggcucuuuucagagccaccagaauu

SEQ ID NO: 16350 - RNA, 1943 nt, Artificial Sequence
  mRNA product Design e-4 comprising derived and/or modified sequence from HRSV(Memphis-37)__AIY60640.1__F_DSCav1_mut4 (opt3)
gggagacuccugucgggcggaaguaggaggaguagaguuuaaaaacaguacucuuuuuccgguucgggacguaguugaagcaacgacaagccggauaaccgcucuugagacaggaagcuuaccauggagcugcccauccucaagaccaacgccauuacaacuauacuugcugcagugacgcugugcuucgccagcucccagaauaucaccgaagaguuuuaccaaucuacauguucagcggucaguaaaggcuauuugagcgcuuuaagaacugggugguacaccuccguuauuacaaucgaacugucuaacauuaaggagaauaaaugcaacggaaccgacgccaaggugaaacuaaucaagcaggaacucgauaaguauaaaaaugcaguaacugagcugcagcuucugaugcagucgaccccugccgcugguucaggcagcgcaauauguagugggaucgccgugugcaaggucuugcaccucgagggagaagugaacaaaauuaagaaugcucugcuguccacaaacaaagccguugugucucucagcaauggcgucuccguguuaacguucaagguacuggaccuuaagaacuacaucgauaaacaauugcugccaauucuaaauaagcagucauguaguaucagcaacauagagacuguuauugaauuucagcagaaaaauaacaggcuccuggagaucacccgggaguucucugugaaugcgggugucacaacuccgguguccaccuauaugcuuacaaacucagaacuguugagccucauuaacgacaugcccaucaccaaugaucaaaagaaacugaugaguaacaaugugcagaucguccgccagcagucuuacuccauuaugugcauaaucaaggaggaaguuuuagcauaugugguacaacugccucucuacggggugauugacacgccauguuggaaacuucauacuagcccccugugcacaaccaacacuaaggagggaucgaauaucuguuugacacgaaccgaucguggcugguacugcgacaacgccggcucugucuccuuuuucccucaggcugaaacguguaaggugcagucaaauagaguguuuugcgauaccaugaacaguagaacacugccaagcgaggugaaucucugcaacauagacauuuucaaucccaaauaugauuguaagaucaugacuuccaaaaccgacgucucuagcucagugaucacaagucugggggccauuguauccugcuacggaaagacuaaauguaccgcaagcaacaagaauagggguaucauuaagacauuuucuaacggcugcgauuauguuucaaauaaagggguggacaccgucagugugggaaacacucuuuacugugucaacaagcaagagggcaaaagccuguaugugaagggugaaccuauaaucaauuucuacgacccauugguuuuuccguccgaugaguucgacgcuucuauuucgcagguuaacgagaaaaucaaucagagccucgccuuuauccggaaguccgaugaacuguuacacaacguaaaugucgggaagucaacgacaaacauuaugauaaccacuaucauuaucgugauuaucguuauacugcuacuccugaucgcggugggacuuuucuuguauugcaaagcccgcaguacccccgucacacugucuaaggaccagcucagcggcauuaauaacaucgcauucuccaauugaggacuaguguccaccugucccuccugggcugcuggauugucucguuuuccugccaaauaaacaggaucagcgcuuuacagaucuaaaaaaaaaaaaaaaaaaaaaaaaaaaaaaaaaaaaaaaaaaaaaaaaaaaaaaaaaaaaaaaaugcaucccccccccccccccccccccccccccccccaaaggcucuuuucagagccaccagaauu

SEQ ID NO: 16351 - RNA, 1943 nt, Artificial Sequence
  mRNA product Design e-4 comprising derived and/or modified sequence from HRSV(Memphis-37)__AIY60640.1__F_DSCav1_mut4 (opt4)
gggagacuccugucgggcggaaguaggaggaguagaguuuaaaaacaguacucuuuuuccgguucgggacguaguugaagcaacgacaagccggauaaccgcucuugagacaggaagcuuaccauggagcugcccauccugaagaccaacgccaucaccaccauccuggccgccgugacccugugcuucgccagcagccagaacaucaccgaggaguucuaccagagcaccugcagcgccgugagcaagggcuaccugagcgcccugagaaccggcugguacaccagcgugaucaccaucgagcugagcaacaucaaggagaacaagugcaacggcaccgacgccaaggugaagcugaucaagcaggagcuggacaaguacaagaacgccgugaccgagcugcagcugcugaugcagagcacccccgccgccggcagcggcagcgccaucugcagcggcaucgccgugugcaaggugcugcaccuggagggcgaggugaacaagaucaagaacgcccugcugagcaccaacaaggccguggugagccugagcaacggcgugagcgugcugaccuucaaggugcuggaccugaagaacuacaucgacaagcagcugcugcccauccugaacaagcagagcugcagcaucagcaacaucgagaccgugaucgaguuccagcagaagaacaacagacugcuggagaucaccagagaguucagcgugaacgccggcgugaccacccccgugagcaccuacaugcugaccaacagcgagcugcugagccugaucaacgacaugcccaucaccaacgaccagaagaagcugaugagcaacaacgugcagaucgugagacagcagagcuacagcaucaugugcaucaucaaggaggaggugcuggccuacguggugcagcugccccuguacggcgugaucgacacccccugcuggaagcugcacaccagcccccugugcaccaccaacaccaaggagggcagcaacaucugccugaccagaaccgacagaggcugguacugcgacaacgccggcagcgugagcuucuucccccaggccgagaccugcaaggugcagagcaacagaguguucugcgacaccaugaacagcagaacccugcccagcgaggugaaccugugcaacaucgacaucuucaaccccaaguacgacugcaagaucaugaccagcaagaccgacgugagcagcagcgugaucaccagccugggcgccaucgugagcugcuacggcaagaccaagugcaccgccagcaacaagaacagaggcaucaucaagaccuucagcaacggcugcgacuacgugagcaacaagggcguggacaccgugagcgugggcaacacccuguacugcgugaacaagcaggagggcaagagccuguacgugaagggcgagcccaucaucaacuucuacgacccccugguguuccccagcgacgaguucgacgccagcaucagccaggugaacgagaagaucaaccagagccuggccuucaucagaaagagcgacgagcugcugcacaacgugaacgugggcaagagcaccaccaacaucaugaucaccaccaucaucaucgugaucaucgugauccugcugcugcugaucgccgugggccuguuccuguacugcaaggccagaagcacccccgugacccugagcaaggaccagcugagcggcaucaacaacaucgccuucagcaacugaggacuaguguccaccugucccuccugggcugcuggauugucucguuuuccugccaaauaaacaggaucagcgcuuuacagaucuaaaaaaaaaaaaaaaaaaaaaaaaaaaaaaaaaaaaaaaaaaaaaaaaaaaaaaaaaaaaaaaaugcaucccccccccccccccccccccccccccccccaaaggcucuuuucagagccaccagaauu

SEQ ID NO: 16352 - RNA, 1943 nt, Artificial Sequence
  mRNA product Design e-4 comprising derived and/or modified sequence from HRSV(Memphis-37)__AIY60640.1__F_DSCav1_mut4 (opt5)
gggagacuccugucgggcggaaguaggaggaguagaguuuaaaaacaguacucuuuuuccgguucgggacguaguugaagcaacgacaagccggauaaccgcucuugagacaggaagcuuaccauggagcugcccauccucaagaccaacgccauuacaacgauccuggcugccgugacccuuugcuucgcgagcucccagaauauuacagaagaguuuuaccaaucuaccuguagcgcugucuccaaaggcuaucugucugcccucagaacagggugguacaccagcguuaucacaauugaacuguccaacaucaaggagaauaaaugcaacggaaccgacgccaaggugaaacuuaucaagcaggaacuggauaaguauaaaaaugcugugacggagcuccagcugcugaugcagucuaccccugccgcuggcagcggguccgccauuuguagcggaaucgcggucugcaaggugcuccaccuggagggcgaaguuaacaaaauuaagaaugcccuucugucuacaaacaaagcuguggucucccucagcaauggggugucuguucugaccuucaaggugcuugaccugaagaacuacaucgauaaacaacuccugccgauucugaauaagcaguccuguagcaucucuaacauugagacagucaucgaauuucagcagaaaaauaaccggcuccuggagaucacccgcgaguucuccgugaaugccggagugacgacacccgucagcaccuauaugcuuacaaacuccgaacugcucucucugauuaacgacaugccuaucaccaaugaucaaaagaaacuuaugagcaacaauguucagauugugagacagcaguccuacagcaucaugugcauuaucaaggaggaagugcuggcuuaugucgugcaacucccccuguacggcguuaucgacaccccuuguuggaaacugcauacaucuccccucugcacgaccaacacaaaggagggcuccaauauuugucugacccggacagaucgcgggugguacugcgacaacgccggaagcgugagcuuuuucccucaggcggaaaccuguaagguccagucuaauagaguguuuugcgauacgaugaacuccagaacacugccgucugagguuaaucucugcaacaucgacauuuucaaucccaaauaugauuguaagaucaugaccagcaaaaccgacguguccagcucugucauuacaucccugggcgccaucgugagcugcuacgggaagaccaaauguacagcuucuaacaagaaucggggaaucauuaagacguuuuccaacggcugcgauuaugucagcaauaaagggguggacaccguuuccgugggaaacacacuuuacugugucaacaagcaagagggcaaaucucuguaugugaagggcgaaccuaucauuaauuucuacgacccccucguuuuuccuagcgaugaguucgacgccuccaucucucaggugaacgaaaagauuaaucagagccuggcuuuuauccgcaaguccgaugagcugcuccacaacgucaauguggggaaaagcaccacaaacauuaugaucaccacgaucauuaucgugauuaucguuauucugcuucugcucaucgccgucggacuguuccuguauugcaaagccagaucuacccccgugacacuuuccaaggaccagcucagcggcaucaauaacauugcuuucucuaauugaggacuaguguccaccugucccuccugggcugcuggauugucucguuuuccugccaaauaaacaggaucagcgcuuuacagaucuaaaaaaaaaaaaaaaaaaaaaaaaaaaaaaaaaaaaaaaaaaaaaaaaaaaaaaaaaaaaaaaaugcaucccccccccccccccccccccccccccccccaaaggcucuuuucagagccaccagaauu

SEQ ID NO: 16353 - RNA, 1943 nt, Artificial Sequence
  mRNA product Design e-4 comprising derived and/or modified sequence from HRSV(Memphis-37)__AIY60640.1__F_DSCav1_mut4 (opt6)
gggagacuccugucgggcggaaguaggaggaguagaguuuaaaaacaguacucuuuuuccgguucgggacguaguugaagcaacgacaagccggauaaccgcucuugagacaggaagcuuaccauggaacucccaauccuaaaaacaaacgcaauaacaacaauauuagcagccguaacacucuguuucgccucaucccaaaacauaacagaagaauuuuaucaaucuacauguuccgccgucaguaaaggauaucuaucagccuuaagaacaggcugguacacaucaguaaucaccauagaauuauccaacauaaaagaaaacaaaugcaauggcacagaugccaaaguaaaacuaaucaaacaagaacuugauaaauauaaaaacgcaguaacagaauuacaauuauuaaugcaaagcacaccagccgcaggaucaggaucagcaauauguucaggaauagcagucuguaaaguacuacacuuagaaggagaaguaaacaaaauuaaaaacgcauuacuaagcaccaauaaagcaguaguaucacuaucaaacggcguauccguauuaacguucaaaguccucgaccugaaaaacuacauagauaaacaacuacuaccaauacuaaauaaacaaucaugcucaauaucaaacauagaaacuguuaucgaauuucaacagaaaaauaaccgacuacuagaaaucaccagagaauuuucaguaaacgcaggcgucacuacaccaguauccacauacaugcuaaccaacucggaauuacuuucccucauaaacgacaugccaauaacaaacgaccaaaagaaacuuaugucaaacaacguucaaauaguccgccaacaaucauacucaauaauguguaucauaaaagaagaaguccuagcauaugucguacaacuaccauuauacggaguaauugacacaccuugcuggaaacuacacacauccccacuauguacaacaaacacuaaagaaggaucaaacaucugccuaaccagaacagacagaggcugguauugcgacaacgcaggaucaguaucauucuucccacaagcagaaacaugcaaaguacaaucaaacagagucuucugcgacaccaugaacagcagaacccucccauccgaaguaaacuuaugcaacaucgauaucuucaacccaaaauacgacuguaaaauaaugacaucaaaaacagacguuucauccucaguaauaacaucauuaggugccauaguuucauguuacggaaaaaccaaauguaccgcaucaaacaaaaacagaggcauuauuaaaacauucucuaacggaugcgacuaugucaguaacaaaggaguagacacaguaucagucggaaacacauuauauugcguaaauaaacaagaaggaaaaagucuauacguaaaaggagaaccaauaauaaacuuuuacgacccucucguauucccaucagacgaauuugaugcauccauaucacaagucaacgaaaagauaaaccaaucccuagcauucauaagaaaaucagacgaacuacuccauaacguaaacguaggaaaaagcacaaccaauauaaugauaaccacaauaaucauaguaauaauagucauauuauuacuuuuaauugcaguaggacucuuucuauacugcaaagcaagaagcacaccaguaacacuaagcaaagaccaacuaucaggcaucaacaauaucgccuuuucaaauuaaggacuaguguccaccugucccuccugggcugcuggauugucucguuuuccugccaaauaaacaggaucagcgcuuuacagaucuaaaaaaaaaaaaaaaaaaaaaaaaaaaaaaaaaaaaaaaaaaaaaaaaaaaaaaaaaaaaaaaaugcaucccccccccccccccccccccccccccccccaaaggcucuuuucagagccaccagaauu

SEQ ID NO: 16354 - RNA, 1943 nt, Artificial Sequence
  mRNA product Design e-4 comprising derived and/or modified sequence from HRSV(Memphis-37)__AIY60640.1__F_DSCav1_mut4 (opt11)
gggagacuccugucgggcggaaguaggaggaguagaguuuaaaaacaguacucuuuuuccgguucgggacguaguugaagcaacgacaagccggauaaccgcucuugagacaggaagcuuaccauggagcugcccauccucaagaccaacgccaucaccacgauccuggccgcggugacccugugcuucgcgagcucccagaacaucaccgaggaguucuaccagagcacgugcuccgccgucagcaagggcuaccucuccgcccugcgcaccgggugguacaccagcgugaucaccaucgagcuguccaacaucaaggagaacaagugcaacggcaccgacgccaaggugaaacucaucaagcaggagcuggacaaguacaagaacgccgucaccgagcugcagcuccugaugcagagcaccccggccgccggguccggcagcgcuaucugcuccgggaucgcggugugcaaggugcugcaccucgagggcgaggucaacaagaucaagaaugcccugcugagcaccaacaaggccguggugucccucagcaacggagucagcgugcuuaccuucaaggugcuggaccucaagaacuacaucgacaagcagcugcugccuauccucaacaagcagagcugcuccaucagcaacaucgagacggucaucgaguuccagcagaagaacaaccggcugcuggagaucacccgcgaguucuccgugaacgccggggugaccacccccgucagcacguacaugcucaccaacagcgaacugcugucccucaucaacgacaugcccaucaccaacgaccagaagaagcugaugagcaacaacgugcagaucgugcggcagcaguccuacagcaucaugugcaucaucaaggaggaaguccuggccuacguggugcagcucccucuguacggcgucaucgacacccccugcuggaagcugcacacgagcccccucugcaccaccaacaccaaggagggguccaacaucugccugacgcgcaccgaccggggcugguacugcgacaacgcgggguccgugagcuucuucccccaggccgagaccugcaaggugcagagcaaccgcgucuucugcgacacuaugaacagcagaacgcucccguccgaggugaaccugugcaacauagacauauucaaccccaaguacgacugcaagaucaugaccagcaagaccgacgucuccagcuccgugauuaccagccugggcgcaaucguguccugcuacggcaagacgaagugcaccgccagcaacaagaaccgggggaucaucaagaccuucuccaacggcugcgacuaugucagcaacaaggggguggacaccgugagcgucggaaacacgcucuacugcgugaacaagcaagagggcaaguccuuauacgugaagggggagcccaucaucaacuucuacgacccccuggucuucccgagcgacgaguucgacgccagcauaagccaggugaacgagaagaucaaccagucccucgcguucauccgcaagagcgacgagcugcugcacaacgugaacgucggcaaguccaccaccaacaucaugaucaccaccaucaucaucgugaucaucgugauccuccugcugcucaucgccgucgggcuguuccuguacugcaaggcccggagcacgcccgugaccuuguccaaggaccagcucagcggcaucaacaacaucgccuucuccaacugaggacuaguguccaccugucccuccugggcugcuggauugucucguuuuccugccaaauaaacaggaucagcgcuuuacagaucuaaaaaaaaaaaaaaaaaaaaaaaaaaaaaaaaaaaaaaaaaaaaaaaaaaaaaaaaaaaaaaaaugcaucccccccccccccccccccccccccccccccaaaggcucuuuucagagccaccagaauu

SEQ ID NO: 16355 - RNA, 1910 nt, Artificial Sequence
  mRNA product Design e-5 comprising derived and/or modified sequence from HRSV(Memphis-37)__AIY60640.1__F_DSCav1_mut4 (opt1)
gggagagcggcucggccauuuugucccagucaguccggaggcugcggcugcagaaguaccgccugcggaguaacugcaaagaagcuuaccauggagcugcccauccucaagaccaacgccaucaccacgauccuggccgcggugacccugugcuucgccagcucccagaacaucaccgaggaguucuaccagagcacgugcuccgccgucagcaagggcuaccucuccgcccugcgcaccgggugguacaccagcgugaucaccaucgagcuguccaacaucaaggagaacaagugcaacggcaccgacgccaaggugaagcucaucaagcaggagcuggacaaguacaagaacgcggucacggagcugcagcuccugaugcagagcaccccggccgccggcuccgggagcgcgaucugcuccggcaucgccgucugcaaggugcugcaccucgagggcgaggugaacaagaucaagaacgcccugcuguccaccaacaaggccgucgugagccucuccaacggggugagcguccugaccuucaaggugcuggaccucaagaacuacaucgacaagcagcugcugcccauccugaacaagcagagcugcuccaucagcaacaucgagaccgucaucgaguuccagcagaagaacaaccgccuccuggagaucacgcgggaguucagcgugaacgcgggcgugaccacccccgucuccaccuacaugcugacgaacagcgagcuccugucccugaucaacgacaugccgaucaccaacgaccagaagaagcucaugagcaacaacgugcagaucgugcgccagcaguccuacagcaucaugugcaucaucaaggaggagguccuggccuacguggugcagcugccccucuacggggucaucgacacccccugcuggaagcugcacaccagcccccugugcacgaccaacaccaaggagggcuccaacaucugccucacccggacggaccgcgggugguacugcgacaacgccggcagcguguccuucuucccgcaggccgagaccugcaagguccagagcaaccggguguucugcgacaccaugaacucccggacccugcccagcgaggugaaccucugcaacaucgacaucuucaaccccaaguacgacugcaagaucaugacguccaagaccgacgucagcuccagcgugaucaccucccugggcgccaucgugagcugcuacgggaagaccaagugcacggcgagcaacaagaaccgcggcaucaucaagaccuucuccaacgggugcgacuacgucagcaacaagggcguggacaccguguccgucggcaacacccuguacugcgugaacaagcaggagggcaagagccucuacgugaagggggagcccaucaucaacuucuacgacccgcuggucuuccccuccgacgaguucgacgccagcaucucccaggugaacgagaagaucaaccagagccuggccuucauccggaaguccgacgagcuccugcacaacgugaacgucggcaagagcaccacgaacaucaugaucaccaccaucaucaucgugaucaucgugauccugcugcuccugaucgccgucgggcuguuccucuacugcaaggcccgcuccacccccgugacgcugagcaaggaccagcuguccgggaucaacaacaucgcguucagcaacugaggacuaguguccaccugucccuccugggcugcuggauugucucguuuuccugccaaauaaacaggaucagcgcuuuacagaucuaaaaaaaaaaaaaaaaaaaaaaaaaaaaaaaaaaaaaaaaaaaaaaaaaaaaaaaaaaaaaaaaugcaucccccccccccccccccccccccccccccccaaaggcucuuuucagagccaccagaauu

SEQ ID NO: 16356 - RNA, 1910 nt, Artificial Sequence
  mRNA product Design e-5 comprising derived and/or modified sequence from HRSV(Memphis-37)__AIY60640.1__F_DSCav1_mut4 (opt1)
gggagagcggcucggccauuuugucccagucaguccggaggcugcggcugcagaaguaccgccugcggaguaacugcaaagaagcuuaccauggagcugcccauccucaagaccaacgccaucaccacgauccuggccgcggugacccugugcuucgccagcucccagaacaucaccgaggaguucuaccagagcacgugcuccgccgucagcaagggcuaccucuccgcccugcgcaccgggugguacaccagcgugaucaccaucgagcuguccaacaucaaggagaacaagugcaacggcaccgacgccaaggugaagcucaucaagcaggagcuggacaaguacaagaacgcggucacggagcugcagcuccugaugcagagcaccccggccgccggguccggcagcgccaucugcuccgggaucgcggugugcaaggugcugcaccucgagggcgaggucaacaagaucaagaacgcccugcugagcaccaacaaggccguggugucccucagcaacggcgucuccgugcugaccuucaaggugcuggaccucaagaacuacaucgacaagcagcugcugcccauccucaacaagcagagcugcuccaucagcaacaucgagacggucaucgaguuccagcagaagaacaaccggcugcuggagaucacccgcgaguucuccgugaacgccggggugaccacccccgucagcacguacaugcucaccaacagcgagcugcugucccucaucaacgacaugcccaucaccaacgaccagaagaagcugaugagcaacaacgugcagaucgugcggcagcaguccuacagcaucaugugcaucaucaaggaggagguccuggccuacguggugcagcucccgcuguacggcgucaucgacacccccugcuggaagcugcacacgagcccccucugcaccaccaacaccaaggagggguccaacaucugccugacgcgcaccgaccggggcugguacugcgacaacgcgggguccgugagcuucuucccccaggccgagaccugcaaggugcaguccaaccgcgucuucugcgacaccaugaacagccggacgcucccguccgaggugaaccugugcaacaucgacaucuucaaccccaaguacgacugcaagaucaugaccagcaagaccgacgucuccagcuccgugaucaccagccugggcgccaucguguccugcuacggcaagacgaagugcaccgccagcaacaagaaccgggggaucaucaagaccuucuccaacggcugcgacuacgucagcaacaaggggguggacaccgugagcgucggcaacacgcucuacugcgugaacaagcaggagggcaagucccuguacgugaagggggagcccaucaucaacuucuacgacccccuggucuucccgagcgacgaguucgacgccuccaucagccaggugaacgagaagaucaaccagucccucgcguucauccgcaagagcgacgagcugcugcacaacgugaacgucggcaaguccaccaccaacaucaugaucaccaccaucaucaucgugaucaucgugauccuccugcugcucaucgccgucgggcuguuccuguacugcaaggcccggagcacgcccgugacccuguccaaggaccagcucagcggcaucaacaacaucgccuucuccaacugaggacuaguguccaccugucccuccugggcugcuggauugucucguuuuccugccaaauaaacaggaucagcgcuuuacagaucuaaaaaaaaaaaaaaaaaaaaaaaaaaaaaaaaaaaaaaaaaaaaaaaaaaaaaaaaaaaaaaaaugcaucccccccccccccccccccccccccccccccaaaggcucuuuucagagccaccagaauu

SEQ ID NO: 16357 - RNA, 1910 nt, Artificial Sequence
  mRNA product Design e-5 comprising derived and/or modified sequence from HRSV(Memphis-37)__AIY60640.1__F_DSCav1_mut4 (opt2)
gggagagcggcucggccauuuugucccagucaguccggaggcugcggcugcagaaguaccgccugcggaguaacugcaaagaagcuuaccauggagcuccccauccucaagaccaacgccaucaccaccauccucgccgccgucacccucugcuucgccuccucccagaacaucaccgaggaguucuaccaguccaccugcuccgccgucuccaagggcuaccucuccgcccuccgcaccggcugguacaccuccgucaucaccaucgagcucuccaacaucaaggagaacaagugcaacggcaccgacgccaaggucaagcucaucaagcaggagcucgacaaguacaagaacgccgucaccgagcuccagcuccucaugcaguccacccccgccgccggcuccggcuccgccaucugcuccggcaucgccgucugcaagguccuccaccucgagggcgaggucaacaagaucaagaacgcccuccucuccaccaacaaggccgucgucucccucuccaacggcgucuccguccucaccuucaagguccucgaccucaagaacuacaucgacaagcagcuccuccccauccucaacaagcaguccugcuccaucuccaacaucgagaccgucaucgaguuccagcagaagaacaaccgccuccucgagaucacccgcgaguucuccgucaacgccggcgucaccacccccgucuccaccuacaugcucaccaacuccgagcuccucucccucaucaacgacaugcccaucaccaacgaccagaagaagcucauguccaacaacguccagaucguccgccagcaguccuacuccaucaugugcaucaucaaggaggagguccucgccuacgucguccagcucccccucuacggcgucaucgacacccccugcuggaagcuccacaccuccccccucugcaccaccaacaccaaggagggcuccaacaucugccucacccgcaccgaccgcggcugguacugcgacaacgccggcuccgucuccuucuucccccaggccgagaccugcaagguccaguccaaccgcgucuucugcgacaccaugaacucccgcacccuccccuccgaggucaaccucugcaacaucgacaucuucaaccccaaguacgacugcaagaucaugaccuccaagaccgacgucuccuccuccgucaucaccucccucggcgccaucgucuccugcuacggcaagaccaagugcaccgccuccaacaagaaccgcggcaucaucaagaccuucuccaacggcugcgacuacgucuccaacaagggcgucgacaccgucuccgucggcaacacccucuacugcgucaacaagcaggagggcaagucccucuacgucaagggcgagcccaucaucaacuucuacgacccccucgucuuccccuccgacgaguucgacgccuccaucucccaggucaacgagaagaucaaccagucccucgccuucauccgcaaguccgacgagcuccuccacaacgucaacgucggcaaguccaccaccaacaucaugaucaccaccaucaucaucgucaucaucgucauccuccuccuccucaucgccgucggccucuuccucuacugcaaggcccgcuccacccccgucacccucuccaaggaccagcucuccggcaucaacaacaucgccuucuccaacugaggacuaguguccaccugucccuccugggcugcuggauugucucguuuuccugccaaauaaacaggaucagcgcuuuacagaucuaaaaaaaaaaaaaaaaaaaaaaaaaaaaaaaaaaaaaaaaaaaaaaaaaaaaaaaaaaaaaaaaugcaucccccccccccccccccccccccccccccccaaaggcucuuuucagagccaccagaauu

SEQ ID NO: 16358 - RNA, 1910 nt, Artificial Sequence
  mRNA product Design e-5 comprising derived and/or modified sequence from HRSV(Memphis-37)__AIY60640.1__F_DSCav1_mut4 (opt3)
gggagagcggcucggccauuuugucccagucaguccggaggcugcggcugcagaaguaccgccugcggaguaacugcaaagaagcuuaccauggagcugcccauccucaagaccaacgccauuacaacuauacuugcugcagugacgcugugcuucgccagcucccagaauaucaccgaagaguuuuaccaaucuacauguucagcggucaguaaaggcuauuugagcgcuuuaagaacugggugguacaccuccguuauuacaaucgaacugucuaacauuaaggagaauaaaugcaacggaaccgacgccaaggugaaacuaaucaagcaggaacucgauaaguauaaaaaugcaguaacugagcugcagcuucugaugcagucgaccccugccgcugguucaggcagcgcaauauguagugggaucgccgugugcaaggucuugcaccucgagggagaagugaacaaaauuaagaaugcucugcuguccacaaacaaagccguugugucucucagcaauggcgucuccguguuaacguucaagguacuggaccuuaagaacuacaucgauaaacaauugcugccaauucuaaauaagcagucauguaguaucagcaacauagagacuguuauugaauuucagcagaaaaauaacaggcuccuggagaucacccgggaguucucugugaaugcgggugucacaacuccgguguccaccuauaugcuuacaaacucagaacuguugagccucauuaacgacaugcccaucaccaaugaucaaaagaaacugaugaguaacaaugugcagaucguccgccagcagucuuacuccauuaugugcauaaucaaggaggaaguuuuagcauaugugguacaacugccucucuacggggugauugacacgccauguuggaaacuucauacuagcccccugugcacaaccaacacuaaggagggaucgaauaucuguuugacacgaaccgaucguggcugguacugcgacaacgccggcucugucuccuuuuucccucaggcugaaacguguaaggugcagucaaauagaguguuuugcgauaccaugaacaguagaacacugccaagcgaggugaaucucugcaacauagacauuuucaaucccaaauaugauuguaagaucaugacuuccaaaaccgacgucucuagcucagugaucacaagucugggggccauuguauccugcuacggaaagacuaaauguaccgcaagcaacaagaauagggguaucauuaagacauuuucuaacggcugcgauuauguuucaaauaaagggguggacaccgucagugugggaaacacucuuuacugugucaacaagcaagagggcaaaagccuguaugugaagggugaaccuauaaucaauuucuacgacccauugguuuuuccguccgaugaguucgacgcuucuauuucgcagguuaacgagaaaaucaaucagagccucgccuuuauccggaaguccgaugaacuguuacacaacguaaaugucgggaagucaacgacaaacauuaugauaaccacuaucauuaucgugauuaucguuauacugcuacuccugaucgcggugggacuuuucuuguauugcaaagcccgcaguacccccgucacacugucuaaggaccagcucagcggcauuaauaacaucgcauucuccaauugaggacuaguguccaccugucccuccugggcugcuggauugucucguuuuccugccaaauaaacaggaucagcgcuuuacagaucuaaaaaaaaaaaaaaaaaaaaaaaaaaaaaaaaaaaaaaaaaaaaaaaaaaaaaaaaaaaaaaaaugcaucccccccccccccccccccccccccccccccaaaggcucuuuucagagccaccagaauu

SEQ ID NO: 16359 - RNA, 1910 nt, Artificial Sequence
  mRNA product Design e-5 comprising derived and/or modified sequence from HRSV(Memphis-37)__AIY60640.1__F_DSCav1_mut4 (opt4)
gggagagcggcucggccauuuugucccagucaguccggaggcugcggcugcagaaguaccgccugcggaguaacugcaaagaagcuuaccauggagcugcccauccugaagaccaacgccaucaccaccauccuggccgccgugacccugugcuucgccagcagccagaacaucaccgaggaguucuaccagagcaccugcagcgccgugagcaagggcuaccugagcgcccugagaaccggcugguacaccagcgugaucaccaucgagcugagcaacaucaaggagaacaagugcaacggcaccgacgccaaggugaagcugaucaagcaggagcuggacaaguacaagaacgccgugaccgagcugcagcugcugaugcagagcacccccgccgccggcagcggcagcgccaucugcagcggcaucgccgugugcaaggugcugcaccuggagggcgaggugaacaagaucaagaacgcccugcugagcaccaacaaggccguggugagccugagcaacggcgugagcgugcugaccuucaaggugcuggaccugaagaacuacaucgacaagcagcugcugcccauccugaacaagcagagcugcagcaucagcaacaucgagaccgugaucgaguuccagcagaagaacaacagacugcuggagaucaccagagaguucagcgugaacgccggcgugaccacccccgugagcaccuacaugcugaccaacagcgagcugcugagccugaucaacgacaugcccaucaccaacgaccagaagaagcugaugagcaacaacgugcagaucgugagacagcagagcuacagcaucaugugcaucaucaaggaggaggugcuggccuacguggugcagcugccccuguacggcgugaucgacacccccugcuggaagcugcacaccagcccccugugcaccaccaacaccaaggagggcagcaacaucugccugaccagaaccgacagaggcugguacugcgacaacgccggcagcgugagcuucuucccccaggccgagaccugcaaggugcagagcaacagaguguucugcgacaccaugaacagcagaacccugcccagcgaggugaaccugugcaacaucgacaucuucaaccccaaguacgacugcaagaucaugaccagcaagaccgacgugagcagcagcgugaucaccagccugggcgccaucgugagcugcuacggcaagaccaagugcaccgccagcaacaagaacagaggcaucaucaagaccuucagcaacggcugcgacuacgugagcaacaagggcguggacaccgugagcgugggcaacacccuguacugcgugaacaagcaggagggcaagagccuguacgugaagggcgagcccaucaucaacuucuacgacccccugguguuccccagcgacgaguucgacgccagcaucagccaggugaacgagaagaucaaccagagccuggccuucaucagaaagagcgacgagcugcugcacaacgugaacgugggcaagagcaccaccaacaucaugaucaccaccaucaucaucgugaucaucgugauccugcugcugcugaucgccgugggccuguuccuguacugcaaggccagaagcacccccgugacccugagcaaggaccagcugagcggcaucaacaacaucgccuucagcaacugaggacuaguguccaccugucccuccugggcugcuggauugucucguuuuccugccaaauaaacaggaucagcgcuuuacagaucuaaaaaaaaaaaaaaaaaaaaaaaaaaaaaaaaaaaaaaaaaaaaaaaaaaaaaaaaaaaaaaaaugcaucccccccccccccccccccccccccccccccaaaggcucuuuucagagccaccagaauu

SEQ ID NO: 16360 - RNA, 1910 nt, Artificial Sequence
  mRNA product Design e-5 comprising derived and/or modified sequence from HRSV(Memphis-37)__AIY60640.1__F_DSCav1_mut4 (opt5)
gggagagcggcucggccauuuugucccagucaguccggaggcugcggcugcagaaguaccgccugcggaguaacugcaaagaagcuuaccauggagcugcccauccucaagaccaacgccauuacaacgauccuggcugccgugacccuuugcuucgcgagcucccagaauauuacagaagaguuuuaccaaucuaccuguagcgcugucuccaaaggcuaucugucugcccucagaacagggugguacaccagcguuaucacaauugaacuguccaacaucaaggagaauaaaugcaacggaaccgacgccaaggugaaacuuaucaagcaggaacuggauaaguauaaaaaugcugugacggagcuccagcugcugaugcagucuaccccugccgcuggcagcggguccgccauuuguagcggaaucgcggucugcaaggugcuccaccuggagggcgaaguuaacaaaauuaagaaugcccuucugucuacaaacaaagcuguggucucccucagcaauggggugucuguucugaccuucaaggugcuugaccugaagaacuacaucgauaaacaacuccugccgauucugaauaagcaguccuguagcaucucuaacauugagacagucaucgaauuucagcagaaaaauaaccggcuccuggagaucacccgcgaguucuccgugaaugccggagugacgacacccgucagcaccuauaugcuuacaaacuccgaacugcucucucugauuaacgacaugccuaucaccaaugaucaaaagaaacuuaugagcaacaauguucagauugugagacagcaguccuacagcaucaugugcauuaucaaggaggaagugcuggcuuaugucgugcaacucccccuguacggcguuaucgacaccccuuguuggaaacugcauacaucuccccucugcacgaccaacacaaaggagggcuccaauauuugucugacccggacagaucgcgggugguacugcgacaacgccggaagcgugagcuuuuucccucaggcggaaaccuguaagguccagucuaauagaguguuuugcgauacgaugaacuccagaacacugccgucugagguuaaucucugcaacaucgacauuuucaaucccaaauaugauuguaagaucaugaccagcaaaaccgacguguccagcucugucauuacaucccugggcgccaucgugagcugcuacgggaagaccaaauguacagcuucuaacaagaaucggggaaucauuaagacguuuuccaacggcugcgauuaugucagcaauaaagggguggacaccguuuccgugggaaacacacuuuacugugucaacaagcaagagggcaaaucucuguaugugaagggcgaaccuaucauuaauuucuacgacccccucguuuuuccuagcgaugaguucgacgccuccaucucucaggugaacgaaaagauuaaucagagccuggcuuuuauccgcaaguccgaugagcugcuccacaacgucaauguggggaaaagcaccacaaacauuaugaucaccacgaucauuaucgugauuaucguuauucugcuucugcucaucgccgucggacuguuccuguauugcaaagccagaucuacccccgugacacuuuccaaggaccagcucagcggcaucaauaacauugcuuucucuaauugaggacuaguguccaccugucccuccugggcugcuggauugucucguuuuccugccaaauaaacaggaucagcgcuuuacagaucuaaaaaaaaaaaaaaaaaaaaaaaaaaaaaaaaaaaaaaaaaaaaaaaaaaaaaaaaaaaaaaaaugcaucccccccccccccccccccccccccccccccaaaggcucuuuucagagccaccagaauu

SEQ ID NO: 16361 - RNA, 1910 nt, Artificial Sequence
  mRNA product Design e-5 comprising derived and/or modified sequence from HRSV(Memphis-37)__AIY60640.1__F_DSCav1_mut4 (opt6)
gggagagcggcucggccauuuugucccagucaguccggaggcugcggcugcagaaguaccgccugcggaguaacugcaaagaagcuuaccauggaacucccaauccuaaaaacaaacgcaauaacaacaauauuagcagccguaacacucuguuucgccucaucccaaaacauaacagaagaauuuuaucaaucuacauguuccgccgucaguaaaggauaucuaucagccuuaagaacaggcugguacacaucaguaaucaccauagaauuauccaacauaaaagaaaacaaaugcaauggcacagaugccaaaguaaaacuaaucaaacaagaacuugauaaauauaaaaacgcaguaacagaauuacaauuauuaaugcaaagcacaccagccgcaggaucaggaucagcaauauguucaggaauagcagucuguaaaguacuacacuuagaaggagaaguaaacaaaauuaaaaacgcauuacuaagcaccaauaaagcaguaguaucacuaucaaacggcguauccguauuaacguucaaaguccucgaccugaaaaacuacauagauaaacaacuacuaccaauacuaaauaaacaaucaugcucaauaucaaacauagaaacuguuaucgaauuucaacagaaaaauaaccgacuacuagaaaucaccagagaauuuucaguaaacgcaggcgucacuacaccaguauccacauacaugcuaaccaacucggaauuacuuucccucauaaacgacaugccaauaacaaacgaccaaaagaaacuuaugucaaacaacguucaaauaguccgccaacaaucauacucaauaauguguaucauaaaagaagaaguccuagcauaugucguacaacuaccauuauacggaguaauugacacaccuugcuggaaacuacacacauccccacuauguacaacaaacacuaaagaaggaucaaacaucugccuaaccagaacagacagaggcugguauugcgacaacgcaggaucaguaucauucuucccacaagcagaaacaugcaaaguacaaucaaacagagucuucugcgacaccaugaacagcagaacccucccauccgaaguaaacuuaugcaacaucgauaucuucaacccaaaauacgacuguaaaauaaugacaucaaaaacagacguuucauccucaguaauaacaucauuaggugccauaguuucauguuacggaaaaaccaaauguaccgcaucaaacaaaaacagaggcauuauuaaaacauucucuaacggaugcgacuaugucaguaacaaaggaguagacacaguaucagucggaaacacauuauauugcguaaauaaacaagaaggaaaaagucuauacguaaaaggagaaccaauaauaaacuuuuacgacccucucguauucccaucagacgaauuugaugcauccauaucacaagucaacgaaaagauaaaccaaucccuagcauucauaagaaaaucagacgaacuacuccauaacguaaacguaggaaaaagcacaaccaauauaaugauaaccacaauaaucauaguaauaauagucauauuauuacuuuuaauugcaguaggacucuuucuauacugcaaagcaagaagcacaccaguaacacuaagcaaagaccaacuaucaggcaucaacaauaucgccuuuucaaauuaaggacuaguguccaccugucccuccugggcugcuggauugucucguuuuccugccaaauaaacaggaucagcgcuuuacagaucuaaaaaaaaaaaaaaaaaaaaaaaaaaaaaaaaaaaaaaaaaaaaaaaaaaaaaaaaaaaaaaaaugcaucccccccccccccccccccccccccccccccaaaggcucuuuucagagccaccagaauu

SEQ ID NO: 16362 - RNA, 1910 nt, Artificial Sequence
  mRNA product Design e-5 comprising derived and/or modified sequence from HRSV(Memphis-37)__AIY60640.1__F_DSCav1_mut4 (opt11)
gggagagcggcucggccauuuugucccagucaguccggaggcugcggcugcagaaguaccgccugcggaguaacugcaaagaagcuuaccauggagcugcccauccucaagaccaacgccaucaccacgauccuggccgcggugacccugugcuucgcgagcucccagaacaucaccgaggaguucuaccagagcacgugcuccgccgucagcaagggcuaccucuccgcccugcgcaccgggugguacaccagcgugaucaccaucgagcuguccaacaucaaggagaacaagugcaacggcaccgacgccaaggugaaacucaucaagcaggagcuggacaaguacaagaacgccgucaccgagcugcagcuccugaugcagagcaccccggccgccggguccggcagcgcuaucugcuccgggaucgcggugugcaaggugcugcaccucgagggcgaggucaacaagaucaagaaugcccugcugagcaccaacaaggccguggugucccucagcaacggagucagcgugcuuaccuucaaggugcuggaccucaagaacuacaucgacaagcagcugcugccuauccucaacaagcagagcugcuccaucagcaacaucgagacggucaucgaguuccagcagaagaacaaccggcugcuggagaucacccgcgaguucuccgugaacgccggggugaccacccccgucagcacguacaugcucaccaacagcgaacugcugucccucaucaacgacaugcccaucaccaacgaccagaagaagcugaugagcaacaacgugcagaucgugcggcagcaguccuacagcaucaugugcaucaucaaggaggaaguccuggccuacguggugcagcucccucuguacggcgucaucgacacccccugcuggaagcugcacacgagcccccucugcaccaccaacaccaaggagggguccaacaucugccugacgcgcaccgaccggggcugguacugcgacaacgcgggguccgugagcuucuucccccaggccgagaccugcaaggugcagagcaaccgcgucuucugcgacacuaugaacagcagaacgcucccguccgaggugaaccugugcaacauagacauauucaaccccaaguacgacugcaagaucaugaccagcaagaccgacgucuccagcuccgugauuaccagccugggcgcaaucguguccugcuacggcaagacgaagugcaccgccagcaacaagaaccgggggaucaucaagaccuucuccaacggcugcgacuaugucagcaacaaggggguggacaccgugagcgucggaaacacgcucuacugcgugaacaagcaagagggcaaguccuuauacgugaagggggagcccaucaucaacuucuacgacccccuggucuucccgagcgacgaguucgacgccagcauaagccaggugaacgagaagaucaaccagucccucgcguucauccgcaagagcgacgagcugcugcacaacgugaacgucggcaaguccaccaccaacaucaugaucaccaccaucaucaucgugaucaucgugauccuccugcugcucaucgccgucgggcuguuccuguacugcaaggcccggagcacgcccgugaccuuguccaaggaccagcucagcggcaucaacaacaucgccuucuccaacugaggacuaguguccaccugucccuccugggcugcuggauugucucguuuuccugccaaauaaacaggaucagcgcuuuacagaucuaaaaaaaaaaaaaaaaaaaaaaaaaaaaaaaaaaaaaaaaaaaaaaaaaaaaaaaaaaaaaaaaugcaucccccccccccccccccccccccccccccccaaaggcucuuuucagagccaccagaauu

SEQ ID NO: 16363 - RNA, 1977 nt, Artificial Sequence
  mRNA product Design e-6 comprising derived and/or modified sequence from HRSV(Memphis-37)__AIY60640.1__F_DSCav1_mut4 (opt1)
gggagagcggcucggccauuuugucccagucaguccggaggcugcggcugcagaaguaccgccugcggaguaacugcaaagaagcuuaccauggagcugcccauccucaagaccaacgccaucaccacgauccuggccgcggugacccugugcuucgccagcucccagaacaucaccgaggaguucuaccagagcacgugcuccgccgucagcaagggcuaccucuccgcccugcgcaccgggugguacaccagcgugaucaccaucgagcuguccaacaucaaggagaacaagugcaacggcaccgacgccaaggugaagcucaucaagcaggagcuggacaaguacaagaacgcggucacggagcugcagcuccugaugcagagcaccccggccgccggcuccgggagcgcgaucugcuccggcaucgccgucugcaaggugcugcaccucgagggcgaggugaacaagaucaagaacgcccugcuguccaccaacaaggccgucgugagccucuccaacggggugagcguccugaccuucaaggugcuggaccucaagaacuacaucgacaagcagcugcugcccauccugaacaagcagagcugcuccaucagcaacaucgagaccgucaucgaguuccagcagaagaacaaccgccuccuggagaucacgcgggaguucagcgugaacgcgggcgugaccacccccgucuccaccuacaugcugacgaacagcgagcuccugucccugaucaacgacaugccgaucaccaacgaccagaagaagcucaugagcaacaacgugcagaucgugcgccagcaguccuacagcaucaugugcaucaucaaggaggagguccuggccuacguggugcagcugccccucuacggggucaucgacacccccugcuggaagcugcacaccagcccccugugcacgaccaacaccaaggagggcuccaacaucugccucacccggacggaccgcgggugguacugcgacaacgccggcagcguguccuucuucccgcaggccgagaccugcaagguccagagcaaccggguguucugcgacaccaugaacucccggacccugcccagcgaggugaaccucugcaacaucgacaucuucaaccccaaguacgacugcaagaucaugacguccaagaccgacgucagcuccagcgugaucaccucccugggcgccaucgugagcugcuacgggaagaccaagugcacggcgagcaacaagaaccgcggcaucaucaagaccuucuccaacgggugcgacuacgucagcaacaagggcguggacaccguguccgucggcaacacccuguacugcgugaacaagcaggagggcaagagccucuacgugaagggggagcccaucaucaacuucuacgacccgcuggucuuccccuccgacgaguucgacgccagcaucucccaggugaacgagaagaucaaccagagccuggccuucauccggaaguccgacgagcuccugcacaacgugaacgucggcaagagcaccacgaacaucaugaucaccaccaucaucaucgugaucaucgugauccugcugcuccugaucgccgucgggcuguuccucuacugcaaggcccgcuccacccccgugacgcugagcaaggaccagcuguccgggaucaacaacaucgcguucagcaacugaggacuaguacuggcugcaucucccuuuccucuguccuccauccuucucccaggauggugaagggggaccugguacccagugauccccaccccaggauccuaaaucaugacuuaccugcuaauaaaaacucauuggaaaagugagaagaucuaaaaaaaaaaaaaaaaaaaaaaaaaaaaaaaaaaaaaaaaaaaaaaaaaaaaaaaaaaaaaaaaugcaucccccccccccccccccccccccccccccccaaaggcucuuuucagagccaccagaauu

SEQ ID NO: 16364 - RNA, 1977 nt, Artificial Sequence
  mRNA product Design e-6 comprising derived and/or modified sequence from HRSV(Memphis-37)__AIY60640.1__F_DSCav1_mut4 (opt1)
gggagagcggcucggccauuuugucccagucaguccggaggcugcggcugcagaaguaccgccugcggaguaacugcaaagaagcuuaccauggagcugcccauccucaagaccaacgccaucaccacgauccuggccgcggugacccugugcuucgccagcucccagaacaucaccgaggaguucuaccagagcacgugcuccgccgucagcaagggcuaccucuccgcccugcgcaccgggugguacaccagcgugaucaccaucgagcuguccaacaucaaggagaacaagugcaacggcaccgacgccaaggugaagcucaucaagcaggagcuggacaaguacaagaacgcggucacggagcugcagcuccugaugcagagcaccccggccgccggguccggcagcgccaucugcuccgggaucgcggugugcaaggugcugcaccucgagggcgaggucaacaagaucaagaacgcccugcugagcaccaacaaggccguggugucccucagcaacggcgucuccgugcugaccuucaaggugcuggaccucaagaacuacaucgacaagcagcugcugcccauccucaacaagcagagcugcuccaucagcaacaucgagacggucaucgaguuccagcagaagaacaaccggcugcuggagaucacccgcgaguucuccgugaacgccggggugaccacccccgucagcacguacaugcucaccaacagcgagcugcugucccucaucaacgacaugcccaucaccaacgaccagaagaagcugaugagcaacaacgugcagaucgugcggcagcaguccuacagcaucaugugcaucaucaaggaggagguccuggccuacguggugcagcucccgcuguacggcgucaucgacacccccugcuggaagcugcacacgagcccccucugcaccaccaacaccaaggagggguccaacaucugccugacgcgcaccgaccggggcugguacugcgacaacgcgggguccgugagcuucuucccccaggccgagaccugcaaggugcaguccaaccgcgucuucugcgacaccaugaacagccggacgcucccguccgaggugaaccugugcaacaucgacaucuucaaccccaaguacgacugcaagaucaugaccagcaagaccgacgucuccagcuccgugaucaccagccugggcgccaucguguccugcuacggcaagacgaagugcaccgccagcaacaagaaccgggggaucaucaagaccuucuccaacggcugcgacuacgucagcaacaaggggguggacaccgugagcgucggcaacacgcucuacugcgugaacaagcaggagggcaagucccuguacgugaagggggagcccaucaucaacuucuacgacccccuggucuucccgagcgacgaguucgacgccuccaucagccaggugaacgagaagaucaaccagucccucgcguucauccgcaagagcgacgagcugcugcacaacgugaacgucggcaaguccaccaccaacaucaugaucaccaccaucaucaucgugaucaucgugauccuccugcugcucaucgccgucgggcuguuccuguacugcaaggcccggagcacgcccgugacccuguccaaggaccagcucagcggcaucaacaacaucgccuucuccaacugaggacuaguacuggcugcaucucccuuuccucuguccuccauccuucucccaggauggugaagggggaccugguacccagugauccccaccccaggauccuaaaucaugacuuaccugcuaauaaaaacucauuggaaaagugagaagaucuaaaaaaaaaaaaaaaaaaaaaaaaaaaaaaaaaaaaaaaaaaaaaaaaaaaaaaaaaaaaaaaaugcaucccccccccccccccccccccccccccccccaaaggcucuuuucagagccaccagaauu

SEQ ID NO: 16365 - RNA, 1977 nt, Artificial Sequence
  mRNA product Design e-6 comprising derived and/or modified sequence from HRSV(Memphis-37)__AIY60640.1__F_DSCav1_mut4 (opt2)
gggagagcggcucggccauuuugucccagucaguccggaggcugcggcugcagaaguaccgccugcggaguaacugcaaagaagcuuaccauggagcuccccauccucaagaccaacgccaucaccaccauccucgccgccgucacccucugcuucgccuccucccagaacaucaccgaggaguucuaccaguccaccugcuccgccgucuccaagggcuaccucuccgcccuccgcaccggcugguacaccuccgucaucaccaucgagcucuccaacaucaaggagaacaagugcaacggcaccgacgccaaggucaagcucaucaagcaggagcucgacaaguacaagaacgccgucaccgagcuccagcuccucaugcaguccacccccgccgccggcuccggcuccgccaucugcuccggcaucgccgucugcaagguccuccaccucgagggcgaggucaacaagaucaagaacgcccuccucuccaccaacaaggccgucgucucccucuccaacggcgucuccguccucaccuucaagguccucgaccucaagaacuacaucgacaagcagcuccuccccauccucaacaagcaguccugcuccaucuccaacaucgagaccgucaucgaguuccagcagaagaacaaccgccuccucgagaucacccgcgaguucuccgucaacgccggcgucaccacccccgucuccaccuacaugcucaccaacuccgagcuccucucccucaucaacgacaugcccaucaccaacgaccagaagaagcucauguccaacaacguccagaucguccgccagcaguccuacuccaucaugugcaucaucaaggaggagguccucgccuacgucguccagcucccccucuacggcgucaucgacacccccugcuggaagcuccacaccuccccccucugcaccaccaacaccaaggagggcuccaacaucugccucacccgcaccgaccgcggcugguacugcgacaacgccggcuccgucuccuucuucccccaggccgagaccugcaagguccaguccaaccgcgucuucugcgacaccaugaacucccgcacccuccccuccgaggucaaccucugcaacaucgacaucuucaaccccaaguacgacugcaagaucaugaccuccaagaccgacgucuccuccuccgucaucaccucccucggcgccaucgucuccugcuacggcaagaccaagugcaccgccuccaacaagaaccgcggcaucaucaagaccuucuccaacggcugcgacuacgucuccaacaagggcgucgacaccgucuccgucggcaacacccucuacugcgucaacaagcaggagggcaagucccucuacgucaagggcgagcccaucaucaacuucuacgacccccucgucuuccccuccgacgaguucgacgccuccaucucccaggucaacgagaagaucaaccagucccucgccuucauccgcaaguccgacgagcuccuccacaacgucaacgucggcaaguccaccaccaacaucaugaucaccaccaucaucaucgucaucaucgucauccuccuccuccucaucgccgucggccucuuccucuacugcaaggcccgcuccacccccgucacccucuccaaggaccagcucuccggcaucaacaacaucgccuucuccaacugaggacuaguacuggcugcaucucccuuuccucuguccuccauccuucucccaggauggugaagggggaccugguacccagugauccccaccccaggauccuaaaucaugacuuaccugcuaauaaaaacucauuggaaaagugagaagaucuaaaaaaaaaaaaaaaaaaaaaaaaaaaaaaaaaaaaaaaaaaaaaaaaaaaaaaaaaaaaaaaaugcaucccccccccccccccccccccccccccccccaaaggcucuuuucagagccaccagaauu

SEQ ID NO: 16366 - RNA, 1977 nt, Artificial Sequence
  mRNA product Design e-6 comprising derived and/or modified sequence from HRSV(Memphis-37)__AIY60640.1__F_DSCav1_mut4 (opt3)
gggagagcggcucggccauuuugucccagucaguccggaggcugcggcugcagaaguaccgccugcggaguaacugcaaagaagcuuaccauggagcugcccauccucaagaccaacgccauuacaacuauacuugcugcagugacgcugugcuucgccagcucccagaauaucaccgaagaguuuuaccaaucuacauguucagcggucaguaaaggcuauuugagcgcuuuaagaacugggugguacaccuccguuauuacaaucgaacugucuaacauuaaggagaauaaaugcaacggaaccgacgccaaggugaaacuaaucaagcaggaacucgauaaguauaaaaaugcaguaacugagcugcagcuucugaugcagucgaccccugccgcugguucaggcagcgcaauauguagugggaucgccgugugcaaggucuugcaccucgagggagaagugaacaaaauuaagaaugcucugcuguccacaaacaaagccguugugucucucagcaauggcgucuccguguuaacguucaagguacuggaccuuaagaacuacaucgauaaacaauugcugccaauucuaaauaagcagucauguaguaucagcaacauagagacuguuauugaauuucagcagaaaaauaacaggcuccuggagaucacccgggaguucucugugaaugcgggugucacaacuccgguguccaccuauaugcuuacaaacucagaacuguugagccucauuaacgacaugcccaucaccaaugaucaaaagaaacugaugaguaacaaugugcagaucguccgccagcagucuuacuccauuaugugcauaaucaaggaggaaguuuuagcauaugugguacaacugccucucuacggggugauugacacgccauguuggaaacuucauacuagcccccugugcacaaccaacacuaaggagggaucgaauaucuguuugacacgaaccgaucguggcugguacugcgacaacgccggcucugucuccuuuuucccucaggcugaaacguguaaggugcagucaaauagaguguuuugcgauaccaugaacaguagaacacugccaagcgaggugaaucucugcaacauagacauuuucaaucccaaauaugauuguaagaucaugacuuccaaaaccgacgucucuagcucagugaucacaagucugggggccauuguauccugcuacggaaagacuaaauguaccgcaagcaacaagaauagggguaucauuaagacauuuucuaacggcugcgauuauguuucaaauaaagggguggacaccgucagugugggaaacacucuuuacugugucaacaagcaagagggcaaaagccuguaugugaagggugaaccuauaaucaauuucuacgacccauugguuuuuccguccgaugaguucgacgcuucuauuucgcagguuaacgagaaaaucaaucagagccucgccuuuauccggaaguccgaugaacuguuacacaacguaaaugucgggaagucaacgacaaacauuaugauaaccacuaucauuaucgugauuaucguuauacugcuacuccugaucgcggugggacuuuucuuguauugcaaagcccgcaguacccccgucacacugucuaaggaccagcucagcggcauuaauaacaucgcauucuccaauugaggacuaguacuggcugcaucucccuuuccucuguccuccauccuucucccaggauggugaagggggaccugguacccagugauccccaccccaggauccuaaaucaugacuuaccugcuaauaaaaacucauuggaaaagugagaagaucuaaaaaaaaaaaaaaaaaaaaaaaaaaaaaaaaaaaaaaaaaaaaaaaaaaaaaaaaaaaaaaaaugcaucccccccccccccccccccccccccccccccaaaggcucuuuucagagccaccagaauu

SEQ ID NO: 16367 - RNA, 1977 nt, Artificial Sequence
  mRNA product Design e-6 comprising derived and/or modified sequence from HRSV(Memphis-37)__AIY60640.1__F_DSCav1_mut4 (opt4)
gggagagcggcucggccauuuugucccagucaguccggaggcugcggcugcagaaguaccgccugcggaguaacugcaaagaagcuuaccauggagcugcccauccugaagaccaacgccaucaccaccauccuggccgccgugacccugugcuucgccagcagccagaacaucaccgaggaguucuaccagagcaccugcagcgccgugagcaagggcuaccugagcgcccugagaaccggcugguacaccagcgugaucaccaucgagcugagcaacaucaaggagaacaagugcaacggcaccgacgccaaggugaagcugaucaagcaggagcuggacaaguacaagaacgccgugaccgagcugcagcugcugaugcagagcacccccgccgccggcagcggcagcgccaucugcagcggcaucgccgugugcaaggugcugcaccuggagggcgaggugaacaagaucaagaacgcccugcugagcaccaacaaggccguggugagccugagcaacggcgugagcgugcugaccuucaaggugcuggaccugaagaacuacaucgacaagcagcugcugcccauccugaacaagcagagcugcagcaucagcaacaucgagaccgugaucgaguuccagcagaagaacaacagacugcuggagaucaccagagaguucagcgugaacgccggcgugaccacccccgugagcaccuacaugcugaccaacagcgagcugcugagccugaucaacgacaugcccaucaccaacgaccagaagaagcugaugagcaacaacgugcagaucgugagacagcagagcuacagcaucaugugcaucaucaaggaggaggugcuggccuacguggugcagcugccccuguacggcgugaucgacacccccugcuggaagcugcacaccagcccccugugcaccaccaacaccaaggagggcagcaacaucugccugaccagaaccgacagaggcugguacugcgacaacgccggcagcgugagcuucuucccccaggccgagaccugcaaggugcagagcaacagaguguucugcgacaccaugaacagcagaacccugcccagcgaggugaaccugugcaacaucgacaucuucaaccccaaguacgacugcaagaucaugaccagcaagaccgacgugagcagcagcgugaucaccagccugggcgccaucgugagcugcuacggcaagaccaagugcaccgccagcaacaagaacagaggcaucaucaagaccuucagcaacggcugcgacuacgugagcaacaagggcguggacaccgugagcgugggcaacacccuguacugcgugaacaagcaggagggcaagagccuguacgugaagggcgagcccaucaucaacuucuacgacccccugguguuccccagcgacgaguucgacgccagcaucagccaggugaacgagaagaucaaccagagccuggccuucaucagaaagagcgacgagcugcugcacaacgugaacgugggcaagagcaccaccaacaucaugaucaccaccaucaucaucgugaucaucgugauccugcugcugcugaucgccgugggccuguuccuguacugcaaggccagaagcacccccgugacccugagcaaggaccagcugagcggcaucaacaacaucgccuucagcaacugaggacuaguacuggcugcaucucccuuuccucuguccuccauccuucucccaggauggugaagggggaccugguacccagugauccccaccccaggauccuaaaucaugacuuaccugcuaauaaaaacucauuggaaaagugagaagaucuaaaaaaaaaaaaaaaaaaaaaaaaaaaaaaaaaaaaaaaaaaaaaaaaaaaaaaaaaaaaaaaaugcaucccccccccccccccccccccccccccccccaaaggcucuuuucagagccaccagaauu

SEQ ID NO: 16368 - RNA, 1977 nt, Artificial Sequence
  mRNA product Design e-6 comprising derived and/or modified sequence from HRSV(Memphis-37)__AIY60640.1__F_DSCav1_mut4 (opt5)
gggagagcggcucggccauuuugucccagucaguccggaggcugcggcugcagaaguaccgccugcggaguaacugcaaagaagcuuaccauggagcugcccauccucaagaccaacgccauuacaacgauccuggcugccgugacccuuugcuucgcgagcucccagaauauuacagaagaguuuuaccaaucuaccuguagcgcugucuccaaaggcuaucugucugcccucagaacagggugguacaccagcguuaucacaauugaacuguccaacaucaaggagaauaaaugcaacggaaccgacgccaaggugaaacuuaucaagcaggaacuggauaaguauaaaaaugcugugacggagcuccagcugcugaugcagucuaccccugccgcuggcagcggguccgccauuuguagcggaaucgcggucugcaaggugcuccaccuggagggcgaaguuaacaaaauuaagaaugcccuucugucuacaaacaaagcuguggucucccucagcaauggggugucuguucugaccuucaaggugcuugaccugaagaacuacaucgauaaacaacuccugccgauucugaauaagcaguccuguagcaucucuaacauugagacagucaucgaauuucagcagaaaaauaaccggcuccuggagaucacccgcgaguucuccgugaaugccggagugacgacacccgucagcaccuauaugcuuacaaacuccgaacugcucucucugauuaacgacaugccuaucaccaaugaucaaaagaaacuuaugagcaacaauguucagauugugagacagcaguccuacagcaucaugugcauuaucaaggaggaagugcuggcuuaugucgugcaacucccccuguacggcguuaucgacaccccuuguuggaaacugcauacaucuccccucugcacgaccaacacaaaggagggcuccaauauuugucugacccggacagaucgcgggugguacugcgacaacgccggaagcgugagcuuuuucccucaggcggaaaccuguaagguccagucuaauagaguguuuugcgauacgaugaacuccagaacacugccgucugagguuaaucucugcaacaucgacauuuucaaucccaaauaugauuguaagaucaugaccagcaaaaccgacguguccagcucugucauuacaucccugggcgccaucgugagcugcuacgggaagaccaaauguacagcuucuaacaagaaucggggaaucauuaagacguuuuccaacggcugcgauuaugucagcaauaaagggguggacaccguuuccgugggaaacacacuuuacugugucaacaagcaagagggcaaaucucuguaugugaagggcgaaccuaucauuaauuucuacgacccccucguuuuuccuagcgaugaguucgacgccuccaucucucaggugaacgaaaagauuaaucagagccuggcuuuuauccgcaaguccgaugagcugcuccacaacgucaauguggggaaaagcaccacaaacauuaugaucaccacgaucauuaucgugauuaucguuauucugcuucugcucaucgccgucggacuguuccuguauugcaaagccagaucuacccccgugacacuuuccaaggaccagcucagcggcaucaauaacauugcuuucucuaauugaggacuaguacuggcugcaucucccuuuccucuguccuccauccuucucccaggauggugaagggggaccugguacccagugauccccaccccaggauccuaaaucaugacuuaccugcuaauaaaaacucauuggaaaagugagaagaucuaaaaaaaaaaaaaaaaaaaaaaaaaaaaaaaaaaaaaaaaaaaaaaaaaaaaaaaaaaaaaaaaugcaucccccccccccccccccccccccccccccccaaaggcucuuuucagagccaccagaauu

SEQ ID NO: 16369 - RNA, 1977 nt, Artificial Sequence
  mRNA product Design e-6 comprising derived and/or modified sequence from HRSV(Memphis-37)__AIY60640.1__F_DSCav1_mut4 (opt6)
gggagagcggcucggccauuuugucccagucaguccggaggcugcggcugcagaaguaccgccugcggaguaacugcaaagaagcuuaccauggaacucccaauccuaaaaacaaacgcaauaacaacaauauuagcagccguaacacucuguuucgccucaucccaaaacauaacagaagaauuuuaucaaucuacauguuccgccgucaguaaaggauaucuaucagccuuaagaacaggcugguacacaucaguaaucaccauagaauuauccaacauaaaagaaaacaaaugcaauggcacagaugccaaaguaaaacuaaucaaacaagaacuugauaaauauaaaaacgcaguaacagaauuacaauuauuaaugcaaagcacaccagccgcaggaucaggaucagcaauauguucaggaauagcagucuguaaaguacuacacuuagaaggagaaguaaacaaaauuaaaaacgcauuacuaagcaccaauaaagcaguaguaucacuaucaaacggcguauccguauuaacguucaaaguccucgaccugaaaaacuacauagauaaacaacuacuaccaauacuaaauaaacaaucaugcucaauaucaaacauagaaacuguuaucgaauuucaacagaaaaauaaccgacuacuagaaaucaccagagaauuuucaguaaacgcaggcgucacuacaccaguauccacauacaugcuaaccaacucggaauuacuuucccucauaaacgacaugccaauaacaaacgaccaaaagaaacuuaugucaaacaacguucaaauaguccgccaacaaucauacucaauaauguguaucauaaaagaagaaguccuagcauaugucguacaacuaccauuauacggaguaauugacacaccuugcuggaaacuacacacauccccacuauguacaacaaacacuaaagaaggaucaaacaucugccuaaccagaacagacagaggcugguauugcgacaacgcaggaucaguaucauucuucccacaagcagaaacaugcaaaguacaaucaaacagagucuucugcgacaccaugaacagcagaacccucccauccgaaguaaacuuaugcaacaucgauaucuucaacccaaaauacgacuguaaaauaaugacaucaaaaacagacguuucauccucaguaauaacaucauuaggugccauaguuucauguuacggaaaaaccaaauguaccgcaucaaacaaaaacagaggcauuauuaaaacauucucuaacggaugcgacuaugucaguaacaaaggaguagacacaguaucagucggaaacacauuauauugcguaaauaaacaagaaggaaaaagucuauacguaaaaggagaaccaauaauaaacuuuuacgacccucucguauucccaucagacgaauuugaugcauccauaucacaagucaacgaaaagauaaaccaaucccuagcauucauaagaaaaucagacgaacuacuccauaacguaaacguaggaaaaagcacaaccaauauaaugauaaccacaauaaucauaguaauaauagucauauuauuacuuuuaauugcaguaggacucuuucuauacugcaaagcaagaagcacaccaguaacacuaagcaaagaccaacuaucaggcaucaacaauaucgccuuuucaaauuaaggacuaguacuggcugcaucucccuuuccucuguccuccauccuucucccaggauggugaagggggaccugguacccagugauccccaccccaggauccuaaaucaugacuuaccugcuaauaaaaacucauuggaaaagugagaagaucuaaaaaaaaaaaaaaaaaaaaaaaaaaaaaaaaaaaaaaaaaaaaaaaaaaaaaaaaaaaaaaaaugcaucccccccccccccccccccccccccccccccaaaggcucuuuucagagccaccagaauu

SEQ ID NO: 16370 - RNA, 1977 nt, Artificial Sequence
  mRNA product Design e-6 comprising derived and/or modified sequence from HRSV(Memphis-37)__AIY60640.1__F_DSCav1_mut4 (opt11)
gggagagcggcucggccauuuugucccagucaguccggaggcugcggcugcagaaguaccgccugcggaguaacugcaaagaagcuuaccauggagcugcccauccucaagaccaacgccaucaccacgauccuggccgcggugacccugugcuucgcgagcucccagaacaucaccgaggaguucuaccagagcacgugcuccgccgucagcaagggcuaccucuccgcccugcgcaccgggugguacaccagcgugaucaccaucgagcuguccaacaucaaggagaacaagugcaacggcaccgacgccaaggugaaacucaucaagcaggagcuggacaaguacaagaacgccgucaccgagcugcagcuccugaugcagagcaccccggccgccggguccggcagcgcuaucugcuccgggaucgcggugugcaaggugcugcaccucgagggcgaggucaacaagaucaagaaugcccugcugagcaccaacaaggccguggugucccucagcaacggagucagcgugcuuaccuucaaggugcuggaccucaagaacuacaucgacaagcagcugcugccuauccucaacaagcagagcugcuccaucagcaacaucgagacggucaucgaguuccagcagaagaacaaccggcugcuggagaucacccgcgaguucuccgugaacgccggggugaccacccccgucagcacguacaugcucaccaacagcgaacugcugucccucaucaacgacaugcccaucaccaacgaccagaagaagcugaugagcaacaacgugcagaucgugcggcagcaguccuacagcaucaugugcaucaucaaggaggaaguccuggccuacguggugcagcucccucuguacggcgucaucgacacccccugcuggaagcugcacacgagcccccucugcaccaccaacaccaaggagggguccaacaucugccugacgcgcaccgaccggggcugguacugcgacaacgcgggguccgugagcuucuucccccaggccgagaccugcaaggugcagagcaaccgcgucuucugcgacacuaugaacagcagaacgcucccguccgaggugaaccugugcaacauagacauauucaaccccaaguacgacugcaagaucaugaccagcaagaccgacgucuccagcuccgugauuaccagccugggcgcaaucguguccugcuacggcaagacgaagugcaccgccagcaacaagaaccgggggaucaucaagaccuucuccaacggcugcgacuaugucagcaacaaggggguggacaccgugagcgucggaaacacgcucuacugcgugaacaagcaagagggcaaguccuuauacgugaagggggagcccaucaucaacuucuacgacccccuggucuucccgagcgacgaguucgacgccagcauaagccaggugaacgagaagaucaaccagucccucgcguucauccgcaagagcgacgagcugcugcacaacgugaacgucggcaaguccaccaccaacaucaugaucaccaccaucaucaucgugaucaucgugauccuccugcugcucaucgccgucgggcuguuccuguacugcaaggcccggagcacgcccgugaccuuguccaaggaccagcucagcggcaucaacaacaucgccuucuccaacugaggacuaguacuggcugcaucucccuuuccucuguccuccauccuucucccaggauggugaagggggaccugguacccagugauccccaccccaggauccuaaaucaugacuuaccugcuaauaaaaacucauuggaaaagugagaagaucuaaaaaaaaaaaaaaaaaaaaaaaaaaaaaaaaaaaaaaaaaaaaaaaaaaaaaaaaaaaaaaaaugcaucccccccccccccccccccccccccccccccaaaggcucuuuucagagccaccagaauu

SEQ ID NO: 16371 - RNA, 2193 nt, Artificial Sequence
  mRNA product Design f-1 comprising derived and/or modified sequence from HRSV(Memphis-37)__AIY60640.1__F_DSCav1_mut4 (opt1)
gggagagcggcucggccauuuugucccagucaguccggaggcugcggcugcagaaguaccgccugcggaguaacugcaaagaagcuuaccauggagcugcccauccucaagaccaacgccaucaccacgauccuggccgcggugacccugugcuucgccagcucccagaacaucaccgaggaguucuaccagagcacgugcuccgccgucagcaagggcuaccucuccgcccugcgcaccgggugguacaccagcgugaucaccaucgagcuguccaacaucaaggagaacaagugcaacggcaccgacgccaaggugaagcucaucaagcaggagcuggacaaguacaagaacgcggucacggagcugcagcuccugaugcagagcaccccggccgccggcuccgggagcgcgaucugcuccggcaucgccgucugcaaggugcugcaccucgagggcgaggugaacaagaucaagaacgcccugcuguccaccaacaaggccgucgugagccucuccaacggggugagcguccugaccuucaaggugcuggaccucaagaacuacaucgacaagcagcugcugcccauccugaacaagcagagcugcuccaucagcaacaucgagaccgucaucgaguuccagcagaagaacaaccgccuccuggagaucacgcgggaguucagcgugaacgcgggcgugaccacccccgucuccaccuacaugcugacgaacagcgagcuccugucccugaucaacgacaugccgaucaccaacgaccagaagaagcucaugagcaacaacgugcagaucgugcgccagcaguccuacagcaucaugugcaucaucaaggaggagguccuggccuacguggugcagcugccccucuacggggucaucgacacccccugcuggaagcugcacaccagcccccugugcacgaccaacaccaaggagggcuccaacaucugccucacccggacggaccgcgggugguacugcgacaacgccggcagcguguccuucuucccgcaggccgagaccugcaagguccagagcaaccggguguucugcgacaccaugaacucccggacccugcccagcgaggugaaccucugcaacaucgacaucuucaaccccaaguacgacugcaagaucaugacguccaagaccgacgucagcuccagcgugaucaccucccugggcgccaucgugagcugcuacgggaagaccaagugcacggcgagcaacaagaaccgcggcaucaucaagaccuucuccaacgggugcgacuacgucagcaacaagggcguggacaccguguccgucggcaacacccuguacugcgugaacaagcaggagggcaagagccucuacgugaagggggagcccaucaucaacuucuacgacccgcuggucuuccccuccgacgaguucgacgccagcaucucccaggugaacgagaagaucaaccagagccuggccuucauccggaaguccgacgagcuccugcacaacgugaacgucggcaagagcaccacgaacaucaugaucaccaccaucaucaucgugaucaucgugauccugcugcuccugaucgccgucgggcuguuccucuacugcaaggcccgcuccacccccgugacgcugagcaaggaccagcuguccgggaucaacaacaucgcguucagcaacugaggacuagugaagggaacacccaaauuuaauucagccuuaagcacaauuaauuaagagugaaacguaauuguacaagcaguuggucacccaccauagggcaugaucaacaccgcaaccuuuccuuuuucccccagugauucugaaaaaccccucuucccuucagcuugcuuagauguuccaaauuuaguaagcuuaaggcggccuacagaagaaaaagaaaaaaaaggccacaaaaguucccucucacuuucaguaaauaaaauaaaagcagcaacagaaauaaagaaauaaaugaaauucaaaaugaaauaaauauuguguugugcagcauuaaaaaaucaauaaaaauuaaaaaugagcaagaucuaaaaaaaaaaaaaaaaaaaaaaaaaaaaaaaaaaaaaaaaaaaaaaaaaaaaaaaaaaaaaaaaugcaucccccccccccccccccccccccccccccccaaaggcucuuuucagagccaccagaauu

SEQ ID NO: 16372 - RNA, 2193 nt, Artificial Sequence
  mRNA product Design f-1 comprising derived and/or modified sequence from HRSV(Memphis-37)__AIY60640.1__F_DSCav1_mut4 (opt1)
gggagagcggcucggccauuuugucccagucaguccggaggcugcggcugcagaaguaccgccugcggaguaacugcaaagaagcuuaccauggagcugcccauccucaagaccaacgccaucaccacgauccuggccgcggugacccugugcuucgccagcucccagaacaucaccgaggaguucuaccagagcacgugcuccgccgucagcaagggcuaccucuccgcccugcgcaccgggugguacaccagcgugaucaccaucgagcuguccaacaucaaggagaacaagugcaacggcaccgacgccaaggugaagcucaucaagcaggagcuggacaaguacaagaacgcggucacggagcugcagcuccugaugcagagcaccccggccgccggguccggcagcgccaucugcuccgggaucgcggugugcaaggugcugcaccucgagggcgaggucaacaagaucaagaacgcccugcugagcaccaacaaggccguggugucccucagcaacggcgucuccgugcugaccuucaaggugcuggaccucaagaacuacaucgacaagcagcugcugcccauccucaacaagcagagcugcuccaucagcaacaucgagacggucaucgaguuccagcagaagaacaaccggcugcuggagaucacccgcgaguucuccgugaacgccggggugaccacccccgucagcacguacaugcucaccaacagcgagcugcugucccucaucaacgacaugcccaucaccaacgaccagaagaagcugaugagcaacaacgugcagaucgugcggcagcaguccuacagcaucaugugcaucaucaaggaggagguccuggccuacguggugcagcucccgcuguacggcgucaucgacacccccugcuggaagcugcacacgagcccccucugcaccaccaacaccaaggagggguccaacaucugccugacgcgcaccgaccggggcugguacugcgacaacgcgggguccgugagcuucuucccccaggccgagaccugcaaggugcaguccaaccgcgucuucugcgacaccaugaacagccggacgcucccguccgaggugaaccugugcaacaucgacaucuucaaccccaaguacgacugcaagaucaugaccagcaagaccgacgucuccagcuccgugaucaccagccugggcgccaucguguccugcuacggcaagacgaagugcaccgccagcaacaagaaccgggggaucaucaagaccuucuccaacggcugcgacuacgucagcaacaaggggguggacaccgugagcgucggcaacacgcucuacugcgugaacaagcaggagggcaagucccuguacgugaagggggagcccaucaucaacuucuacgacccccuggucuucccgagcgacgaguucgacgccuccaucagccaggugaacgagaagaucaaccagucccucgcguucauccgcaagagcgacgagcugcugcacaacgugaacgucggcaaguccaccaccaacaucaugaucaccaccaucaucaucgugaucaucgugauccuccugcugcucaucgccgucgggcuguuccuguacugcaaggcccggagcacgcccgugacccuguccaaggaccagcucagcggcaucaacaacaucgccuucuccaacugaggacuagugaagggaacacccaaauuuaauucagccuuaagcacaauuaauuaagagugaaacguaauuguacaagcaguuggucacccaccauagggcaugaucaacaccgcaaccuuuccuuuuucccccagugauucugaaaaaccccucuucccuucagcuugcuuagauguuccaaauuuaguaagcuuaaggcggccuacagaagaaaaagaaaaaaaaggccacaaaaguucccucucacuuucaguaaauaaaauaaaagcagcaacagaaauaaagaaauaaaugaaauucaaaaugaaauaaauauuguguugugcagcauuaaaaaaucaauaaaaauuaaaaaugagcaagaucuaaaaaaaaaaaaaaaaaaaaaaaaaaaaaaaaaaaaaaaaaaaaaaaaaaaaaaaaaaaaaaaaugcaucccccccccccccccccccccccccccccccaaaggcucuuuucagagccaccagaauu

SEQ ID NO: 16373 - RNA, 2193 nt, Artificial Sequence
  mRNA product Design f-1 comprising derived and/or modified sequence from HRSV(Memphis-37)__AIY60640.1__F_DSCav1_mut4 (opt2)
gggagagcggcucggccauuuugucccagucaguccggaggcugcggcugcagaaguaccgccugcggaguaacugcaaagaagcuuaccauggagcuccccauccucaagaccaacgccaucaccaccauccucgccgccgucacccucugcuucgccuccucccagaacaucaccgaggaguucuaccaguccaccugcuccgccgucuccaagggcuaccucuccgcccuccgcaccggcugguacaccuccgucaucaccaucgagcucuccaacaucaaggagaacaagugcaacggcaccgacgccaaggucaagcucaucaagcaggagcucgacaaguacaagaacgccgucaccgagcuccagcuccucaugcaguccacccccgccgccggcuccggcuccgccaucugcuccggcaucgccgucugcaagguccuccaccucgagggcgaggucaacaagaucaagaacgcccuccucuccaccaacaaggccgucgucucccucuccaacggcgucuccguccucaccuucaagguccucgaccucaagaacuacaucgacaagcagcuccuccccauccucaacaagcaguccugcuccaucuccaacaucgagaccgucaucgaguuccagcagaagaacaaccgccuccucgagaucacccgcgaguucuccgucaacgccggcgucaccacccccgucuccaccuacaugcucaccaacuccgagcuccucucccucaucaacgacaugcccaucaccaacgaccagaagaagcucauguccaacaacguccagaucguccgccagcaguccuacuccaucaugugcaucaucaaggaggagguccucgccuacgucguccagcucccccucuacggcgucaucgacacccccugcuggaagcuccacaccuccccccucugcaccaccaacaccaaggagggcuccaacaucugccucacccgcaccgaccgcggcugguacugcgacaacgccggcuccgucuccuucuucccccaggccgagaccugcaagguccaguccaaccgcgucuucugcgacaccaugaacucccgcacccuccccuccgaggucaaccucugcaacaucgacaucuucaaccccaaguacgacugcaagaucaugaccuccaagaccgacgucuccuccuccgucaucaccucccucggcgccaucgucuccugcuacggcaagaccaagugcaccgccuccaacaagaaccgcggcaucaucaagaccuucuccaacggcugcgacuacgucuccaacaagggcgucgacaccgucuccgucggcaacacccucuacugcgucaacaagcaggagggcaagucccucuacgucaagggcgagcccaucaucaacuucuacgacccccucgucuuccccuccgacgaguucgacgccuccaucucccaggucaacgagaagaucaaccagucccucgccuucauccgcaaguccgacgagcuccuccacaacgucaacgucggcaaguccaccaccaacaucaugaucaccaccaucaucaucgucaucaucgucauccuccuccuccucaucgccgucggccucuuccucuacugcaaggcccgcuccacccccgucacccucuccaaggaccagcucuccggcaucaacaacaucgccuucuccaacugaggacuagugaagggaacacccaaauuuaauucagccuuaagcacaauuaauuaagagugaaacguaauuguacaagcaguuggucacccaccauagggcaugaucaacaccgcaaccuuuccuuuuucccccagugauucugaaaaaccccucuucccuucagcuugcuuagauguuccaaauuuaguaagcuuaaggcggccuacagaagaaaaagaaaaaaaaggccacaaaaguucccucucacuuucaguaaauaaaauaaaagcagcaacagaaauaaagaaauaaaugaaauucaaaaugaaauaaauauuguguugugcagcauuaaaaaaucaauaaaaauuaaaaaugagcaagaucuaaaaaaaaaaaaaaaaaaaaaaaaaaaaaaaaaaaaaaaaaaaaaaaaaaaaaaaaaaaaaaaaugcaucccccccccccccccccccccccccccccccaaaggcucuuuucagagccaccagaauu

SEQ ID NO: 16374 - RNA, 2193 nt, Artificial Sequence
  mRNA product Design f-1 comprising derived and/or modified sequence from HRSV(Memphis-37)__AIY60640.1__F_DSCav1_mut4 (opt3)
gggagagcggcucggccauuuugucccagucaguccggaggcugcggcugcagaaguaccgccugcggaguaacugcaaagaagcuuaccauggagcugcccauccucaagaccaacgccauuacaacuauacuugcugcagugacgcugugcuucgccagcucccagaauaucaccgaagaguuuuaccaaucuacauguucagcggucaguaaaggcuauuugagcgcuuuaagaacugggugguacaccuccguuauuacaaucgaacugucuaacauuaaggagaauaaaugcaacggaaccgacgccaaggugaaacuaaucaagcaggaacucgauaaguauaaaaaugcaguaacugagcugcagcuucugaugcagucgaccccugccgcugguucaggcagcgcaauauguagugggaucgccgugugcaaggucuugcaccucgagggagaagugaacaaaauuaagaaugcucugcuguccacaaacaaagccguugugucucucagcaauggcgucuccguguuaacguucaagguacuggaccuuaagaacuacaucgauaaacaauugcugccaauucuaaauaagcagucauguaguaucagcaacauagagacuguuauugaauuucagcagaaaaauaacaggcuccuggagaucacccgggaguucucugugaaugcgggugucacaacuccgguguccaccuauaugcuuacaaacucagaacuguugagccucauuaacgacaugcccaucaccaaugaucaaaagaaacugaugaguaacaaugugcagaucguccgccagcagucuuacuccauuaugugcauaaucaaggaggaaguuuuagcauaugugguacaacugccucucuacggggugauugacacgccauguuggaaacuucauacuagcccccugugcacaaccaacacuaaggagggaucgaauaucuguuugacacgaaccgaucguggcugguacugcgacaacgccggcucugucuccuuuuucccucaggcugaaacguguaaggugcagucaaauagaguguuuugcgauaccaugaacaguagaacacugccaagcgaggugaaucucugcaacauagacauuuucaaucccaaauaugauuguaagaucaugacuuccaaaaccgacgucucuagcucagugaucacaagucugggggccauuguauccugcuacggaaagacuaaauguaccgcaagcaacaagaauagggguaucauuaagacauuuucuaacggcugcgauuauguuucaaauaaagggguggacaccgucagugugggaaacacucuuuacugugucaacaagcaagagggcaaaagccuguaugugaagggugaaccuauaaucaauuucuacgacccauugguuuuuccguccgaugaguucgacgcuucuauuucgcagguuaacgagaaaaucaaucagagccucgccuuuauccggaaguccgaugaacuguuacacaacguaaaugucgggaagucaacgacaaacauuaugauaaccacuaucauuaucgugauuaucguuauacugcuacuccugaucgcggugggacuuuucuuguauugcaaagcccgcaguacccccgucacacugucuaaggaccagcucagcggcauuaauaacaucgcauucuccaauugaggacuagugaagggaacacccaaauuuaauucagccuuaagcacaauuaauuaagagugaaacguaauuguacaagcaguuggucacccaccauagggcaugaucaacaccgcaaccuuuccuuuuucccccagugauucugaaaaaccccucuucccuucagcuugcuuagauguuccaaauuuaguaagcuuaaggcggccuacagaagaaaaagaaaaaaaaggccacaaaaguucccucucacuuucaguaaauaaaauaaaagcagcaacagaaauaaagaaauaaaugaaauucaaaaugaaauaaauauuguguugugcagcauuaaaaaaucaauaaaaauuaaaaaugagcaagaucuaaaaaaaaaaaaaaaaaaaaaaaaaaaaaaaaaaaaaaaaaaaaaaaaaaaaaaaaaaaaaaaaugcaucccccccccccccccccccccccccccccccaaaggcucuuuucagagccaccagaauu

SEQ ID NO: 16375 - RNA, 2193 nt, Artificial Sequence
  mRNA product Design f-1 comprising derived and/or modified sequence from HRSV(Memphis-37)__AIY60640.1__F_DSCav1_mut4 (opt4)
gggagagcggcucggccauuuugucccagucaguccggaggcugcggcugcagaaguaccgccugcggaguaacugcaaagaagcuuaccauggagcugcccauccugaagaccaacgccaucaccaccauccuggccgccgugacccugugcuucgccagcagccagaacaucaccgaggaguucuaccagagcaccugcagcgccgugagcaagggcuaccugagcgcccugagaaccggcugguacaccagcgugaucaccaucgagcugagcaacaucaaggagaacaagugcaacggcaccgacgccaaggugaagcugaucaagcaggagcuggacaaguacaagaacgccgugaccgagcugcagcugcugaugcagagcacccccgccgccggcagcggcagcgccaucugcagcggcaucgccgugugcaaggugcugcaccuggagggcgaggugaacaagaucaagaacgcccugcugagcaccaacaaggccguggugagccugagcaacggcgugagcgugcugaccuucaaggugcuggaccugaagaacuacaucgacaagcagcugcugcccauccugaacaagcagagcugcagcaucagcaacaucgagaccgugaucgaguuccagcagaagaacaacagacugcuggagaucaccagagaguucagcgugaacgccggcgugaccacccccgugagcaccuacaugcugaccaacagcgagcugcugagccugaucaacgacaugcccaucaccaacgaccagaagaagcugaugagcaacaacgugcagaucgugagacagcagagcuacagcaucaugugcaucaucaaggaggaggugcuggccuacguggugcagcugccccuguacggcgugaucgacacccccugcuggaagcugcacaccagcccccugugcaccaccaacaccaaggagggcagcaacaucugccugaccagaaccgacagaggcugguacugcgacaacgccggcagcgugagcuucuucccccaggccgagaccugcaaggugcagagcaacagaguguucugcgacaccaugaacagcagaacccugcccagcgaggugaaccugugcaacaucgacaucuucaaccccaaguacgacugcaagaucaugaccagcaagaccgacgugagcagcagcgugaucaccagccugggcgccaucgugagcugcuacggcaagaccaagugcaccgccagcaacaagaacagaggcaucaucaagaccuucagcaacggcugcgacuacgugagcaacaagggcguggacaccgugagcgugggcaacacccuguacugcgugaacaagcaggagggcaagagccuguacgugaagggcgagcccaucaucaacuucuacgacccccugguguuccccagcgacgaguucgacgccagcaucagccaggugaacgagaagaucaaccagagccuggccuucaucagaaagagcgacgagcugcugcacaacgugaacgugggcaagagcaccaccaacaucaugaucaccaccaucaucaucgugaucaucgugauccugcugcugcugaucgccgugggccuguuccuguacugcaaggccagaagcacccccgugacccugagcaaggaccagcugagcggcaucaacaacaucgccuucagcaacugaggacuagugaagggaacacccaaauuuaauucagccuuaagcacaauuaauuaagagugaaacguaauuguacaagcaguuggucacccaccauagggcaugaucaacaccgcaaccuuuccuuuuucccccagugauucugaaaaaccccucuucccuucagcuugcuuagauguuccaaauuuaguaagcuuaaggcggccuacagaagaaaaagaaaaaaaaggccacaaaaguucccucucacuuucaguaaauaaaauaaaagcagcaacagaaauaaagaaauaaaugaaauucaaaaugaaauaaauauuguguugugcagcauuaaaaaaucaauaaaaauuaaaaaugagcaagaucuaaaaaaaaaaaaaaaaaaaaaaaaaaaaaaaaaaaaaaaaaaaaaaaaaaaaaaaaaaaaaaaaugcaucccccccccccccccccccccccccccccccaaaggcucuuuucagagccaccagaauu

SEQ ID NO: 16376 - RNA, 2193 nt, Artificial Sequence
  mRNA product Design f-1 comprising derived and/or modified sequence from HRSV(Memphis-37)__AIY60640.1__F_DSCav1_mut4 (opt5)
gggagagcggcucggccauuuugucccagucaguccggaggcugcggcugcagaaguaccgccugcggaguaacugcaaagaagcuuaccauggagcugcccauccucaagaccaacgccauuacaacgauccuggcugccgugacccuuugcuucgcgagcucccagaauauuacagaagaguuuuaccaaucuaccuguagcgcugucuccaaaggcuaucugucugcccucagaacagggugguacaccagcguuaucacaauugaacuguccaacaucaaggagaauaaaugcaacggaaccgacgccaaggugaaacuuaucaagcaggaacuggauaaguauaaaaaugcugugacggagcuccagcugcugaugcagucuaccccugccgcuggcagcggguccgccauuuguagcggaaucgcggucugcaaggugcuccaccuggagggcgaaguuaacaaaauuaagaaugcccuucugucuacaaacaaagcuguggucucccucagcaauggggugucuguucugaccuucaaggugcuugaccugaagaacuacaucgauaaacaacuccugccgauucugaauaagcaguccuguagcaucucuaacauugagacagucaucgaauuucagcagaaaaauaaccggcuccuggagaucacccgcgaguucuccgugaaugccggagugacgacacccgucagcaccuauaugcuuacaaacuccgaacugcucucucugauuaacgacaugccuaucaccaaugaucaaaagaaacuuaugagcaacaauguucagauugugagacagcaguccuacagcaucaugugcauuaucaaggaggaagugcuggcuuaugucgugcaacucccccuguacggcguuaucgacaccccuuguuggaaacugcauacaucuccccucugcacgaccaacacaaaggagggcuccaauauuugucugacccggacagaucgcgggugguacugcgacaacgccggaagcgugagcuuuuucccucaggcggaaaccuguaagguccagucuaauagaguguuuugcgauacgaugaacuccagaacacugccgucugagguuaaucucugcaacaucgacauuuucaaucccaaauaugauuguaagaucaugaccagcaaaaccgacguguccagcucugucauuacaucccugggcgccaucgugagcugcuacgggaagaccaaauguacagcuucuaacaagaaucggggaaucauuaagacguuuuccaacggcugcgauuaugucagcaauaaagggguggacaccguuuccgugggaaacacacuuuacugugucaacaagcaagagggcaaaucucuguaugugaagggcgaaccuaucauuaauuucuacgacccccucguuuuuccuagcgaugaguucgacgccuccaucucucaggugaacgaaaagauuaaucagagccuggcuuuuauccgcaaguccgaugagcugcuccacaacgucaauguggggaaaagcaccacaaacauuaugaucaccacgaucauuaucgugauuaucguuauucugcuucugcucaucgccgucggacuguuccuguauugcaaagccagaucuacccccgugacacuuuccaaggaccagcucagcggcaucaauaacauugcuuucucuaauugaggacuagugaagggaacacccaaauuuaauucagccuuaagcacaauuaauuaagagugaaacguaauuguacaagcaguuggucacccaccauagggcaugaucaacaccgcaaccuuuccuuuuucccccagugauucugaaaaaccccucuucccuucagcuugcuuagauguuccaaauuuaguaagcuuaaggcggccuacagaagaaaaagaaaaaaaaggccacaaaaguucccucucacuuucaguaaauaaaauaaaagcagcaacagaaauaaagaaauaaaugaaauucaaaaugaaauaaauauuguguugugcagcauuaaaaaaucaauaaaaauuaaaaaugagcaagaucuaaaaaaaaaaaaaaaaaaaaaaaaaaaaaaaaaaaaaaaaaaaaaaaaaaaaaaaaaaaaaaaaugcaucccccccccccccccccccccccccccccccaaaggcucuuuucagagccaccagaauu

SEQ ID NO: 16377 - RNA, 2193 nt, Artificial Sequence
  mRNA product Design f-1 comprising derived and/or modified sequence from HRSV(Memphis-37)__AIY60640.1__F_DSCav1_mut4 (opt6)
gggagagcggcucggccauuuugucccagucaguccggaggcugcggcugcagaaguaccgccugcggaguaacugcaaagaagcuuaccauggaacucccaauccuaaaaacaaacgcaauaacaacaauauuagcagccguaacacucuguuucgccucaucccaaaacauaacagaagaauuuuaucaaucuacauguuccgccgucaguaaaggauaucuaucagccuuaagaacaggcugguacacaucaguaaucaccauagaauuauccaacauaaaagaaaacaaaugcaauggcacagaugccaaaguaaaacuaaucaaacaagaacuugauaaauauaaaaacgcaguaacagaauuacaauuauuaaugcaaagcacaccagccgcaggaucaggaucagcaauauguucaggaauagcagucuguaaaguacuacacuuagaaggagaaguaaacaaaauuaaaaacgcauuacuaagcaccaauaaagcaguaguaucacuaucaaacggcguauccguauuaacguucaaaguccucgaccugaaaaacuacauagauaaacaacuacuaccaauacuaaauaaacaaucaugcucaauaucaaacauagaaacuguuaucgaauuucaacagaaaaauaaccgacuacuagaaaucaccagagaauuuucaguaaacgcaggcgucacuacaccaguauccacauacaugcuaaccaacucggaauuacuuucccucauaaacgacaugccaauaacaaacgaccaaaagaaacuuaugucaaacaacguucaaauaguccgccaacaaucauacucaauaauguguaucauaaaagaagaaguccuagcauaugucguacaacuaccauuauacggaguaauugacacaccuugcuggaaacuacacacauccccacuauguacaacaaacacuaaagaaggaucaaacaucugccuaaccagaacagacagaggcugguauugcgacaacgcaggaucaguaucauucuucccacaagcagaaacaugcaaaguacaaucaaacagagucuucugcgacaccaugaacagcagaacccucccauccgaaguaaacuuaugcaacaucgauaucuucaacccaaaauacgacuguaaaauaaugacaucaaaaacagacguuucauccucaguaauaacaucauuaggugccauaguuucauguuacggaaaaaccaaauguaccgcaucaaacaaaaacagaggcauuauuaaaacauucucuaacggaugcgacuaugucaguaacaaaggaguagacacaguaucagucggaaacacauuauauugcguaaauaaacaagaaggaaaaagucuauacguaaaaggagaaccaauaauaaacuuuuacgacccucucguauucccaucagacgaauuugaugcauccauaucacaagucaacgaaaagauaaaccaaucccuagcauucauaagaaaaucagacgaacuacuccauaacguaaacguaggaaaaagcacaaccaauauaaugauaaccacaauaaucauaguaauaauagucauauuauuacuuuuaauugcaguaggacucuuucuauacugcaaagcaagaagcacaccaguaacacuaagcaaagaccaacuaucaggcaucaacaauaucgccuuuucaaauuaaggacuagugaagggaacacccaaauuuaauucagccuuaagcacaauuaauuaagagugaaacguaauuguacaagcaguuggucacccaccauagggcaugaucaacaccgcaaccuuuccuuuuucccccagugauucugaaaaaccccucuucccuucagcuugcuuagauguuccaaauuuaguaagcuuaaggcggccuacagaagaaaaagaaaaaaaaggccacaaaaguucccucucacuuucaguaaauaaaauaaaagcagcaacagaaauaaagaaauaaaugaaauucaaaaugaaauaaauauuguguugugcagcauuaaaaaaucaauaaaaauuaaaaaugagcaagaucuaaaaaaaaaaaaaaaaaaaaaaaaaaaaaaaaaaaaaaaaaaaaaaaaaaaaaaaaaaaaaaaaugcaucccccccccccccccccccccccccccccccaaaggcucuuuucagagccaccagaauu

SEQ ID NO: 16378 - RNA, 2193 nt, Artificial Sequence
  mRNA product Design f-1 comprising derived and/or modified sequence from HRSV(Memphis-37)__AIY60640.1__F_DSCav1_mut4 (opt11)
gggagagcggcucggccauuuugucccagucaguccggaggcugcggcugcagaaguaccgccugcggaguaacugcaaagaagcuuaccauggagcugcccauccucaagaccaacgccaucaccacgauccuggccgcggugacccugugcuucgcgagcucccagaacaucaccgaggaguucuaccagagcacgugcuccgccgucagcaagggcuaccucuccgcccugcgcaccgggugguacaccagcgugaucaccaucgagcuguccaacaucaaggagaacaagugcaacggcaccgacgccaaggugaaacucaucaagcaggagcuggacaaguacaagaacgccgucaccgagcugcagcuccugaugcagagcaccccggccgccggguccggcagcgcuaucugcuccgggaucgcggugugcaaggugcugcaccucgagggcgaggucaacaagaucaagaaugcccugcugagcaccaacaaggccguggugucccucagcaacggagucagcgugcuuaccuucaaggugcuggaccucaagaacuacaucgacaagcagcugcugccuauccucaacaagcagagcugcuccaucagcaacaucgagacggucaucgaguuccagcagaagaacaaccggcugcuggagaucacccgcgaguucuccgugaacgccggggugaccacccccgucagcacguacaugcucaccaacagcgaacugcugucccucaucaacgacaugcccaucaccaacgaccagaagaagcugaugagcaacaacgugcagaucgugcggcagcaguccuacagcaucaugugcaucaucaaggaggaaguccuggccuacguggugcagcucccucuguacggcgucaucgacacccccugcuggaagcugcacacgagcccccucugcaccaccaacaccaaggagggguccaacaucugccugacgcgcaccgaccggggcugguacugcgacaacgcgggguccgugagcuucuucccccaggccgagaccugcaaggugcagagcaaccgcgucuucugcgacacuaugaacagcagaacgcucccguccgaggugaaccugugcaacauagacauauucaaccccaaguacgacugcaagaucaugaccagcaagaccgacgucuccagcuccgugauuaccagccugggcgcaaucguguccugcuacggcaagacgaagugcaccgccagcaacaagaaccgggggaucaucaagaccuucuccaacggcugcgacuaugucagcaacaaggggguggacaccgugagcgucggaaacacgcucuacugcgugaacaagcaagagggcaaguccuuauacgugaagggggagcccaucaucaacuucuacgacccccuggucuucccgagcgacgaguucgacgccagcauaagccaggugaacgagaagaucaaccagucccucgcguucauccgcaagagcgacgagcugcugcacaacgugaacgucggcaaguccaccaccaacaucaugaucaccaccaucaucaucgugaucaucgugauccuccugcugcucaucgccgucgggcuguuccuguacugcaaggcccggagcacgcccgugaccuuguccaaggaccagcucagcggcaucaacaacaucgccuucuccaacugaggacuagugaagggaacacccaaauuuaauucagccuuaagcacaauuaauuaagagugaaacguaauuguacaagcaguuggucacccaccauagggcaugaucaacaccgcaaccuuuccuuuuucccccagugauucugaaaaaccccucuucccuucagcuugcuuagauguuccaaauuuaguaagcuuaaggcggccuacagaagaaaaagaaaaaaaaggccacaaaaguucccucucacuuucaguaaauaaaauaaaagcagcaacagaaauaaagaaauaaaugaaauucaaaaugaaauaaauauuguguugugcagcauuaaaaaaucaauaaaaauuaaaaaugagcaagaucuaaaaaaaaaaaaaaaaaaaaaaaaaaaaaaaaaaaaaaaaaaaaaaaaaaaaaaaaaaaaaaaaugcaucccccccccccccccccccccccccccccccaaaggcucuuuucagagccaccagaauu

SEQ ID NO: 16379 - RNA, 1973 nt, Artificial Sequence
  mRNA product Design f-2 comprising derived and/or modified sequence from HRSV(Memphis-37)__AIY60640.1__F_DSCav1_mut4 (opt1)
gggagagcggcucggccauuuugucccagucaguccggaggcugcggcugcagaaguaccgccugcggaguaacugcaaagaagcuuaccauggagcugcccauccucaagaccaacgccaucaccacgauccuggccgcggugacccugugcuucgccagcucccagaacaucaccgaggaguucuaccagagcacgugcuccgccgucagcaagggcuaccucuccgcccugcgcaccgggugguacaccagcgugaucaccaucgagcuguccaacaucaaggagaacaagugcaacggcaccgacgccaaggugaagcucaucaagcaggagcuggacaaguacaagaacgcggucacggagcugcagcuccugaugcagagcaccccggccgccggcuccgggagcgcgaucugcuccggcaucgccgucugcaaggugcugcaccucgagggcgaggugaacaagaucaagaacgcccugcuguccaccaacaaggccgucgugagccucuccaacggggugagcguccugaccuucaaggugcuggaccucaagaacuacaucgacaagcagcugcugcccauccugaacaagcagagcugcuccaucagcaacaucgagaccgucaucgaguuccagcagaagaacaaccgccuccuggagaucacgcgggaguucagcgugaacgcgggcgugaccacccccgucuccaccuacaugcugacgaacagcgagcuccugucccugaucaacgacaugccgaucaccaacgaccagaagaagcucaugagcaacaacgugcagaucgugcgccagcaguccuacagcaucaugugcaucaucaaggaggagguccuggccuacguggugcagcugccccucuacggggucaucgacacccccugcuggaagcugcacaccagcccccugugcacgaccaacaccaaggagggcuccaacaucugccucacccggacggaccgcgggugguacugcgacaacgccggcagcguguccuucuucccgcaggccgagaccugcaagguccagagcaaccggguguucugcgacaccaugaacucccggacccugcccagcgaggugaaccucugcaacaucgacaucuucaaccccaaguacgacugcaagaucaugacguccaagaccgacgucagcuccagcgugaucaccucccugggcgccaucgugagcugcuacgggaagaccaagugcacggcgagcaacaagaaccgcggcaucaucaagaccuucuccaacgggugcgacuacgucagcaacaagggcguggacaccguguccgucggcaacacccuguacugcgugaacaagcaggagggcaagagccucuacgugaagggggagcccaucaucaacuucuacgacccgcuggucuuccccuccgacgaguucgacgccagcaucucccaggugaacgagaagaucaaccagagccuggccuucauccggaaguccgacgagcuccugcacaacgugaacgucggcaagagcaccacgaacaucaugaucaccaccaucaucaucgugaucaucgugauccugcugcuccugaucgccgucgggcuguuccucuacugcaaggcccgcuccacccccgugacgcugagcaaggaccagcuguccgggaucaacaacaucgcguucagcaacugaggacuaguggaagcauuuuccuggcugauuaaaagaaauuacucagcuauggucaucuguuccuguuagaaggcuaugcagcauauuauauacuaugcgcauguuaugaaaugcauaauaaaaaauuuuaaaaaaucuaaaagaucuaaaaaaaaaaaaaaaaaaaaaaaaaaaaaaaaaaaaaaaaaaaaaaaaaaaaaaaaaaaaaaaaugcaucccccccccccccccccccccccccccccccaaaggcucuuuucagagccaccagaauu

SEQ ID NO: 16380 - RNA, 1973 nt, Artificial Sequence
  mRNA product Design f-2 comprising derived and/or modified sequence from HRSV(Memphis-37)__AIY60640.1__F_DSCav1_mut4 (opt1)
gggagagcggcucggccauuuugucccagucaguccggaggcugcggcugcagaaguaccgccugcggaguaacugcaaagaagcuuaccauggagcugcccauccucaagaccaacgccaucaccacgauccuggccgcggugacccugugcuucgccagcucccagaacaucaccgaggaguucuaccagagcacgugcuccgccgucagcaagggcuaccucuccgcccugcgcaccgggugguacaccagcgugaucaccaucgagcuguccaacaucaaggagaacaagugcaacggcaccgacgccaaggugaagcucaucaagcaggagcuggacaaguacaagaacgcggucacggagcugcagcuccugaugcagagcaccccggccgccggguccggcagcgccaucugcuccgggaucgcggugugcaaggugcugcaccucgagggcgaggucaacaagaucaagaacgcccugcugagcaccaacaaggccguggugucccucagcaacggcgucuccgugcugaccuucaaggugcuggaccucaagaacuacaucgacaagcagcugcugcccauccucaacaagcagagcugcuccaucagcaacaucgagacggucaucgaguuccagcagaagaacaaccggcugcuggagaucacccgcgaguucuccgugaacgccggggugaccacccccgucagcacguacaugcucaccaacagcgagcugcugucccucaucaacgacaugcccaucaccaacgaccagaagaagcugaugagcaacaacgugcagaucgugcggcagcaguccuacagcaucaugugcaucaucaaggaggagguccuggccuacguggugcagcucccgcuguacggcgucaucgacacccccugcuggaagcugcacacgagcccccucugcaccaccaacaccaaggagggguccaacaucugccugacgcgcaccgaccggggcugguacugcgacaacgcgggguccgugagcuucuucccccaggccgagaccugcaaggugcaguccaaccgcgucuucugcgacaccaugaacagccggacgcucccguccgaggugaaccugugcaacaucgacaucuucaaccccaaguacgacugcaagaucaugaccagcaagaccgacgucuccagcuccgugaucaccagccugggcgccaucguguccugcuacggcaagacgaagugcaccgccagcaacaagaaccgggggaucaucaagaccuucuccaacggcugcgacuacgucagcaacaaggggguggacaccgugagcgucggcaacacgcucuacugcgugaacaagcaggagggcaagucccuguacgugaagggggagcccaucaucaacuucuacgacccccuggucuucccgagcgacgaguucgacgccuccaucagccaggugaacgagaagaucaaccagucccucgcguucauccgcaagagcgacgagcugcugcacaacgugaacgucggcaaguccaccaccaacaucaugaucaccaccaucaucaucgugaucaucgugauccuccugcugcucaucgccgucgggcuguuccuguacugcaaggcccggagcacgcccgugacccuguccaaggaccagcucagcggcaucaacaacaucgccuucuccaacugaggacuaguggaagcauuuuccuggcugauuaaaagaaauuacucagcuauggucaucuguuccuguuagaaggcuaugcagcauauuauauacuaugcgcauguuaugaaaugcauaauaaaaaauuuuaaaaaaucuaaaagaucuaaaaaaaaaaaaaaaaaaaaaaaaaaaaaaaaaaaaaaaaaaaaaaaaaaaaaaaaaaaaaaaaugcaucccccccccccccccccccccccccccccccaaaggcucuuuucagagccaccagaauu

SEQ ID NO: 16381 - RNA, 1973 nt, Artificial Sequence
  mRNA product Design f-2 comprising derived and/or modified sequence from HRSV(Memphis-37)__AIY60640.1__F_DSCav1_mut4 (opt2)
gggagagcggcucggccauuuugucccagucaguccggaggcugcggcugcagaaguaccgccugcggaguaacugcaaagaagcuuaccauggagcuccccauccucaagaccaacgccaucaccaccauccucgccgccgucacccucugcuucgccuccucccagaacaucaccgaggaguucuaccaguccaccugcuccgccgucuccaagggcuaccucuccgcccuccgcaccggcugguacaccuccgucaucaccaucgagcucuccaacaucaaggagaacaagugcaacggcaccgacgccaaggucaagcucaucaagcaggagcucgacaaguacaagaacgccgucaccgagcuccagcuccucaugcaguccacccccgccgccggcuccggcuccgccaucugcuccggcaucgccgucugcaagguccuccaccucgagggcgaggucaacaagaucaagaacgcccuccucuccaccaacaaggccgucgucucccucuccaacggcgucuccguccucaccuucaagguccucgaccucaagaacuacaucgacaagcagcuccuccccauccucaacaagcaguccugcuccaucuccaacaucgagaccgucaucgaguuccagcagaagaacaaccgccuccucgagaucacccgcgaguucuccgucaacgccggcgucaccacccccgucuccaccuacaugcucaccaacuccgagcuccucucccucaucaacgacaugcccaucaccaacgaccagaagaagcucauguccaacaacguccagaucguccgccagcaguccuacuccaucaugugcaucaucaaggaggagguccucgccuacgucguccagcucccccucuacggcgucaucgacacccccugcuggaagcuccacaccuccccccucugcaccaccaacaccaaggagggcuccaacaucugccucacccgcaccgaccgcggcugguacugcgacaacgccggcuccgucuccuucuucccccaggccgagaccugcaagguccaguccaaccgcgucuucugcgacaccaugaacucccgcacccuccccuccgaggucaaccucugcaacaucgacaucuucaaccccaaguacgacugcaagaucaugaccuccaagaccgacgucuccuccuccgucaucaccucccucggcgccaucgucuccugcuacggcaagaccaagugcaccgccuccaacaagaaccgcggcaucaucaagaccuucuccaacggcugcgacuacgucuccaacaagggcgucgacaccgucuccgucggcaacacccucuacugcgucaacaagcaggagggcaagucccucuacgucaagggcgagcccaucaucaacuucuacgacccccucgucuuccccuccgacgaguucgacgccuccaucucccaggucaacgagaagaucaaccagucccucgccuucauccgcaaguccgacgagcuccuccacaacgucaacgucggcaaguccaccaccaacaucaugaucaccaccaucaucaucgucaucaucgucauccuccuccuccucaucgccgucggccucuuccucuacugcaaggcccgcuccacccccgucacccucuccaaggaccagcucuccggcaucaacaacaucgccuucuccaacugaggacuaguggaagcauuuuccuggcugauuaaaagaaauuacucagcuauggucaucuguuccuguuagaaggcuaugcagcauauuauauacuaugcgcauguuaugaaaugcauaauaaaaaauuuuaaaaaaucuaaaagaucuaaaaaaaaaaaaaaaaaaaaaaaaaaaaaaaaaaaaaaaaaaaaaaaaaaaaaaaaaaaaaaaaugcaucccccccccccccccccccccccccccccccaaaggcucuuuucagagccaccagaauu

SEQ ID NO: 16382 - RNA, 1973 nt, Artificial Sequence
  mRNA product Design f-2 comprising derived and/or modified sequence from HRSV(Memphis-37)__AIY60640.1__F_DSCav1_mut4 (opt3)
gggagagcggcucggccauuuugucccagucaguccggaggcugcggcugcagaaguaccgccugcggaguaacugcaaagaagcuuaccauggagcugcccauccucaagaccaacgccauuacaacuauacuugcugcagugacgcugugcuucgccagcucccagaauaucaccgaagaguuuuaccaaucuacauguucagcggucaguaaaggcuauuugagcgcuuuaagaacugggugguacaccuccguuauuacaaucgaacugucuaacauuaaggagaauaaaugcaacggaaccgacgccaaggugaaacuaaucaagcaggaacucgauaaguauaaaaaugcaguaacugagcugcagcuucugaugcagucgaccccugccgcugguucaggcagcgcaauauguagugggaucgccgugugcaaggucuugcaccucgagggagaagugaacaaaauuaagaaugcucugcuguccacaaacaaagccguugugucucucagcaauggcgucuccguguuaacguucaagguacuggaccuuaagaacuacaucgauaaacaauugcugccaauucuaaauaagcagucauguaguaucagcaacauagagacuguuauugaauuucagcagaaaaauaacaggcuccuggagaucacccgggaguucucugugaaugcgggugucacaacuccgguguccaccuauaugcuuacaaacucagaacuguugagccucauuaacgacaugcccaucaccaaugaucaaaagaaacugaugaguaacaaugugcagaucguccgccagcagucuuacuccauuaugugcauaaucaaggaggaaguuuuagcauaugugguacaacugccucucuacggggugauugacacgccauguuggaaacuucauacuagcccccugugcacaaccaacacuaaggagggaucgaauaucuguuugacacgaaccgaucguggcugguacugcgacaacgccggcucugucuccuuuuucccucaggcugaaacguguaaggugcagucaaauagaguguuuugcgauaccaugaacaguagaacacugccaagcgaggugaaucucugcaacauagacauuuucaaucccaaauaugauuguaagaucaugacuuccaaaaccgacgucucuagcucagugaucacaagucugggggccauuguauccugcuacggaaagacuaaauguaccgcaagcaacaagaauagggguaucauuaagacauuuucuaacggcugcgauuauguuucaaauaaagggguggacaccgucagugugggaaacacucuuuacugugucaacaagcaagagggcaaaagccuguaugugaagggugaaccuauaaucaauuucuacgacccauugguuuuuccguccgaugaguucgacgcuucuauuucgcagguuaacgagaaaaucaaucagagccucgccuuuauccggaaguccgaugaacuguuacacaacguaaaugucgggaagucaacgacaaacauuaugauaaccacuaucauuaucgugauuaucguuauacugcuacuccugaucgcggugggacuuuucuuguauugcaaagcccgcaguacccccgucacacugucuaaggaccagcucagcggcauuaauaacaucgcauucuccaauugaggacuaguggaagcauuuuccuggcugauuaaaagaaauuacucagcuauggucaucuguuccuguuagaaggcuaugcagcauauuauauacuaugcgcauguuaugaaaugcauaauaaaaaauuuuaaaaaaucuaaaagaucuaaaaaaaaaaaaaaaaaaaaaaaaaaaaaaaaaaaaaaaaaaaaaaaaaaaaaaaaaaaaaaaaugcaucccccccccccccccccccccccccccccccaaaggcucuuuucagagccaccagaauu

SEQ ID NO: 16383 - RNA, 1973 nt, Artificial Sequence
  mRNA product Design f-2 comprising derived and/or modified sequence from HRSV(Memphis-37)__AIY60640.1__F_DSCav1_mut4 (opt4)
gggagagcggcucggccauuuugucccagucaguccggaggcugcggcugcagaaguaccgccugcggaguaacugcaaagaagcuuaccauggagcugcccauccugaagaccaacgccaucaccaccauccuggccgccgugacccugugcuucgccagcagccagaacaucaccgaggaguucuaccagagcaccugcagcgccgugagcaagggcuaccugagcgcccugagaaccggcugguacaccagcgugaucaccaucgagcugagcaacaucaaggagaacaagugcaacggcaccgacgccaaggugaagcugaucaagcaggagcuggacaaguacaagaacgccgugaccgagcugcagcugcugaugcagagcacccccgccgccggcagcggcagcgccaucugcagcggcaucgccgugugcaaggugcugcaccuggagggcgaggugaacaagaucaagaacgcccugcugagcaccaacaaggccguggugagccugagcaacggcgugagcgugcugaccuucaaggugcuggaccugaagaacuacaucgacaagcagcugcugcccauccugaacaagcagagcugcagcaucagcaacaucgagaccgugaucgaguuccagcagaagaacaacagacugcuggagaucaccagagaguucagcgugaacgccggcgugaccacccccgugagcaccuacaugcugaccaacagcgagcugcugagccugaucaacgacaugcccaucaccaacgaccagaagaagcugaugagcaacaacgugcagaucgugagacagcagagcuacagcaucaugugcaucaucaaggaggaggugcuggccuacguggugcagcugccccuguacggcgugaucgacacccccugcuggaagcugcacaccagcccccugugcaccaccaacaccaaggagggcagcaacaucugccugaccagaaccgacagaggcugguacugcgacaacgccggcagcgugagcuucuucccccaggccgagaccugcaaggugcagagcaacagaguguucugcgacaccaugaacagcagaacccugcccagcgaggugaaccugugcaacaucgacaucuucaaccccaaguacgacugcaagaucaugaccagcaagaccgacgugagcagcagcgugaucaccagccugggcgccaucgugagcugcuacggcaagaccaagugcaccgccagcaacaagaacagaggcaucaucaagaccuucagcaacggcugcgacuacgugagcaacaagggcguggacaccgugagcgugggcaacacccuguacugcgugaacaagcaggagggcaagagccuguacgugaagggcgagcccaucaucaacuucuacgacccccugguguuccccagcgacgaguucgacgccagcaucagccaggugaacgagaagaucaaccagagccuggccuucaucagaaagagcgacgagcugcugcacaacgugaacgugggcaagagcaccaccaacaucaugaucaccaccaucaucaucgugaucaucgugauccugcugcugcugaucgccgugggccuguuccuguacugcaaggccagaagcacccccgugacccugagcaaggaccagcugagcggcaucaacaacaucgccuucagcaacugaggacuaguggaagcauuuuccuggcugauuaaaagaaauuacucagcuauggucaucuguuccuguuagaaggcuaugcagcauauuauauacuaugcgcauguuaugaaaugcauaauaaaaaauuuuaaaaaaucuaaaagaucuaaaaaaaaaaaaaaaaaaaaaaaaaaaaaaaaaaaaaaaaaaaaaaaaaaaaaaaaaaaaaaaaugcaucccccccccccccccccccccccccccccccaaaggcucuuuucagagccaccagaauu

SEQ ID NO: 16384 - RNA, 1973 nt, Artificial Sequence
  mRNA product Design f-2 comprising derived and/or modified sequence from HRSV(Memphis-37)__AIY60640.1__F_DSCav1_mut4 (opt5)
gggagagcggcucggccauuuugucccagucaguccggaggcugcggcugcagaaguaccgccugcggaguaacugcaaagaagcuuaccauggagcugcccauccucaagaccaacgccauuacaacgauccuggcugccgugacccuuugcuucgcgagcucccagaauauuacagaagaguuuuaccaaucuaccuguagcgcugucuccaaaggcuaucugucugcccucagaacagggugguacaccagcguuaucacaauugaacuguccaacaucaaggagaauaaaugcaacggaaccgacgccaaggugaaacuuaucaagcaggaacuggauaaguauaaaaaugcugugacggagcuccagcugcugaugcagucuaccccugccgcuggcagcggguccgccauuuguagcggaaucgcggucugcaaggugcuccaccuggagggcgaaguuaacaaaauuaagaaugcccuucugucuacaaacaaagcuguggucucccucagcaauggggugucuguucugaccuucaaggugcuugaccugaagaacuacaucgauaaacaacuccugccgauucugaauaagcaguccuguagcaucucuaacauugagacagucaucgaauuucagcagaaaaauaaccggcuccuggagaucacccgcgaguucuccgugaaugccggagugacgacacccgucagcaccuauaugcuuacaaacuccgaacugcucucucugauuaacgacaugccuaucaccaaugaucaaaagaaacuuaugagcaacaauguucagauugugagacagcaguccuacagcaucaugugcauuaucaaggaggaagugcuggcuuaugucgugcaacucccccuguacggcguuaucgacaccccuuguuggaaacugcauacaucuccccucugcacgaccaacacaaaggagggcuccaauauuugucugacccggacagaucgcgggugguacugcgacaacgccggaagcgugagcuuuuucccucaggcggaaaccuguaagguccagucuaauagaguguuuugcgauacgaugaacuccagaacacugccgucugagguuaaucucugcaacaucgacauuuucaaucccaaauaugauuguaagaucaugaccagcaaaaccgacguguccagcucugucauuacaucccugggcgccaucgugagcugcuacgggaagaccaaauguacagcuucuaacaagaaucggggaaucauuaagacguuuuccaacggcugcgauuaugucagcaauaaagggguggacaccguuuccgugggaaacacacuuuacugugucaacaagcaagagggcaaaucucuguaugugaagggcgaaccuaucauuaauuucuacgacccccucguuuuuccuagcgaugaguucgacgccuccaucucucaggugaacgaaaagauuaaucagagccuggcuuuuauccgcaaguccgaugagcugcuccacaacgucaauguggggaaaagcaccacaaacauuaugaucaccacgaucauuaucgugauuaucguuauucugcuucugcucaucgccgucggacuguuccuguauugcaaagccagaucuacccccgugacacuuuccaaggaccagcucagcggcaucaauaacauugcuuucucuaauugaggacuaguggaagcauuuuccuggcugauuaaaagaaauuacucagcuauggucaucuguuccuguuagaaggcuaugcagcauauuauauacuaugcgcauguuaugaaaugcauaauaaaaaauuuuaaaaaaucuaaaagaucuaaaaaaaaaaaaaaaaaaaaaaaaaaaaaaaaaaaaaaaaaaaaaaaaaaaaaaaaaaaaaaaaugcaucccccccccccccccccccccccccccccccaaaggcucuuuucagagccaccagaauu

SEQ ID NO: 16385 - RNA, 1973 nt, Artificial Sequence
  mRNA product Design f-2 comprising derived and/or modified sequence from HRSV(Memphis-37)__AIY60640.1__F_DSCav1_mut4 (opt6)
gggagagcggcucggccauuuugucccagucaguccggaggcugcggcugcagaaguaccgccugcggaguaacugcaaagaagcuuaccauggaacucccaauccuaaaaacaaacgcaauaacaacaauauuagcagccguaacacucuguuucgccucaucccaaaacauaacagaagaauuuuaucaaucuacauguuccgccgucaguaaaggauaucuaucagccuuaagaacaggcugguacacaucaguaaucaccauagaauuauccaacauaaaagaaaacaaaugcaauggcacagaugccaaaguaaaacuaaucaaacaagaacuugauaaauauaaaaacgcaguaacagaauuacaauuauuaaugcaaagcacaccagccgcaggaucaggaucagcaauauguucaggaauagcagucuguaaaguacuacacuuagaaggagaaguaaacaaaauuaaaaacgcauuacuaagcaccaauaaagcaguaguaucacuaucaaacggcguauccguauuaacguucaaaguccucgaccugaaaaacuacauagauaaacaacuacuaccaauacuaaauaaacaaucaugcucaauaucaaacauagaaacuguuaucgaauuucaacagaaaaauaaccgacuacuagaaaucaccagagaauuuucaguaaacgcaggcgucacuacaccaguauccacauacaugcuaaccaacucggaauuacuuucccucauaaacgacaugccaauaacaaacgaccaaaagaaacuuaugucaaacaacguucaaauaguccgccaacaaucauacucaauaauguguaucauaaaagaagaaguccuagcauaugucguacaacuaccauuauacggaguaauugacacaccuugcuggaaacuacacacauccccacuauguacaacaaacacuaaagaaggaucaaacaucugccuaaccagaacagacagaggcugguauugcgacaacgcaggaucaguaucauucuucccacaagcagaaacaugcaaaguacaaucaaacagagucuucugcgacaccaugaacagcagaacccucccauccgaaguaaacuuaugcaacaucgauaucuucaacccaaaauacgacuguaaaauaaugacaucaaaaacagacguuucauccucaguaauaacaucauuaggugccauaguuucauguuacggaaaaaccaaauguaccgcaucaaacaaaaacagaggcauuauuaaaacauucucuaacggaugcgacuaugucaguaacaaaggaguagacacaguaucagucggaaacacauuauauugcguaaauaaacaagaaggaaaaagucuauacguaaaaggagaaccaauaauaaacuuuuacgacccucucguauucccaucagacgaauuugaugcauccauaucacaagucaacgaaaagauaaaccaaucccuagcauucauaagaaaaucagacgaacuacuccauaacguaaacguaggaaaaagcacaaccaauauaaugauaaccacaauaaucauaguaauaauagucauauuauuacuuuuaauugcaguaggacucuuucuauacugcaaagcaagaagcacaccaguaacacuaagcaaagaccaacuaucaggcaucaacaauaucgccuuuucaaauuaaggacuaguggaagcauuuuccuggcugauuaaaagaaauuacucagcuauggucaucuguuccuguuagaaggcuaugcagcauauuauauacuaugcgcauguuaugaaaugcauaauaaaaaauuuuaaaaaaucuaaaagaucuaaaaaaaaaaaaaaaaaaaaaaaaaaaaaaaaaaaaaaaaaaaaaaaaaaaaaaaaaaaaaaaaugcaucccccccccccccccccccccccccccccccaaaggcucuuuucagagccaccagaauu

SEQ ID NO: 16386 - RNA, 1973 nt, Artificial Sequence
  mRNA product Design f-2 comprising derived and/or modified sequence from HRSV(Memphis-37)__AIY60640.1__F_DSCav1_mut4 (opt11)
gggagagcggcucggccauuuugucccagucaguccggaggcugcggcugcagaaguaccgccugcggaguaacugcaaagaagcuuaccauggagcugcccauccucaagaccaacgccaucaccacgauccuggccgcggugacccugugcuucgcgagcucccagaacaucaccgaggaguucuaccagagcacgugcuccgccgucagcaagggcuaccucuccgcccugcgcaccgggugguacaccagcgugaucaccaucgagcuguccaacaucaaggagaacaagugcaacggcaccgacgccaaggugaaacucaucaagcaggagcuggacaaguacaagaacgccgucaccgagcugcagcuccugaugcagagcaccccggccgccggguccggcagcgcuaucugcuccgggaucgcggugugcaaggugcugcaccucgagggcgaggucaacaagaucaagaaugcccugcugagcaccaacaaggccguggugucccucagcaacggagucagcgugcuuaccuucaaggugcuggaccucaagaacuacaucgacaagcagcugcugccuauccucaacaagcagagcugcuccaucagcaacaucgagacggucaucgaguuccagcagaagaacaaccggcugcuggagaucacccgcgaguucuccgugaacgccggggugaccacccccgucagcacguacaugcucaccaacagcgaacugcugucccucaucaacgacaugcccaucaccaacgaccagaagaagcugaugagcaacaacgugcagaucgugcggcagcaguccuacagcaucaugugcaucaucaaggaggaaguccuggccuacguggugcagcucccucuguacggcgucaucgacacccccugcuggaagcugcacacgagcccccucugcaccaccaacaccaaggagggguccaacaucugccugacgcgcaccgaccggggcugguacugcgacaacgcgggguccgugagcuucuucccccaggccgagaccugcaaggugcagagcaaccgcgucuucugcgacacuaugaacagcagaacgcucccguccgaggugaaccugugcaacauagacauauucaaccccaaguacgacugcaagaucaugaccagcaagaccgacgucuccagcuccgugauuaccagccugggcgcaaucguguccugcuacggcaagacgaagugcaccgccagcaacaagaaccgggggaucaucaagaccuucuccaacggcugcgacuaugucagcaacaaggggguggacaccgugagcgucggaaacacgcucuacugcgugaacaagcaagagggcaaguccuuauacgugaagggggagcccaucaucaacuucuacgacccccuggucuucccgagcgacgaguucgacgccagcauaagccaggugaacgagaagaucaaccagucccucgcguucauccgcaagagcgacgagcugcugcacaacgugaacgucggcaaguccaccaccaacaucaugaucaccaccaucaucaucgugaucaucgugauccuccugcugcucaucgccgucgggcuguuccuguacugcaaggcccggagcacgcccgugaccuuguccaaggaccagcucagcggcaucaacaacaucgccuucuccaacugaggacuaguggaagcauuuuccuggcugauuaaaagaaauuacucagcuauggucaucuguuccuguuagaaggcuaugcagcauauuauauacuaugcgcauguuaugaaaugcauaauaaaaaauuuuaaaaaaucuaaaagaucuaaaaaaaaaaaaaaaaaaaaaaaaaaaaaaaaaaaaaaaaaaaaaaaaaaaaaaaaaaaaaaaaugcaucccccccccccccccccccccccccccccccaaaggcucuuuucagagccaccagaauu

SEQ ID NO: 16387 - RNA, 1964 nt, Artificial Sequence
  mRNA product Design f-3 comprising derived and/or modified sequence from HRSV(Memphis-37)__AIY60640.1__F_DSCav1_mut4 (opt1)
gggagagucccgcagucggcguccagcggcucugcuuguucgugugugugucguugcaggccuuauucaagcuuaccauggagcugcccauccucaagaccaacgccaucaccacgauccuggccgcggugacccugugcuucgccagcucccagaacaucaccgaggaguucuaccagagcacgugcuccgccgucagcaagggcuaccucuccgcccugcgcaccgggugguacaccagcgugaucaccaucgagcuguccaacaucaaggagaacaagugcaacggcaccgacgccaaggugaagcucaucaagcaggagcuggacaaguacaagaacgcggucacggagcugcagcuccugaugcagagcaccccggccgccggcuccgggagcgcgaucugcuccggcaucgccgucugcaaggugcugcaccucgagggcgaggugaacaagaucaagaacgcccugcuguccaccaacaaggccgucgugagccucuccaacggggugagcguccugaccuucaaggugcuggaccucaagaacuacaucgacaagcagcugcugcccauccugaacaagcagagcugcuccaucagcaacaucgagaccgucaucgaguuccagcagaagaacaaccgccuccuggagaucacgcgggaguucagcgugaacgcgggcgugaccacccccgucuccaccuacaugcugacgaacagcgagcuccugucccugaucaacgacaugccgaucaccaacgaccagaagaagcucaugagcaacaacgugcagaucgugcgccagcaguccuacagcaucaugugcaucaucaaggaggagguccuggccuacguggugcagcugccccucuacggggucaucgacacccccugcuggaagcugcacaccagcccccugugcacgaccaacaccaaggagggcuccaacaucugccucacccggacggaccgcgggugguacugcgacaacgccggcagcguguccuucuucccgcaggccgagaccugcaagguccagagcaaccggguguucugcgacaccaugaacucccggacccugcccagcgaggugaaccucugcaacaucgacaucuucaaccccaaguacgacugcaagaucaugacguccaagaccgacgucagcuccagcgugaucaccucccugggcgccaucgugagcugcuacgggaagaccaagugcacggcgagcaacaagaaccgcggcaucaucaagaccuucuccaacgggugcgacuacgucagcaacaagggcguggacaccguguccgucggcaacacccuguacugcgugaacaagcaggagggcaagagccucuacgugaagggggagcccaucaucaacuucuacgacccgcuggucuuccccuccgacgaguucgacgccagcaucucccaggugaacgagaagaucaaccagagccuggccuucauccggaaguccgacgagcuccugcacaacgugaacgucggcaagagcaccacgaacaucaugaucaccaccaucaucaucgugaucaucgugauccugcugcuccugaucgccgucgggcuguuccucuacugcaaggcccgcuccacccccgugacgcugagcaaggaccagcuguccgggaucaacaacaucgcguucagcaacugaggacuaguacuggcugcaucucccuuuccucuguccuccauccuucucccaggauggugaagggggaccugguacccagugauccccaccccaggauccuaaaucaugacuuaccugcuaauaaaaacucauuggaaaagugagaagaucuaaaaaaaaaaaaaaaaaaaaaaaaaaaaaaaaaaaaaaaaaaaaaaaaaaaaaaaaaaaaaaaaugcaucccccccccccccccccccccccccccccccaaaggcucuuuucagagccaccagaauu

SEQ ID NO: 16388 - RNA, 1964 nt, Artificial Sequence
  mRNA product Design f-3 comprising derived and/or modified sequence from HRSV(Memphis-37)__AIY60640.1__F_DSCav1_mut4 (opt1)
gggagagucccgcagucggcguccagcggcucugcuuguucgugugugugucguugcaggccuuauucaagcuuaccauggagcugcccauccucaagaccaacgccaucaccacgauccuggccgcggugacccugugcuucgccagcucccagaacaucaccgaggaguucuaccagagcacgugcuccgccgucagcaagggcuaccucuccgcccugcgcaccgggugguacaccagcgugaucaccaucgagcuguccaacaucaaggagaacaagugcaacggcaccgacgccaaggugaagcucaucaagcaggagcuggacaaguacaagaacgcggucacggagcugcagcuccugaugcagagcaccccggccgccggguccggcagcgccaucugcuccgggaucgcggugugcaaggugcugcaccucgagggcgaggucaacaagaucaagaacgcccugcugagcaccaacaaggccguggugucccucagcaacggcgucuccgugcugaccuucaaggugcuggaccucaagaacuacaucgacaagcagcugcugcccauccucaacaagcagagcugcuccaucagcaacaucgagacggucaucgaguuccagcagaagaacaaccggcugcuggagaucacccgcgaguucuccgugaacgccggggugaccacccccgucagcacguacaugcucaccaacagcgagcugcugucccucaucaacgacaugcccaucaccaacgaccagaagaagcugaugagcaacaacgugcagaucgugcggcagcaguccuacagcaucaugugcaucaucaaggaggagguccuggccuacguggugcagcucccgcuguacggcgucaucgacacccccugcuggaagcugcacacgagcccccucugcaccaccaacaccaaggagggguccaacaucugccugacgcgcaccgaccggggcugguacugcgacaacgcgggguccgugagcuucuucccccaggccgagaccugcaaggugcaguccaaccgcgucuucugcgacaccaugaacagccggacgcucccguccgaggugaaccugugcaacaucgacaucuucaaccccaaguacgacugcaagaucaugaccagcaagaccgacgucuccagcuccgugaucaccagccugggcgccaucguguccugcuacggcaagacgaagugcaccgccagcaacaagaaccgggggaucaucaagaccuucuccaacggcugcgacuacgucagcaacaaggggguggacaccgugagcgucggcaacacgcucuacugcgugaacaagcaggagggcaagucccuguacgugaagggggagcccaucaucaacuucuacgacccccuggucuucccgagcgacgaguucgacgccuccaucagccaggugaacgagaagaucaaccagucccucgcguucauccgcaagagcgacgagcugcugcacaacgugaacgucggcaaguccaccaccaacaucaugaucaccaccaucaucaucgugaucaucgugauccuccugcugcucaucgccgucgggcuguuccuguacugcaaggcccggagcacgcccgugacccuguccaaggaccagcucagcggcaucaacaacaucgccuucuccaacugaggacuaguacuggcugcaucucccuuuccucuguccuccauccuucucccaggauggugaagggggaccugguacccagugauccccaccccaggauccuaaaucaugacuuaccugcuaauaaaaacucauuggaaaagugagaagaucuaaaaaaaaaaaaaaaaaaaaaaaaaaaaaaaaaaaaaaaaaaaaaaaaaaaaaaaaaaaaaaaaugcaucccccccccccccccccccccccccccccccaaaggcucuuuucagagccaccagaauu

SEQ ID NO: 16389 - RNA, 1964 nt, Artificial Sequence
  mRNA product Design f-3 comprising derived and/or modified sequence from HRSV(Memphis-37)__AIY60640.1__F_DSCav1_mut4 (opt2)
gggagagucccgcagucggcguccagcggcucugcuuguucgugugugugucguugcaggccuuauucaagcuuaccauggagcuccccauccucaagaccaacgccaucaccaccauccucgccgccgucacccucugcuucgccuccucccagaacaucaccgaggaguucuaccaguccaccugcuccgccgucuccaagggcuaccucuccgcccuccgcaccggcugguacaccuccgucaucaccaucgagcucuccaacaucaaggagaacaagugcaacggcaccgacgccaaggucaagcucaucaagcaggagcucgacaaguacaagaacgccgucaccgagcuccagcuccucaugcaguccacccccgccgccggcuccggcuccgccaucugcuccggcaucgccgucugcaagguccuccaccucgagggcgaggucaacaagaucaagaacgcccuccucuccaccaacaaggccgucgucucccucuccaacggcgucuccguccucaccuucaagguccucgaccucaagaacuacaucgacaagcagcuccuccccauccucaacaagcaguccugcuccaucuccaacaucgagaccgucaucgaguuccagcagaagaacaaccgccuccucgagaucacccgcgaguucuccgucaacgccggcgucaccacccccgucuccaccuacaugcucaccaacuccgagcuccucucccucaucaacgacaugcccaucaccaacgaccagaagaagcucauguccaacaacguccagaucguccgccagcaguccuacuccaucaugugcaucaucaaggaggagguccucgccuacgucguccagcucccccucuacggcgucaucgacacccccugcuggaagcuccacaccuccccccucugcaccaccaacaccaaggagggcuccaacaucugccucacccgcaccgaccgcggcugguacugcgacaacgccggcuccgucuccuucuucccccaggccgagaccugcaagguccaguccaaccgcgucuucugcgacaccaugaacucccgcacccuccccuccgaggucaaccucugcaacaucgacaucuucaaccccaaguacgacugcaagaucaugaccuccaagaccgacgucuccuccuccgucaucaccucccucggcgccaucgucuccugcuacggcaagaccaagugcaccgccuccaacaagaaccgcggcaucaucaagaccuucuccaacggcugcgacuacgucuccaacaagggcgucgacaccgucuccgucggcaacacccucuacugcgucaacaagcaggagggcaagucccucuacgucaagggcgagcccaucaucaacuucuacgacccccucgucuuccccuccgacgaguucgacgccuccaucucccaggucaacgagaagaucaaccagucccucgccuucauccgcaaguccgacgagcuccuccacaacgucaacgucggcaaguccaccaccaacaucaugaucaccaccaucaucaucgucaucaucgucauccuccuccuccucaucgccgucggccucuuccucuacugcaaggcccgcuccacccccgucacccucuccaaggaccagcucuccggcaucaacaacaucgccuucuccaacugaggacuaguacuggcugcaucucccuuuccucuguccuccauccuucucccaggauggugaagggggaccugguacccagugauccccaccccaggauccuaaaucaugacuuaccugcuaauaaaaacucauuggaaaagugagaagaucuaaaaaaaaaaaaaaaaaaaaaaaaaaaaaaaaaaaaaaaaaaaaaaaaaaaaaaaaaaaaaaaaugcaucccccccccccccccccccccccccccccccaaaggcucuuuucagagccaccagaauu

SEQ ID NO: 16390 - RNA, 1964 nt, Artificial Sequence
  mRNA product Design f-3 comprising derived and/or modified sequence from HRSV(Memphis-37)__AIY60640.1__F_DSCav1_mut4 (opt3)
gggagagucccgcagucggcguccagcggcucugcuuguucgugugugugucguugcaggccuuauucaagcuuaccauggagcugcccauccucaagaccaacgccauuacaacuauacuugcugcagugacgcugugcuucgccagcucccagaauaucaccgaagaguuuuaccaaucuacauguucagcggucaguaaaggcuauuugagcgcuuuaagaacugggugguacaccuccguuauuacaaucgaacugucuaacauuaaggagaauaaaugcaacggaaccgacgccaaggugaaacuaaucaagcaggaacucgauaaguauaaaaaugcaguaacugagcugcagcuucugaugcagucgaccccugccgcugguucaggcagcgcaauauguagugggaucgccgugugcaaggucuugcaccucgagggagaagugaacaaaauuaagaaugcucugcuguccacaaacaaagccguugugucucucagcaauggcgucuccguguuaacguucaagguacuggaccuuaagaacuacaucgauaaacaauugcugccaauucuaaauaagcagucauguaguaucagcaacauagagacuguuauugaauuucagcagaaaaauaacaggcuccuggagaucacccgggaguucucugugaaugcgggugucacaacuccgguguccaccuauaugcuuacaaacucagaacuguugagccucauuaacgacaugcccaucaccaaugaucaaaagaaacugaugaguaacaaugugcagaucguccgccagcagucuuacuccauuaugugcauaaucaaggaggaaguuuuagcauaugugguacaacugccucucuacggggugauugacacgccauguuggaaacuucauacuagcccccugugcacaaccaacacuaaggagggaucgaauaucuguuugacacgaaccgaucguggcugguacugcgacaacgccggcucugucuccuuuuucccucaggcugaaacguguaaggugcagucaaauagaguguuuugcgauaccaugaacaguagaacacugccaagcgaggugaaucucugcaacauagacauuuucaaucccaaauaugauuguaagaucaugacuuccaaaaccgacgucucuagcucagugaucacaagucugggggccauuguauccugcuacggaaagacuaaauguaccgcaagcaacaagaauagggguaucauuaagacauuuucuaacggcugcgauuauguuucaaauaaagggguggacaccgucagugugggaaacacucuuuacugugucaacaagcaagagggcaaaagccuguaugugaagggugaaccuauaaucaauuucuacgacccauugguuuuuccguccgaugaguucgacgcuucuauuucgcagguuaacgagaaaaucaaucagagccucgccuuuauccggaaguccgaugaacuguuacacaacguaaaugucgggaagucaacgacaaacauuaugauaaccacuaucauuaucgugauuaucguuauacugcuacuccugaucgcggugggacuuuucuuguauugcaaagcccgcaguacccccgucacacugucuaaggaccagcucagcggcauuaauaacaucgcauucuccaauugaggacuaguacuggcugcaucucccuuuccucuguccuccauccuucucccaggauggugaagggggaccugguacccagugauccccaccccaggauccuaaaucaugacuuaccugcuaauaaaaacucauuggaaaagugagaagaucuaaaaaaaaaaaaaaaaaaaaaaaaaaaaaaaaaaaaaaaaaaaaaaaaaaaaaaaaaaaaaaaaugcaucccccccccccccccccccccccccccccccaaaggcucuuuucagagccaccagaauu

SEQ ID NO: 16391 - RNA, 1964 nt, Artificial Sequence
  mRNA product Design f-3 comprising derived and/or modified sequence from HRSV(Memphis-37)__AIY60640.1__F_DSCav1_mut4 (opt4)
gggagagucccgcagucggcguccagcggcucugcuuguucgugugugugucguugcaggccuuauucaagcuuaccauggagcugcccauccugaagaccaacgccaucaccaccauccuggccgccgugacccugugcuucgccagcagccagaacaucaccgaggaguucuaccagagcaccugcagcgccgugagcaagggcuaccugagcgcccugagaaccggcugguacaccagcgugaucaccaucgagcugagcaacaucaaggagaacaagugcaacggcaccgacgccaaggugaagcugaucaagcaggagcuggacaaguacaagaacgccgugaccgagcugcagcugcugaugcagagcacccccgccgccggcagcggcagcgccaucugcagcggcaucgccgugugcaaggugcugcaccuggagggcgaggugaacaagaucaagaacgcccugcugagcaccaacaaggccguggugagccugagcaacggcgugagcgugcugaccuucaaggugcuggaccugaagaacuacaucgacaagcagcugcugcccauccugaacaagcagagcugcagcaucagcaacaucgagaccgugaucgaguuccagcagaagaacaacagacugcuggagaucaccagagaguucagcgugaacgccggcgugaccacccccgugagcaccuacaugcugaccaacagcgagcugcugagccugaucaacgacaugcccaucaccaacgaccagaagaagcugaugagcaacaacgugcagaucgugagacagcagagcuacagcaucaugugcaucaucaaggaggaggugcuggccuacguggugcagcugccccuguacggcgugaucgacacccccugcuggaagcugcacaccagcccccugugcaccaccaacaccaaggagggcagcaacaucugccugaccagaaccgacagaggcugguacugcgacaacgccggcagcgugagcuucuucccccaggccgagaccugcaaggugcagagcaacagaguguucugcgacaccaugaacagcagaacccugcccagcgaggugaaccugugcaacaucgacaucuucaaccccaaguacgacugcaagaucaugaccagcaagaccgacgugagcagcagcgugaucaccagccugggcgccaucgugagcugcuacggcaagaccaagugcaccgccagcaacaagaacagaggcaucaucaagaccuucagcaacggcugcgacuacgugagcaacaagggcguggacaccgugagcgugggcaacacccuguacugcgugaacaagcaggagggcaagagccuguacgugaagggcgagcccaucaucaacuucuacgacccccugguguuccccagcgacgaguucgacgccagcaucagccaggugaacgagaagaucaaccagagccuggccuucaucagaaagagcgacgagcugcugcacaacgugaacgugggcaagagcaccaccaacaucaugaucaccaccaucaucaucgugaucaucgugauccugcugcugcugaucgccgugggccuguuccuguacugcaaggccagaagcacccccgugacccugagcaaggaccagcugagcggcaucaacaacaucgccuucagcaacugaggacuaguacuggcugcaucucccuuuccucuguccuccauccuucucccaggauggugaagggggaccugguacccagugauccccaccccaggauccuaaaucaugacuuaccugcuaauaaaaacucauuggaaaagugagaagaucuaaaaaaaaaaaaaaaaaaaaaaaaaaaaaaaaaaaaaaaaaaaaaaaaaaaaaaaaaaaaaaaaugcaucccccccccccccccccccccccccccccccaaaggcucuuuucagagccaccagaauu

SEQ ID NO: 16392 - RNA, 1964 nt, Artificial Sequence
  mRNA product Design f-3 comprising derived and/or modified sequence from HRSV(Memphis-37)__AIY60640.1__F_DSCav1_mut4 (opt5)
gggagagucccgcagucggcguccagcggcucugcuuguucgugugugugucguugcaggccuuauucaagcuuaccauggagcugcccauccucaagaccaacgccauuacaacgauccuggcugccgugacccuuugcuucgcgagcucccagaauauuacagaagaguuuuaccaaucuaccuguagcgcugucuccaaaggcuaucugucugcccucagaacagggugguacaccagcguuaucacaauugaacuguccaacaucaaggagaauaaaugcaacggaaccgacgccaaggugaaacuuaucaagcaggaacuggauaaguauaaaaaugcugugacggagcuccagcugcugaugcagucuaccccugccgcuggcagcggguccgccauuuguagcggaaucgcggucugcaaggugcuccaccuggagggcgaaguuaacaaaauuaagaaugcccuucugucuacaaacaaagcuguggucucccucagcaauggggugucuguucugaccuucaaggugcuugaccugaagaacuacaucgauaaacaacuccugccgauucugaauaagcaguccuguagcaucucuaacauugagacagucaucgaauuucagcagaaaaauaaccggcuccuggagaucacccgcgaguucuccgugaaugccggagugacgacacccgucagcaccuauaugcuuacaaacuccgaacugcucucucugauuaacgacaugccuaucaccaaugaucaaaagaaacuuaugagcaacaauguucagauugugagacagcaguccuacagcaucaugugcauuaucaaggaggaagugcuggcuuaugucgugcaacucccccuguacggcguuaucgacaccccuuguuggaaacugcauacaucuccccucugcacgaccaacacaaaggagggcuccaauauuugucugacccggacagaucgcgggugguacugcgacaacgccggaagcgugagcuuuuucccucaggcggaaaccuguaagguccagucuaauagaguguuuugcgauacgaugaacuccagaacacugccgucugagguuaaucucugcaacaucgacauuuucaaucccaaauaugauuguaagaucaugaccagcaaaaccgacguguccagcucugucauuacaucccugggcgccaucgugagcugcuacgggaagaccaaauguacagcuucuaacaagaaucggggaaucauuaagacguuuuccaacggcugcgauuaugucagcaauaaagggguggacaccguuuccgugggaaacacacuuuacugugucaacaagcaagagggcaaaucucuguaugugaagggcgaaccuaucauuaauuucuacgacccccucguuuuuccuagcgaugaguucgacgccuccaucucucaggugaacgaaaagauuaaucagagccuggcuuuuauccgcaaguccgaugagcugcuccacaacgucaauguggggaaaagcaccacaaacauuaugaucaccacgaucauuaucgugauuaucguuauucugcuucugcucaucgccgucggacuguuccuguauugcaaagccagaucuacccccgugacacuuuccaaggaccagcucagcggcaucaauaacauugcuuucucuaauugaggacuaguacuggcugcaucucccuuuccucuguccuccauccuucucccaggauggugaagggggaccugguacccagugauccccaccccaggauccuaaaucaugacuuaccugcuaauaaaaacucauuggaaaagugagaagaucuaaaaaaaaaaaaaaaaaaaaaaaaaaaaaaaaaaaaaaaaaaaaaaaaaaaaaaaaaaaaaaaaugcaucccccccccccccccccccccccccccccccaaaggcucuuuucagagccaccagaauu

SEQ ID NO: 16393 - RNA, 1964 nt, Artificial Sequence
  mRNA product Design f-3 comprising derived and/or modified sequence from HRSV(Memphis-37)__AIY60640.1__F_DSCav1_mut4 (opt6)
gggagagucccgcagucggcguccagcggcucugcuuguucgugugugugucguugcaggccuuauucaagcuuaccauggaacucccaauccuaaaaacaaacgcaauaacaacaauauuagcagccguaacacucuguuucgccucaucccaaaacauaacagaagaauuuuaucaaucuacauguuccgccgucaguaaaggauaucuaucagccuuaagaacaggcugguacacaucaguaaucaccauagaauuauccaacauaaaagaaaacaaaugcaauggcacagaugccaaaguaaaacuaaucaaacaagaacuugauaaauauaaaaacgcaguaacagaauuacaauuauuaaugcaaagcacaccagccgcaggaucaggaucagcaauauguucaggaauagcagucuguaaaguacuacacuuagaaggagaaguaaacaaaauuaaaaacgcauuacuaagcaccaauaaagcaguaguaucacuaucaaacggcguauccguauuaacguucaaaguccucgaccugaaaaacuacauagauaaacaacuacuaccaauacuaaauaaacaaucaugcucaauaucaaacauagaaacuguuaucgaauuucaacagaaaaauaaccgacuacuagaaaucaccagagaauuuucaguaaacgcaggcgucacuacaccaguauccacauacaugcuaaccaacucggaauuacuuucccucauaaacgacaugccaauaacaaacgaccaaaagaaacuuaugucaaacaacguucaaauaguccgccaacaaucauacucaauaauguguaucauaaaagaagaaguccuagcauaugucguacaacuaccauuauacggaguaauugacacaccuugcuggaaacuacacacauccccacuauguacaacaaacacuaaagaaggaucaaacaucugccuaaccagaacagacagaggcugguauugcgacaacgcaggaucaguaucauucuucccacaagcagaaacaugcaaaguacaaucaaacagagucuucugcgacaccaugaacagcagaacccucccauccgaaguaaacuuaugcaacaucgauaucuucaacccaaaauacgacuguaaaauaaugacaucaaaaacagacguuucauccucaguaauaacaucauuaggugccauaguuucauguuacggaaaaaccaaauguaccgcaucaaacaaaaacagaggcauuauuaaaacauucucuaacggaugcgacuaugucaguaacaaaggaguagacacaguaucagucggaaacacauuauauugcguaaauaaacaagaaggaaaaagucuauacguaaaaggagaaccaauaauaaacuuuuacgacccucucguauucccaucagacgaauuugaugcauccauaucacaagucaacgaaaagauaaaccaaucccuagcauucauaagaaaaucagacgaacuacuccauaacguaaacguaggaaaaagcacaaccaauauaaugauaaccacaauaaucauaguaauaauagucauauuauuacuuuuaauugcaguaggacucuuucuauacugcaaagcaagaagcacaccaguaacacuaagcaaagaccaacuaucaggcaucaacaauaucgccuuuucaaauuaaggacuaguacuggcugcaucucccuuuccucuguccuccauccuucucccaggauggugaagggggaccugguacccagugauccccaccccaggauccuaaaucaugacuuaccugcuaauaaaaacucauuggaaaagugagaagaucuaaaaaaaaaaaaaaaaaaaaaaaaaaaaaaaaaaaaaaaaaaaaaaaaaaaaaaaaaaaaaaaaugcaucccccccccccccccccccccccccccccccaaaggcucuuuucagagccaccagaauu

SEQ ID NO: 16394 - RNA, 1964 nt, Artificial Sequence
  mRNA product Design f-3 comprising derived and/or modified sequence from HRSV(Memphis-37)__AIY60640.1__F_DSCav1_mut4 (opt11)
gggagagucccgcagucggcguccagcggcucugcuuguucgugugugugucguugcaggccuuauucaagcuuaccauggagcugcccauccucaagaccaacgccaucaccacgauccuggccgcggugacccugugcuucgcgagcucccagaacaucaccgaggaguucuaccagagcacgugcuccgccgucagcaagggcuaccucuccgcccugcgcaccgggugguacaccagcgugaucaccaucgagcuguccaacaucaaggagaacaagugcaacggcaccgacgccaaggugaaacucaucaagcaggagcuggacaaguacaagaacgccgucaccgagcugcagcuccugaugcagagcaccccggccgccggguccggcagcgcuaucugcuccgggaucgcggugugcaaggugcugcaccucgagggcgaggucaacaagaucaagaaugcccugcugagcaccaacaaggccguggugucccucagcaacggagucagcgugcuuaccuucaaggugcuggaccucaagaacuacaucgacaagcagcugcugccuauccucaacaagcagagcugcuccaucagcaacaucgagacggucaucgaguuccagcagaagaacaaccggcugcuggagaucacccgcgaguucuccgugaacgccggggugaccacccccgucagcacguacaugcucaccaacagcgaacugcugucccucaucaacgacaugcccaucaccaacgaccagaagaagcugaugagcaacaacgugcagaucgugcggcagcaguccuacagcaucaugugcaucaucaaggaggaaguccuggccuacguggugcagcucccucuguacggcgucaucgacacccccugcuggaagcugcacacgagcccccucugcaccaccaacaccaaggagggguccaacaucugccugacgcgcaccgaccggggcugguacugcgacaacgcgggguccgugagcuucuucccccaggccgagaccugcaaggugcagagcaaccgcgucuucugcgacacuaugaacagcagaacgcucccguccgaggugaaccugugcaacauagacauauucaaccccaaguacgacugcaagaucaugaccagcaagaccgacgucuccagcuccgugauuaccagccugggcgcaaucguguccugcuacggcaagacgaagugcaccgccagcaacaagaaccgggggaucaucaagaccuucuccaacggcugcgacuaugucagcaacaaggggguggacaccgugagcgucggaaacacgcucuacugcgugaacaagcaagagggcaaguccuuauacgugaagggggagcccaucaucaacuucuacgacccccuggucuucccgagcgacgaguucgacgccagcauaagccaggugaacgagaagaucaaccagucccucgcguucauccgcaagagcgacgagcugcugcacaacgugaacgucggcaaguccaccaccaacaucaugaucaccaccaucaucaucgugaucaucgugauccuccugcugcucaucgccgucgggcuguuccuguacugcaaggcccggagcacgcccgugaccuuguccaaggaccagcucagcggcaucaacaacaucgccuucuccaacugaggacuaguacuggcugcaucucccuuuccucuguccuccauccuucucccaggauggugaagggggaccugguacccagugauccccaccccaggauccuaaaucaugacuuaccugcuaauaaaaacucauuggaaaagugagaagaucuaaaaaaaaaaaaaaaaaaaaaaaaaaaaaaaaaaaaaaaaaaaaaaaaaaaaaaaaaaaaaaaaugcaucccccccccccccccccccccccccccccccaaaggcucuuuucagagccaccagaauu

SEQ ID NO: 16395 - RNA, 2180 nt, Artificial Sequence
  mRNA product Design f-4 comprising derived and/or modified sequence from HRSV(Memphis-37)__AIY60640.1__F_DSCav1_mut4 (opt1)
gggagagucccgcagucggcguccagcggcucugcuuguucgugugugugucguugcaggccuuauucaagcuuaccauggagcugcccauccucaagaccaacgccaucaccacgauccuggccgcggugacccugugcuucgccagcucccagaacaucaccgaggaguucuaccagagcacgugcuccgccgucagcaagggcuaccucuccgcccugcgcaccgggugguacaccagcgugaucaccaucgagcuguccaacaucaaggagaacaagugcaacggcaccgacgccaaggugaagcucaucaagcaggagcuggacaaguacaagaacgcggucacggagcugcagcuccugaugcagagcaccccggccgccggcuccgggagcgcgaucugcuccggcaucgccgucugcaaggugcugcaccucgagggcgaggugaacaagaucaagaacgcccugcuguccaccaacaaggccgucgugagccucuccaacggggugagcguccugaccuucaaggugcuggaccucaagaacuacaucgacaagcagcugcugcccauccugaacaagcagagcugcuccaucagcaacaucgagaccgucaucgaguuccagcagaagaacaaccgccuccuggagaucacgcgggaguucagcgugaacgcgggcgugaccacccccgucuccaccuacaugcugacgaacagcgagcuccugucccugaucaacgacaugccgaucaccaacgaccagaagaagcucaugagcaacaacgugcagaucgugcgccagcaguccuacagcaucaugugcaucaucaaggaggagguccuggccuacguggugcagcugccccucuacggggucaucgacacccccugcuggaagcugcacaccagcccccugugcacgaccaacaccaaggagggcuccaacaucugccucacccggacggaccgcgggugguacugcgacaacgccggcagcguguccuucuucccgcaggccgagaccugcaagguccagagcaaccggguguucugcgacaccaugaacucccggacccugcccagcgaggugaaccucugcaacaucgacaucuucaaccccaaguacgacugcaagaucaugacguccaagaccgacgucagcuccagcgugaucaccucccugggcgccaucgugagcugcuacgggaagaccaagugcacggcgagcaacaagaaccgcggcaucaucaagaccuucuccaacgggugcgacuacgucagcaacaagggcguggacaccguguccgucggcaacacccuguacugcgugaacaagcaggagggcaagagccucuacgugaagggggagcccaucaucaacuucuacgacccgcuggucuuccccuccgacgaguucgacgccagcaucucccaggugaacgagaagaucaaccagagccuggccuucauccggaaguccgacgagcuccugcacaacgugaacgucggcaagagcaccacgaacaucaugaucaccaccaucaucaucgugaucaucgugauccugcugcuccugaucgccgucgggcuguuccucuacugcaaggcccgcuccacccccgugacgcugagcaaggaccagcuguccgggaucaacaacaucgcguucagcaacugaggacuagugaagggaacacccaaauuuaauucagccuuaagcacaauuaauuaagagugaaacguaauuguacaagcaguuggucacccaccauagggcaugaucaacaccgcaaccuuuccuuuuucccccagugauucugaaaaaccccucuucccuucagcuugcuuagauguuccaaauuuaguaagcuuaaggcggccuacagaagaaaaagaaaaaaaaggccacaaaaguucccucucacuuucaguaaauaaaauaaaagcagcaacagaaauaaagaaauaaaugaaauucaaaaugaaauaaauauuguguugugcagcauuaaaaaaucaauaaaaauuaaaaaugagcaagaucuaaaaaaaaaaaaaaaaaaaaaaaaaaaaaaaaaaaaaaaaaaaaaaaaaaaaaaaaaaaaaaaaugcaucccccccccccccccccccccccccccccccaaaggcucuuuucagagccaccagaauu

SEQ ID NO: 16396 - RNA, 2180 nt, Artificial Sequence
  mRNA product Design f-4 comprising derived and/or modified sequence from HRSV(Memphis-37)__AIY60640.1__F_DSCav1_mut4 (opt1)
gggagagucccgcagucggcguccagcggcucugcuuguucgugugugugucguugcaggccuuauucaagcuuaccauggagcugcccauccucaagaccaacgccaucaccacgauccuggccgcggugacccugugcuucgccagcucccagaacaucaccgaggaguucuaccagagcacgugcuccgccgucagcaagggcuaccucuccgcccugcgcaccgggugguacaccagcgugaucaccaucgagcuguccaacaucaaggagaacaagugcaacggcaccgacgccaaggugaagcucaucaagcaggagcuggacaaguacaagaacgcggucacggagcugcagcuccugaugcagagcaccccggccgccggguccggcagcgccaucugcuccgggaucgcggugugcaaggugcugcaccucgagggcgaggucaacaagaucaagaacgcccugcugagcaccaacaaggccguggugucccucagcaacggcgucuccgugcugaccuucaaggugcuggaccucaagaacuacaucgacaagcagcugcugcccauccucaacaagcagagcugcuccaucagcaacaucgagacggucaucgaguuccagcagaagaacaaccggcugcuggagaucacccgcgaguucuccgugaacgccggggugaccacccccgucagcacguacaugcucaccaacagcgagcugcugucccucaucaacgacaugcccaucaccaacgaccagaagaagcugaugagcaacaacgugcagaucgugcggcagcaguccuacagcaucaugugcaucaucaaggaggagguccuggccuacguggugcagcucccgcuguacggcgucaucgacacccccugcuggaagcugcacacgagcccccucugcaccaccaacaccaaggagggguccaacaucugccugacgcgcaccgaccggggcugguacugcgacaacgcgggguccgugagcuucuucccccaggccgagaccugcaaggugcaguccaaccgcgucuucugcgacaccaugaacagccggacgcucccguccgaggugaaccugugcaacaucgacaucuucaaccccaaguacgacugcaagaucaugaccagcaagaccgacgucuccagcuccgugaucaccagccugggcgccaucguguccugcuacggcaagacgaagugcaccgccagcaacaagaaccgggggaucaucaagaccuucuccaacggcugcgacuacgucagcaacaaggggguggacaccgugagcgucggcaacacgcucuacugcgugaacaagcaggagggcaagucccuguacgugaagggggagcccaucaucaacuucuacgacccccuggucuucccgagcgacgaguucgacgccuccaucagccaggugaacgagaagaucaaccagucccucgcguucauccgcaagagcgacgagcugcugcacaacgugaacgucggcaaguccaccaccaacaucaugaucaccaccaucaucaucgugaucaucgugauccuccugcugcucaucgccgucgggcuguuccuguacugcaaggcccggagcacgcccgugacccuguccaaggaccagcucagcggcaucaacaacaucgccuucuccaacugaggacuagugaagggaacacccaaauuuaauucagccuuaagcacaauuaauuaagagugaaacguaauuguacaagcaguuggucacccaccauagggcaugaucaacaccgcaaccuuuccuuuuucccccagugauucugaaaaaccccucuucccuucagcuugcuuagauguuccaaauuuaguaagcuuaaggcggccuacagaagaaaaagaaaaaaaaggccacaaaaguucccucucacuuucaguaaauaaaauaaaagcagcaacagaaauaaagaaauaaaugaaauucaaaaugaaauaaauauuguguugugcagcauuaaaaaaucaauaaaaauuaaaaaugagcaagaucuaaaaaaaaaaaaaaaaaaaaaaaaaaaaaaaaaaaaaaaaaaaaaaaaaaaaaaaaaaaaaaaaugcaucccccccccccccccccccccccccccccccaaaggcucuuuucagagccaccagaauu

SEQ ID NO: 16397 - RNA, 2180 nt, Artificial Sequence
  mRNA product Design f-4 comprising derived and/or modified sequence from HRSV(Memphis-37)__AIY60640.1__F_DSCav1_mut4 (opt2)
gggagagucccgcagucggcguccagcggcucugcuuguucgugugugugucguugcaggccuuauucaagcuuaccauggagcuccccauccucaagaccaacgccaucaccaccauccucgccgccgucacccucugcuucgccuccucccagaacaucaccgaggaguucuaccaguccaccugcuccgccgucuccaagggcuaccucuccgcccuccgcaccggcugguacaccuccgucaucaccaucgagcucuccaacaucaaggagaacaagugcaacggcaccgacgccaaggucaagcucaucaagcaggagcucgacaaguacaagaacgccgucaccgagcuccagcuccucaugcaguccacccccgccgccggcuccggcuccgccaucugcuccggcaucgccgucugcaagguccuccaccucgagggcgaggucaacaagaucaagaacgcccuccucuccaccaacaaggccgucgucucccucuccaacggcgucuccguccucaccuucaagguccucgaccucaagaacuacaucgacaagcagcuccuccccauccucaacaagcaguccugcuccaucuccaacaucgagaccgucaucgaguuccagcagaagaacaaccgccuccucgagaucacccgcgaguucuccgucaacgccggcgucaccacccccgucuccaccuacaugcucaccaacuccgagcuccucucccucaucaacgacaugcccaucaccaacgaccagaagaagcucauguccaacaacguccagaucguccgccagcaguccuacuccaucaugugcaucaucaaggaggagguccucgccuacgucguccagcucccccucuacggcgucaucgacacccccugcuggaagcuccacaccuccccccucugcaccaccaacaccaaggagggcuccaacaucugccucacccgcaccgaccgcggcugguacugcgacaacgccggcuccgucuccuucuucccccaggccgagaccugcaagguccaguccaaccgcgucuucugcgacaccaugaacucccgcacccuccccuccgaggucaaccucugcaacaucgacaucuucaaccccaaguacgacugcaagaucaugaccuccaagaccgacgucuccuccuccgucaucaccucccucggcgccaucgucuccugcuacggcaagaccaagugcaccgccuccaacaagaaccgcggcaucaucaagaccuucuccaacggcugcgacuacgucuccaacaagggcgucgacaccgucuccgucggcaacacccucuacugcgucaacaagcaggagggcaagucccucuacgucaagggcgagcccaucaucaacuucuacgacccccucgucuuccccuccgacgaguucgacgccuccaucucccaggucaacgagaagaucaaccagucccucgccuucauccgcaaguccgacgagcuccuccacaacgucaacgucggcaaguccaccaccaacaucaugaucaccaccaucaucaucgucaucaucgucauccuccuccuccucaucgccgucggccucuuccucuacugcaaggcccgcuccacccccgucacccucuccaaggaccagcucuccggcaucaacaacaucgccuucuccaacugaggacuagugaagggaacacccaaauuuaauucagccuuaagcacaauuaauuaagagugaaacguaauuguacaagcaguuggucacccaccauagggcaugaucaacaccgcaaccuuuccuuuuucccccagugauucugaaaaaccccucuucccuucagcuugcuuagauguuccaaauuuaguaagcuuaaggcggccuacagaagaaaaagaaaaaaaaggccacaaaaguucccucucacuuucaguaaauaaaauaaaagcagcaacagaaauaaagaaauaaaugaaauucaaaaugaaauaaauauuguguugugcagcauuaaaaaaucaauaaaaauuaaaaaugagcaagaucuaaaaaaaaaaaaaaaaaaaaaaaaaaaaaaaaaaaaaaaaaaaaaaaaaaaaaaaaaaaaaaaaugcaucccccccccccccccccccccccccccccccaaaggcucuuuucagagccaccagaauu

SEQ ID NO: 16398 - RNA, 2180 nt, Artificial Sequence
  mRNA product Design f-4 comprising derived and/or modified sequence from HRSV(Memphis-37)__AIY60640.1__F_DSCav1_mut4 (opt3)
gggagagucccgcagucggcguccagcggcucugcuuguucgugugugugucguugcaggccuuauucaagcuuaccauggagcugcccauccucaagaccaacgccauuacaacuauacuugcugcagugacgcugugcuucgccagcucccagaauaucaccgaagaguuuuaccaaucuacauguucagcggucaguaaaggcuauuugagcgcuuuaagaacugggugguacaccuccguuauuacaaucgaacugucuaacauuaaggagaauaaaugcaacggaaccgacgccaaggugaaacuaaucaagcaggaacucgauaaguauaaaaaugcaguaacugagcugcagcuucugaugcagucgaccccugccgcugguucaggcagcgcaauauguagugggaucgccgugugcaaggucuugcaccucgagggagaagugaacaaaauuaagaaugcucugcuguccacaaacaaagccguugugucucucagcaauggcgucuccguguuaacguucaagguacuggaccuuaagaacuacaucgauaaacaauugcugccaauucuaaauaagcagucauguaguaucagcaacauagagacuguuauugaauuucagcagaaaaauaacaggcuccuggagaucacccgggaguucucugugaaugcgggugucacaacuccgguguccaccuauaugcuuacaaacucagaacuguugagccucauuaacgacaugcccaucaccaaugaucaaaagaaacugaugaguaacaaugugcagaucguccgccagcagucuuacuccauuaugugcauaaucaaggaggaaguuuuagcauaugugguacaacugccucucuacggggugauugacacgccauguuggaaacuucauacuagcccccugugcacaaccaacacuaaggagggaucgaauaucuguuugacacgaaccgaucguggcugguacugcgacaacgccggcucugucuccuuuuucccucaggcugaaacguguaaggugcagucaaauagaguguuuugcgauaccaugaacaguagaacacugccaagcgaggugaaucucugcaacauagacauuuucaaucccaaauaugauuguaagaucaugacuuccaaaaccgacgucucuagcucagugaucacaagucugggggccauuguauccugcuacggaaagacuaaauguaccgcaagcaacaagaauagggguaucauuaagacauuuucuaacggcugcgauuauguuucaaauaaagggguggacaccgucagugugggaaacacucuuuacugugucaacaagcaagagggcaaaagccuguaugugaagggugaaccuauaaucaauuucuacgacccauugguuuuuccguccgaugaguucgacgcuucuauuucgcagguuaacgagaaaaucaaucagagccucgccuuuauccggaaguccgaugaacuguuacacaacguaaaugucgggaagucaacgacaaacauuaugauaaccacuaucauuaucgugauuaucguuauacugcuacuccugaucgcggugggacuuuucuuguauugcaaagcccgcaguacccccgucacacugucuaaggaccagcucagcggcauuaauaacaucgcauucuccaauugaggacuagugaagggaacacccaaauuuaauucagccuuaagcacaauuaauuaagagugaaacguaauuguacaagcaguuggucacccaccauagggcaugaucaacaccgcaaccuuuccuuuuucccccagugauucugaaaaaccccucuucccuucagcuugcuuagauguuccaaauuuaguaagcuuaaggcggccuacagaagaaaaagaaaaaaaaggccacaaaaguucccucucacuuucaguaaauaaaauaaaagcagcaacagaaauaaagaaauaaaugaaauucaaaaugaaauaaauauuguguugugcagcauuaaaaaaucaauaaaaauuaaaaaugagcaagaucuaaaaaaaaaaaaaaaaaaaaaaaaaaaaaaaaaaaaaaaaaaaaaaaaaaaaaaaaaaaaaaaaugcaucccccccccccccccccccccccccccccccaaaggcucuuuucagagccaccagaauu

SEQ ID NO: 16399 - RNA, 2180 nt, Artificial Sequence
  mRNA product Design f-4 comprising derived and/or modified sequence from HRSV(Memphis-37)__AIY60640.1__F_DSCav1_mut4 (opt4)
gggagagucccgcagucggcguccagcggcucugcuuguucgugugugugucguugcaggccuuauucaagcuuaccauggagcugcccauccugaagaccaacgccaucaccaccauccuggccgccgugacccugugcuucgccagcagccagaacaucaccgaggaguucuaccagagcaccugcagcgccgugagcaagggcuaccugagcgcccugagaaccggcugguacaccagcgugaucaccaucgagcugagcaacaucaaggagaacaagugcaacggcaccgacgccaaggugaagcugaucaagcaggagcuggacaaguacaagaacgccgugaccgagcugcagcugcugaugcagagcacccccgccgccggcagcggcagcgccaucugcagcggcaucgccgugugcaaggugcugcaccuggagggcgaggugaacaagaucaagaacgcccugcugagcaccaacaaggccguggugagccugagcaacggcgugagcgugcugaccuucaaggugcuggaccugaagaacuacaucgacaagcagcugcugcccauccugaacaagcagagcugcagcaucagcaacaucgagaccgugaucgaguuccagcagaagaacaacagacugcuggagaucaccagagaguucagcgugaacgccggcgugaccacccccgugagcaccuacaugcugaccaacagcgagcugcugagccugaucaacgacaugcccaucaccaacgaccagaagaagcugaugagcaacaacgugcagaucgugagacagcagagcuacagcaucaugugcaucaucaaggaggaggugcuggccuacguggugcagcugccccuguacggcgugaucgacacccccugcuggaagcugcacaccagcccccugugcaccaccaacaccaaggagggcagcaacaucugccugaccagaaccgacagaggcugguacugcgacaacgccggcagcgugagcuucuucccccaggccgagaccugcaaggugcagagcaacagaguguucugcgacaccaugaacagcagaacccugcccagcgaggugaaccugugcaacaucgacaucuucaaccccaaguacgacugcaagaucaugaccagcaagaccgacgugagcagcagcgugaucaccagccugggcgccaucgugagcugcuacggcaagaccaagugcaccgccagcaacaagaacagaggcaucaucaagaccuucagcaacggcugcgacuacgugagcaacaagggcguggacaccgugagcgugggcaacacccuguacugcgugaacaagcaggagggcaagagccuguacgugaagggcgagcccaucaucaacuucuacgacccccugguguuccccagcgacgaguucgacgccagcaucagccaggugaacgagaagaucaaccagagccuggccuucaucagaaagagcgacgagcugcugcacaacgugaacgugggcaagagcaccaccaacaucaugaucaccaccaucaucaucgugaucaucgugauccugcugcugcugaucgccgugggccuguuccuguacugcaaggccagaagcacccccgugacccugagcaaggaccagcugagcggcaucaacaacaucgccuucagcaacugaggacuagugaagggaacacccaaauuuaauucagccuuaagcacaauuaauuaagagugaaacguaauuguacaagcaguuggucacccaccauagggcaugaucaacaccgcaaccuuuccuuuuucccccagugauucugaaaaaccccucuucccuucagcuugcuuagauguuccaaauuuaguaagcuuaaggcggccuacagaagaaaaagaaaaaaaaggccacaaaaguucccucucacuuucaguaaauaaaauaaaagcagcaacagaaauaaagaaauaaaugaaauucaaaaugaaauaaauauuguguugugcagcauuaaaaaaucaauaaaaauuaaaaaugagcaagaucuaaaaaaaaaaaaaaaaaaaaaaaaaaaaaaaaaaaaaaaaaaaaaaaaaaaaaaaaaaaaaaaaugcaucccccccccccccccccccccccccccccccaaaggcucuuuucagagccaccagaauu

SEQ ID NO: 16400 - RNA, 2180 nt, Artificial Sequence
  mRNA product Design f-4 comprising derived and/or modified sequence from HRSV(Memphis-37)__AIY60640.1__F_DSCav1_mut4 (opt5)
gggagagucccgcagucggcguccagcggcucugcuuguucgugugugugucguugcaggccuuauucaagcuuaccauggagcugcccauccucaagaccaacgccauuacaacgauccuggcugccgugacccuuugcuucgcgagcucccagaauauuacagaagaguuuuaccaaucuaccuguagcgcugucuccaaaggcuaucugucugcccucagaacagggugguacaccagcguuaucacaauugaacuguccaacaucaaggagaauaaaugcaacggaaccgacgccaaggugaaacuuaucaagcaggaacuggauaaguauaaaaaugcugugacggagcuccagcugcugaugcagucuaccccugccgcuggcagcggguccgccauuuguagcggaaucgcggucugcaaggugcuccaccuggagggcgaaguuaacaaaauuaagaaugcccuucugucuacaaacaaagcuguggucucccucagcaauggggugucuguucugaccuucaaggugcuugaccugaagaacuacaucgauaaacaacuccugccgauucugaauaagcaguccuguagcaucucuaacauugagacagucaucgaauuucagcagaaaaauaaccggcuccuggagaucacccgcgaguucuccgugaaugccggagugacgacacccgucagcaccuauaugcuuacaaacuccgaacugcucucucugauuaacgacaugccuaucaccaaugaucaaaagaaacuuaugagcaacaauguucagauugugagacagcaguccuacagcaucaugugcauuaucaaggaggaagugcuggcuuaugucgugcaacucccccuguacggcguuaucgacaccccuuguuggaaacugcauacaucuccccucugcacgaccaacacaaaggagggcuccaauauuugucugacccggacagaucgcgggugguacugcgacaacgccggaagcgugagcuuuuucccucaggcggaaaccuguaagguccagucuaauagaguguuuugcgauacgaugaacuccagaacacugccgucugagguuaaucucugcaacaucgacauuuucaaucccaaauaugauuguaagaucaugaccagcaaaaccgacguguccagcucugucauuacaucccugggcgccaucgugagcugcuacgggaagaccaaauguacagcuucuaacaagaaucggggaaucauuaagacguuuuccaacggcugcgauuaugucagcaauaaagggguggacaccguuuccgugggaaacacacuuuacugugucaacaagcaagagggcaaaucucuguaugugaagggcgaaccuaucauuaauuucuacgacccccucguuuuuccuagcgaugaguucgacgccuccaucucucaggugaacgaaaagauuaaucagagccuggcuuuuauccgcaaguccgaugagcugcuccacaacgucaauguggggaaaagcaccacaaacauuaugaucaccacgaucauuaucgugauuaucguuauucugcuucugcucaucgccgucggacuguuccuguauugcaaagccagaucuacccccgugacacuuuccaaggaccagcucagcggcaucaauaacauugcuuucucuaauugaggacuagugaagggaacacccaaauuuaauucagccuuaagcacaauuaauuaagagugaaacguaauuguacaagcaguuggucacccaccauagggcaugaucaacaccgcaaccuuuccuuuuucccccagugauucugaaaaaccccucuucccuucagcuugcuuagauguuccaaauuuaguaagcuuaaggcggccuacagaagaaaaagaaaaaaaaggccacaaaaguucccucucacuuucaguaaauaaaauaaaagcagcaacagaaauaaagaaauaaaugaaauucaaaaugaaauaaauauuguguugugcagcauuaaaaaaucaauaaaaauuaaaaaugagcaagaucuaaaaaaaaaaaaaaaaaaaaaaaaaaaaaaaaaaaaaaaaaaaaaaaaaaaaaaaaaaaaaaaaugcaucccccccccccccccccccccccccccccccaaaggcucuuuucagagccaccagaauu

SEQ ID NO: 16401 - RNA, 2180 nt, Artificial Sequence
  mRNA product Design f-4 comprising derived and/or modified sequence from HRSV(Memphis-37)__AIY60640.1__F_DSCav1_mut4 (opt6)
gggagagucccgcagucggcguccagcggcucugcuuguucgugugugugucguugcaggccuuauucaagcuuaccauggaacucccaauccuaaaaacaaacgcaauaacaacaauauuagcagccguaacacucuguuucgccucaucccaaaacauaacagaagaauuuuaucaaucuacauguuccgccgucaguaaaggauaucuaucagccuuaagaacaggcugguacacaucaguaaucaccauagaauuauccaacauaaaagaaaacaaaugcaauggcacagaugccaaaguaaaacuaaucaaacaagaacuugauaaauauaaaaacgcaguaacagaauuacaauuauuaaugcaaagcacaccagccgcaggaucaggaucagcaauauguucaggaauagcagucuguaaaguacuacacuuagaaggagaaguaaacaaaauuaaaaacgcauuacuaagcaccaauaaagcaguaguaucacuaucaaacggcguauccguauuaacguucaaaguccucgaccugaaaaacuacauagauaaacaacuacuaccaauacuaaauaaacaaucaugcucaauaucaaacauagaaacuguuaucgaauuucaacagaaaaauaaccgacuacuagaaaucaccagagaauuuucaguaaacgcaggcgucacuacaccaguauccacauacaugcuaaccaacucggaauuacuuucccucauaaacgacaugccaauaacaaacgaccaaaagaaacuuaugucaaacaacguucaaauaguccgccaacaaucauacucaauaauguguaucauaaaagaagaaguccuagcauaugucguacaacuaccauuauacggaguaauugacacaccuugcuggaaacuacacacauccccacuauguacaacaaacacuaaagaaggaucaaacaucugccuaaccagaacagacagaggcugguauugcgacaacgcaggaucaguaucauucuucccacaagcagaaacaugcaaaguacaaucaaacagagucuucugcgacaccaugaacagcagaacccucccauccgaaguaaacuuaugcaacaucgauaucuucaacccaaaauacgacuguaaaauaaugacaucaaaaacagacguuucauccucaguaauaacaucauuaggugccauaguuucauguuacggaaaaaccaaauguaccgcaucaaacaaaaacagaggcauuauuaaaacauucucuaacggaugcgacuaugucaguaacaaaggaguagacacaguaucagucggaaacacauuauauugcguaaauaaacaagaaggaaaaagucuauacguaaaaggagaaccaauaauaaacuuuuacgacccucucguauucccaucagacgaauuugaugcauccauaucacaagucaacgaaaagauaaaccaaucccuagcauucauaagaaaaucagacgaacuacuccauaacguaaacguaggaaaaagcacaaccaauauaaugauaaccacaauaaucauaguaauaauagucauauuauuacuuuuaauugcaguaggacucuuucuauacugcaaagcaagaagcacaccaguaacacuaagcaaagaccaacuaucaggcaucaacaauaucgccuuuucaaauuaaggacuagugaagggaacacccaaauuuaauucagccuuaagcacaauuaauuaagagugaaacguaauuguacaagcaguuggucacccaccauagggcaugaucaacaccgcaaccuuuccuuuuucccccagugauucugaaaaaccccucuucccuucagcuugcuuagauguuccaaauuuaguaagcuuaaggcggccuacagaagaaaaagaaaaaaaaggccacaaaaguucccucucacuuucaguaaauaaaauaaaagcagcaacagaaauaaagaaauaaaugaaauucaaaaugaaauaaauauuguguugugcagcauuaaaaaaucaauaaaaauuaaaaaugagcaagaucuaaaaaaaaaaaaaaaaaaaaaaaaaaaaaaaaaaaaaaaaaaaaaaaaaaaaaaaaaaaaaaaaugcaucccccccccccccccccccccccccccccccaaaggcucuuuucagagccaccagaauu

SEQ ID NO: 16402 - RNA, 2180 nt, Artificial Sequence
  mRNA product Design f-4 comprising derived and/or modified sequence from HRSV(Memphis-37)__AIY60640.1__F_DSCav1_mut4 (opt11)
gggagagucccgcagucggcguccagcggcucugcuuguucgugugugugucguugcaggccuuauucaagcuuaccauggagcugcccauccucaagaccaacgccaucaccacgauccuggccgcggugacccugugcuucgcgagcucccagaacaucaccgaggaguucuaccagagcacgugcuccgccgucagcaagggcuaccucuccgcccugcgcaccgggugguacaccagcgugaucaccaucgagcuguccaacaucaaggagaacaagugcaacggcaccgacgccaaggugaaacucaucaagcaggagcuggacaaguacaagaacgccgucaccgagcugcagcuccugaugcagagcaccccggccgccggguccggcagcgcuaucugcuccgggaucgcggugugcaaggugcugcaccucgagggcgaggucaacaagaucaagaaugcccugcugagcaccaacaaggccguggugucccucagcaacggagucagcgugcuuaccuucaaggugcuggaccucaagaacuacaucgacaagcagcugcugccuauccucaacaagcagagcugcuccaucagcaacaucgagacggucaucgaguuccagcagaagaacaaccggcugcuggagaucacccgcgaguucuccgugaacgccggggugaccacccccgucagcacguacaugcucaccaacagcgaacugcugucccucaucaacgacaugcccaucaccaacgaccagaagaagcugaugagcaacaacgugcagaucgugcggcagcaguccuacagcaucaugugcaucaucaaggaggaaguccuggccuacguggugcagcucccucuguacggcgucaucgacacccccugcuggaagcugcacacgagcccccucugcaccaccaacaccaaggagggguccaacaucugccugacgcgcaccgaccggggcugguacugcgacaacgcgggguccgugagcuucuucccccaggccgagaccugcaaggugcagagcaaccgcgucuucugcgacacuaugaacagcagaacgcucccguccgaggugaaccugugcaacauagacauauucaaccccaaguacgacugcaagaucaugaccagcaagaccgacgucuccagcuccgugauuaccagccugggcgcaaucguguccugcuacggcaagacgaagugcaccgccagcaacaagaaccgggggaucaucaagaccuucuccaacggcugcgacuaugucagcaacaaggggguggacaccgugagcgucggaaacacgcucuacugcgugaacaagcaagagggcaaguccuuauacgugaagggggagcccaucaucaacuucuacgacccccuggucuucccgagcgacgaguucgacgccagcauaagccaggugaacgagaagaucaaccagucccucgcguucauccgcaagagcgacgagcugcugcacaacgugaacgucggcaaguccaccaccaacaucaugaucaccaccaucaucaucgugaucaucgugauccuccugcugcucaucgccgucgggcuguuccuguacugcaaggcccggagcacgcccgugaccuuguccaaggaccagcucagcggcaucaacaacaucgccuucuccaacugaggacuagugaagggaacacccaaauuuaauucagccuuaagcacaauuaauuaagagugaaacguaauuguacaagcaguuggucacccaccauagggcaugaucaacaccgcaaccuuuccuuuuucccccagugauucugaaaaaccccucuucccuucagcuugcuuagauguuccaaauuuaguaagcuuaaggcggccuacagaagaaaaagaaaaaaaaggccacaaaaguucccucucacuuucaguaaauaaaauaaaagcagcaacagaaauaaagaaauaaaugaaauucaaaaugaaauaaauauuguguugugcagcauuaaaaaaucaauaaaaauuaaaaaugagcaagaucuaaaaaaaaaaaaaaaaaaaaaaaaaaaaaaaaaaaaaaaaaaaaaaaaaaaaaaaaaaaaaaaaugcaucccccccccccccccccccccccccccccccaaaggcucuuuucagagccaccagaauu

SEQ ID NO: 16403 - RNA, 1956 nt, Artificial Sequence
  mRNA product Design f-5 comprising derived and/or modified sequence from HRSV(Memphis-37)__AIY60640.1__F_DSCav1_mut4 (opt1)
gggagacuuucccauucuguagcagaauuugguguugccuguggucuuggucccgcggagaagcuuaccauggagcugcccauccucaagaccaacgccaucaccacgauccuggccgcggugacccugugcuucgccagcucccagaacaucaccgaggaguucuaccagagcacgugcuccgccgucagcaagggcuaccucuccgcccugcgcaccgggugguacaccagcgugaucaccaucgagcuguccaacaucaaggagaacaagugcaacggcaccgacgccaaggugaagcucaucaagcaggagcuggacaaguacaagaacgcggucacggagcugcagcuccugaugcagagcaccccggccgccggcuccgggagcgcgaucugcuccggcaucgccgucugcaaggugcugcaccucgagggcgaggugaacaagaucaagaacgcccugcuguccaccaacaaggccgucgugagccucuccaacggggugagcguccugaccuucaaggugcuggaccucaagaacuacaucgacaagcagcugcugcccauccugaacaagcagagcugcuccaucagcaacaucgagaccgucaucgaguuccagcagaagaacaaccgccuccuggagaucacgcgggaguucagcgugaacgcgggcgugaccacccccgucuccaccuacaugcugacgaacagcgagcuccugucccugaucaacgacaugccgaucaccaacgaccagaagaagcucaugagcaacaacgugcagaucgugcgccagcaguccuacagcaucaugugcaucaucaaggaggagguccuggccuacguggugcagcugccccucuacggggucaucgacacccccugcuggaagcugcacaccagcccccugugcacgaccaacaccaaggagggcuccaacaucugccucacccggacggaccgcgggugguacugcgacaacgccggcagcguguccuucuucccgcaggccgagaccugcaagguccagagcaaccggguguucugcgacaccaugaacucccggacccugcccagcgaggugaaccucugcaacaucgacaucuucaaccccaaguacgacugcaagaucaugacguccaagaccgacgucagcuccagcgugaucaccucccugggcgccaucgugagcugcuacgggaagaccaagugcacggcgagcaacaagaaccgcggcaucaucaagaccuucuccaacgggugcgacuacgucagcaacaagggcguggacaccguguccgucggcaacacccuguacugcgugaacaagcaggagggcaagagccucuacgugaagggggagcccaucaucaacuucuacgacccgcuggucuuccccuccgacgaguucgacgccagcaucucccaggugaacgagaagaucaaccagagccuggccuucauccggaaguccgacgagcuccugcacaacgugaacgucggcaagagcaccacgaacaucaugaucaccaccaucaucaucgugaucaucgugauccugcugcuccugaucgccgucgggcuguuccucuacugcaaggcccgcuccacccccgugacgcugagcaaggaccagcuguccgggaucaacaacaucgcguucagcaacugaggacuaguacuggcugcaucucccuuuccucuguccuccauccuucucccaggauggugaagggggaccugguacccagugauccccaccccaggauccuaaaucaugacuuaccugcuaauaaaaacucauuggaaaagugagaagaucuaaaaaaaaaaaaaaaaaaaaaaaaaaaaaaaaaaaaaaaaaaaaaaaaaaaaaaaaaaaaaaaaugcaucccccccccccccccccccccccccccccccaaaggcucuuuucagagccaccagaauu

SEQ ID NO: 16404 - RNA, 1956 nt, Artificial Sequence
  mRNA product Design f-5 comprising derived and/or modified sequence from HRSV(Memphis-37)__AIY60640.1__F_DSCav1_mut4 (opt1)
gggagacuuucccauucuguagcagaauuugguguugccuguggucuuggucccgcggagaagcuuaccauggagcugcccauccucaagaccaacgccaucaccacgauccuggccgcggugacccugugcuucgccagcucccagaacaucaccgaggaguucuaccagagcacgugcuccgccgucagcaagggcuaccucuccgcccugcgcaccgggugguacaccagcgugaucaccaucgagcuguccaacaucaaggagaacaagugcaacggcaccgacgccaaggugaagcucaucaagcaggagcuggacaaguacaagaacgcggucacggagcugcagcuccugaugcagagcaccccggccgccggguccggcagcgccaucugcuccgggaucgcggugugcaaggugcugcaccucgagggcgaggucaacaagaucaagaacgcccugcugagcaccaacaaggccguggugucccucagcaacggcgucuccgugcugaccuucaaggugcuggaccucaagaacuacaucgacaagcagcugcugcccauccucaacaagcagagcugcuccaucagcaacaucgagacggucaucgaguuccagcagaagaacaaccggcugcuggagaucacccgcgaguucuccgugaacgccggggugaccacccccgucagcacguacaugcucaccaacagcgagcugcugucccucaucaacgacaugcccaucaccaacgaccagaagaagcugaugagcaacaacgugcagaucgugcggcagcaguccuacagcaucaugugcaucaucaaggaggagguccuggccuacguggugcagcucccgcuguacggcgucaucgacacccccugcuggaagcugcacacgagcccccucugcaccaccaacaccaaggagggguccaacaucugccugacgcgcaccgaccggggcugguacugcgacaacgcgggguccgugagcuucuucccccaggccgagaccugcaaggugcaguccaaccgcgucuucugcgacaccaugaacagccggacgcucccguccgaggugaaccugugcaacaucgacaucuucaaccccaaguacgacugcaagaucaugaccagcaagaccgacgucuccagcuccgugaucaccagccugggcgccaucguguccugcuacggcaagacgaagugcaccgccagcaacaagaaccgggggaucaucaagaccuucuccaacggcugcgacuacgucagcaacaaggggguggacaccgugagcgucggcaacacgcucuacugcgugaacaagcaggagggcaagucccuguacgugaagggggagcccaucaucaacuucuacgacccccuggucuucccgagcgacgaguucgacgccuccaucagccaggugaacgagaagaucaaccagucccucgcguucauccgcaagagcgacgagcugcugcacaacgugaacgucggcaaguccaccaccaacaucaugaucaccaccaucaucaucgugaucaucgugauccuccugcugcucaucgccgucgggcuguuccuguacugcaaggcccggagcacgcccgugacccuguccaaggaccagcucagcggcaucaacaacaucgccuucuccaacugaggacuaguacuggcugcaucucccuuuccucuguccuccauccuucucccaggauggugaagggggaccugguacccagugauccccaccccaggauccuaaaucaugacuuaccugcuaauaaaaacucauuggaaaagugagaagaucuaaaaaaaaaaaaaaaaaaaaaaaaaaaaaaaaaaaaaaaaaaaaaaaaaaaaaaaaaaaaaaaaugcaucccccccccccccccccccccccccccccccaaaggcucuuuucagagccaccagaauu

SEQ ID NO: 16405 - RNA, 1956 nt, Artificial Sequence
  mRNA product Design f-5 comprising derived and/or modified sequence from HRSV(Memphis-37)__AIY60640.1__F_DSCav1_mut4 (opt2)
gggagacuuucccauucuguagcagaauuugguguugccuguggucuuggucccgcggagaagcuuaccauggagcuccccauccucaagaccaacgccaucaccaccauccucgccgccgucacccucugcuucgccuccucccagaacaucaccgaggaguucuaccaguccaccugcuccgccgucuccaagggcuaccucuccgcccuccgcaccggcugguacaccuccgucaucaccaucgagcucuccaacaucaaggagaacaagugcaacggcaccgacgccaaggucaagcucaucaagcaggagcucgacaaguacaagaacgccgucaccgagcuccagcuccucaugcaguccacccccgccgccggcuccggcuccgccaucugcuccggcaucgccgucugcaagguccuccaccucgagggcgaggucaacaagaucaagaacgcccuccucuccaccaacaaggccgucgucucccucuccaacggcgucuccguccucaccuucaagguccucgaccucaagaacuacaucgacaagcagcuccuccccauccucaacaagcaguccugcuccaucuccaacaucgagaccgucaucgaguuccagcagaagaacaaccgccuccucgagaucacccgcgaguucuccgucaacgccggcgucaccacccccgucuccaccuacaugcucaccaacuccgagcuccucucccucaucaacgacaugcccaucaccaacgaccagaagaagcucauguccaacaacguccagaucguccgccagcaguccuacuccaucaugugcaucaucaaggaggagguccucgccuacgucguccagcucccccucuacggcgucaucgacacccccugcuggaagcuccacaccuccccccucugcaccaccaacaccaaggagggcuccaacaucugccucacccgcaccgaccgcggcugguacugcgacaacgccggcuccgucuccuucuucccccaggccgagaccugcaagguccaguccaaccgcgucuucugcgacaccaugaacucccgcacccuccccuccgaggucaaccucugcaacaucgacaucuucaaccccaaguacgacugcaagaucaugaccuccaagaccgacgucuccuccuccgucaucaccucccucggcgccaucgucuccugcuacggcaagaccaagugcaccgccuccaacaagaaccgcggcaucaucaagaccuucuccaacggcugcgacuacgucuccaacaagggcgucgacaccgucuccgucggcaacacccucuacugcgucaacaagcaggagggcaagucccucuacgucaagggcgagcccaucaucaacuucuacgacccccucgucuuccccuccgacgaguucgacgccuccaucucccaggucaacgagaagaucaaccagucccucgccuucauccgcaaguccgacgagcuccuccacaacgucaacgucggcaaguccaccaccaacaucaugaucaccaccaucaucaucgucaucaucgucauccuccuccuccucaucgccgucggccucuuccucuacugcaaggcccgcuccacccccgucacccucuccaaggaccagcucuccggcaucaacaacaucgccuucuccaacugaggacuaguacuggcugcaucucccuuuccucuguccuccauccuucucccaggauggugaagggggaccugguacccagugauccccaccccaggauccuaaaucaugacuuaccugcuaauaaaaacucauuggaaaagugagaagaucuaaaaaaaaaaaaaaaaaaaaaaaaaaaaaaaaaaaaaaaaaaaaaaaaaaaaaaaaaaaaaaaaugcaucccccccccccccccccccccccccccccccaaaggcucuuuucagagccaccagaauu

SEQ ID NO: 16406 - RNA, 1956 nt, Artificial Sequence
  mRNA product Design f-5 comprising derived and/or modified sequence from HRSV(Memphis-37)__AIY60640.1__F_DSCav1_mut4 (opt3)
gggagacuuucccauucuguagcagaauuugguguugccuguggucuuggucccgcggagaagcuuaccauggagcugcccauccucaagaccaacgccauuacaacuauacuugcugcagugacgcugugcuucgccagcucccagaauaucaccgaagaguuuuaccaaucuacauguucagcggucaguaaaggcuauuugagcgcuuuaagaacugggugguacaccuccguuauuacaaucgaacugucuaacauuaaggagaauaaaugcaacggaaccgacgccaaggugaaacuaaucaagcaggaacucgauaaguauaaaaaugcaguaacugagcugcagcuucugaugcagucgaccccugccgcugguucaggcagcgcaauauguagugggaucgccgugugcaaggucuugcaccucgagggagaagugaacaaaauuaagaaugcucugcuguccacaaacaaagccguugugucucucagcaauggcgucuccguguuaacguucaagguacuggaccuuaagaacuacaucgauaaacaauugcugccaauucuaaauaagcagucauguaguaucagcaacauagagacuguuauugaauuucagcagaaaaauaacaggcuccuggagaucacccgggaguucucugugaaugcgggugucacaacuccgguguccaccuauaugcuuacaaacucagaacuguugagccucauuaacgacaugcccaucaccaaugaucaaaagaaacugaugaguaacaaugugcagaucguccgccagcagucuuacuccauuaugugcauaaucaaggaggaaguuuuagcauaugugguacaacugccucucuacggggugauugacacgccauguuggaaacuucauacuagcccccugugcacaaccaacacuaaggagggaucgaauaucuguuugacacgaaccgaucguggcugguacugcgacaacgccggcucugucuccuuuuucccucaggcugaaacguguaaggugcagucaaauagaguguuuugcgauaccaugaacaguagaacacugccaagcgaggugaaucucugcaacauagacauuuucaaucccaaauaugauuguaagaucaugacuuccaaaaccgacgucucuagcucagugaucacaagucugggggccauuguauccugcuacggaaagacuaaauguaccgcaagcaacaagaauagggguaucauuaagacauuuucuaacggcugcgauuauguuucaaauaaagggguggacaccgucagugugggaaacacucuuuacugugucaacaagcaagagggcaaaagccuguaugugaagggugaaccuauaaucaauuucuacgacccauugguuuuuccguccgaugaguucgacgcuucuauuucgcagguuaacgagaaaaucaaucagagccucgccuuuauccggaaguccgaugaacuguuacacaacguaaaugucgggaagucaacgacaaacauuaugauaaccacuaucauuaucgugauuaucguuauacugcuacuccugaucgcggugggacuuuucuuguauugcaaagcccgcaguacccccgucacacugucuaaggaccagcucagcggcauuaauaacaucgcauucuccaauugaggacuaguacuggcugcaucucccuuuccucuguccuccauccuucucccaggauggugaagggggaccugguacccagugauccccaccccaggauccuaaaucaugacuuaccugcuaauaaaaacucauuggaaaagugagaagaucuaaaaaaaaaaaaaaaaaaaaaaaaaaaaaaaaaaaaaaaaaaaaaaaaaaaaaaaaaaaaaaaaugcaucccccccccccccccccccccccccccccccaaaggcucuuuucagagccaccagaauu

SEQ ID NO: 16407 - RNA, 1956 nt, Artificial Sequence
  mRNA product Design f-5 comprising derived and/or modified sequence from HRSV(Memphis-37)__AIY60640.1__F_DSCav1_mut4 (opt4)
gggagacuuucccauucuguagcagaauuugguguugccuguggucuuggucccgcggagaagcuuaccauggagcugcccauccugaagaccaacgccaucaccaccauccuggccgccgugacccugugcuucgccagcagccagaacaucaccgaggaguucuaccagagcaccugcagcgccgugagcaagggcuaccugagcgcccugagaaccggcugguacaccagcgugaucaccaucgagcugagcaacaucaaggagaacaagugcaacggcaccgacgccaaggugaagcugaucaagcaggagcuggacaaguacaagaacgccgugaccgagcugcagcugcugaugcagagcacccccgccgccggcagcggcagcgccaucugcagcggcaucgccgugugcaaggugcugcaccuggagggcgaggugaacaagaucaagaacgcccugcugagcaccaacaaggccguggugagccugagcaacggcgugagcgugcugaccuucaaggugcuggaccugaagaacuacaucgacaagcagcugcugcccauccugaacaagcagagcugcagcaucagcaacaucgagaccgugaucgaguuccagcagaagaacaacagacugcuggagaucaccagagaguucagcgugaacgccggcgugaccacccccgugagcaccuacaugcugaccaacagcgagcugcugagccugaucaacgacaugcccaucaccaacgaccagaagaagcugaugagcaacaacgugcagaucgugagacagcagagcuacagcaucaugugcaucaucaaggaggaggugcuggccuacguggugcagcugccccuguacggcgugaucgacacccccugcuggaagcugcacaccagcccccugugcaccaccaacaccaaggagggcagcaacaucugccugaccagaaccgacagaggcugguacugcgacaacgccggcagcgugagcuucuucccccaggccgagaccugcaaggugcagagcaacagaguguucugcgacaccaugaacagcagaacccugcccagcgaggugaaccugugcaacaucgacaucuucaaccccaaguacgacugcaagaucaugaccagcaagaccgacgugagcagcagcgugaucaccagccugggcgccaucgugagcugcuacggcaagaccaagugcaccgccagcaacaagaacagaggcaucaucaagaccuucagcaacggcugcgacuacgugagcaacaagggcguggacaccgugagcgugggcaacacccuguacugcgugaacaagcaggagggcaagagccuguacgugaagggcgagcccaucaucaacuucuacgacccccugguguuccccagcgacgaguucgacgccagcaucagccaggugaacgagaagaucaaccagagccuggccuucaucagaaagagcgacgagcugcugcacaacgugaacgugggcaagagcaccaccaacaucaugaucaccaccaucaucaucgugaucaucgugauccugcugcugcugaucgccgugggccuguuccuguacugcaaggccagaagcacccccgugacccugagcaaggaccagcugagcggcaucaacaacaucgccuucagcaacugaggacuaguacuggcugcaucucccuuuccucuguccuccauccuucucccaggauggugaagggggaccugguacccagugauccccaccccaggauccuaaaucaugacuuaccugcuaauaaaaacucauuggaaaagugagaagaucuaaaaaaaaaaaaaaaaaaaaaaaaaaaaaaaaaaaaaaaaaaaaaaaaaaaaaaaaaaaaaaaaugcaucccccccccccccccccccccccccccccccaaaggcucuuuucagagccaccagaauu

SEQ ID NO: 16408 - RNA, 1956 nt, Artificial Sequence
  mRNA product Design f-5 comprising derived and/or modified sequence from HRSV(Memphis-37)__AIY60640.1__F_DSCav1_mut4 (opt5)
gggagacuuucccauucuguagcagaauuugguguugccuguggucuuggucccgcggagaagcuuaccauggagcugcccauccucaagaccaacgccauuacaacgauccuggcugccgugacccuuugcuucgcgagcucccagaauauuacagaagaguuuuaccaaucuaccuguagcgcugucuccaaaggcuaucugucugcccucagaacagggugguacaccagcguuaucacaauugaacuguccaacaucaaggagaauaaaugcaacggaaccgacgccaaggugaaacuuaucaagcaggaacuggauaaguauaaaaaugcugugacggagcuccagcugcugaugcagucuaccccugccgcuggcagcggguccgccauuuguagcggaaucgcggucugcaaggugcuccaccuggagggcgaaguuaacaaaauuaagaaugcccuucugucuacaaacaaagcuguggucucccucagcaauggggugucuguucugaccuucaaggugcuugaccugaagaacuacaucgauaaacaacuccugccgauucugaauaagcaguccuguagcaucucuaacauugagacagucaucgaauuucagcagaaaaauaaccggcuccuggagaucacccgcgaguucuccgugaaugccggagugacgacacccgucagcaccuauaugcuuacaaacuccgaacugcucucucugauuaacgacaugccuaucaccaaugaucaaaagaaacuuaugagcaacaauguucagauugugagacagcaguccuacagcaucaugugcauuaucaaggaggaagugcuggcuuaugucgugcaacucccccuguacggcguuaucgacaccccuuguuggaaacugcauacaucuccccucugcacgaccaacacaaaggagggcuccaauauuugucugacccggacagaucgcgggugguacugcgacaacgccggaagcgugagcuuuuucccucaggcggaaaccuguaagguccagucuaauagaguguuuugcgauacgaugaacuccagaacacugccgucugagguuaaucucugcaacaucgacauuuucaaucccaaauaugauuguaagaucaugaccagcaaaaccgacguguccagcucugucauuacaucccugggcgccaucgugagcugcuacgggaagaccaaauguacagcuucuaacaagaaucggggaaucauuaagacguuuuccaacggcugcgauuaugucagcaauaaagggguggacaccguuuccgugggaaacacacuuuacugugucaacaagcaagagggcaaaucucuguaugugaagggcgaaccuaucauuaauuucuacgacccccucguuuuuccuagcgaugaguucgacgccuccaucucucaggugaacgaaaagauuaaucagagccuggcuuuuauccgcaaguccgaugagcugcuccacaacgucaauguggggaaaagcaccacaaacauuaugaucaccacgaucauuaucgugauuaucguuauucugcuucugcucaucgccgucggacuguuccuguauugcaaagccagaucuacccccgugacacuuuccaaggaccagcucagcggcaucaauaacauugcuuucucuaauugaggacuaguacuggcugcaucucccuuuccucuguccuccauccuucucccaggauggugaagggggaccugguacccagugauccccaccccaggauccuaaaucaugacuuaccugcuaauaaaaacucauuggaaaagugagaagaucuaaaaaaaaaaaaaaaaaaaaaaaaaaaaaaaaaaaaaaaaaaaaaaaaaaaaaaaaaaaaaaaaugcaucccccccccccccccccccccccccccccccaaaggcucuuuucagagccaccagaauu

SEQ ID NO: 16409 - RNA, 1956 nt, Artificial Sequence
  mRNA product Design f-5 comprising derived and/or modified sequence from HRSV(Memphis-37)__AIY60640.1__F_DSCav1_mut4 (opt6)
gggagacuuucccauucuguagcagaauuugguguugccuguggucuuggucccgcggagaagcuuaccauggaacucccaauccuaaaaacaaacgcaauaacaacaauauuagcagccguaacacucuguuucgccucaucccaaaacauaacagaagaauuuuaucaaucuacauguuccgccgucaguaaaggauaucuaucagccuuaagaacaggcugguacacaucaguaaucaccauagaauuauccaacauaaaagaaaacaaaugcaauggcacagaugccaaaguaaaacuaaucaaacaagaacuugauaaauauaaaaacgcaguaacagaauuacaauuauuaaugcaaagcacaccagccgcaggaucaggaucagcaauauguucaggaauagcagucuguaaaguacuacacuuagaaggagaaguaaacaaaauuaaaaacgcauuacuaagcaccaauaaagcaguaguaucacuaucaaacggcguauccguauuaacguucaaaguccucgaccugaaaaacuacauagauaaacaacuacuaccaauacuaaauaaacaaucaugcucaauaucaaacauagaaacuguuaucgaauuucaacagaaaaauaaccgacuacuagaaaucaccagagaauuuucaguaaacgcaggcgucacuacaccaguauccacauacaugcuaaccaacucggaauuacuuucccucauaaacgacaugccaauaacaaacgaccaaaagaaacuuaugucaaacaacguucaaauaguccgccaacaaucauacucaauaauguguaucauaaaagaagaaguccuagcauaugucguacaacuaccauuauacggaguaauugacacaccuugcuggaaacuacacacauccccacuauguacaacaaacacuaaagaaggaucaaacaucugccuaaccagaacagacagaggcugguauugcgacaacgcaggaucaguaucauucuucccacaagcagaaacaugcaaaguacaaucaaacagagucuucugcgacaccaugaacagcagaacccucccauccgaaguaaacuuaugcaacaucgauaucuucaacccaaaauacgacuguaaaauaaugacaucaaaaacagacguuucauccucaguaauaacaucauuaggugccauaguuucauguuacggaaaaaccaaauguaccgcaucaaacaaaaacagaggcauuauuaaaacauucucuaacggaugcgacuaugucaguaacaaaggaguagacacaguaucagucggaaacacauuauauugcguaaauaaacaagaaggaaaaagucuauacguaaaaggagaaccaauaauaaacuuuuacgacccucucguauucccaucagacgaauuugaugcauccauaucacaagucaacgaaaagauaaaccaaucccuagcauucauaagaaaaucagacgaacuacuccauaacguaaacguaggaaaaagcacaaccaauauaaugauaaccacaauaaucauaguaauaauagucauauuauuacuuuuaauugcaguaggacucuuucuauacugcaaagcaagaagcacaccaguaacacuaagcaaagaccaacuaucaggcaucaacaauaucgccuuuucaaauuaaggacuaguacuggcugcaucucccuuuccucuguccuccauccuucucccaggauggugaagggggaccugguacccagugauccccaccccaggauccuaaaucaugacuuaccugcuaauaaaaacucauuggaaaagugagaagaucuaaaaaaaaaaaaaaaaaaaaaaaaaaaaaaaaaaaaaaaaaaaaaaaaaaaaaaaaaaaaaaaaugcaucccccccccccccccccccccccccccccccaaaggcucuuuucagagccaccagaauu

SEQ ID NO: 16410 - RNA, 1956 nt, Artificial Sequence
  mRNA product Design f-5 comprising derived and/or modified sequence from HRSV(Memphis-37)__AIY60640.1__F_DSCav1_mut4 (opt11)
gggagacuuucccauucuguagcagaauuugguguugccuguggucuuggucccgcggagaagcuuaccauggagcugcccauccucaagaccaacgccaucaccacgauccuggccgcggugacccugugcuucgcgagcucccagaacaucaccgaggaguucuaccagagcacgugcuccgccgucagcaagggcuaccucuccgcccugcgcaccgggugguacaccagcgugaucaccaucgagcuguccaacaucaaggagaacaagugcaacggcaccgacgccaaggugaaacucaucaagcaggagcuggacaaguacaagaacgccgucaccgagcugcagcuccugaugcagagcaccccggccgccggguccggcagcgcuaucugcuccgggaucgcggugugcaaggugcugcaccucgagggcgaggucaacaagaucaagaaugcccugcugagcaccaacaaggccguggugucccucagcaacggagucagcgugcuuaccuucaaggugcuggaccucaagaacuacaucgacaagcagcugcugccuauccucaacaagcagagcugcuccaucagcaacaucgagacggucaucgaguuccagcagaagaacaaccggcugcuggagaucacccgcgaguucuccgugaacgccggggugaccacccccgucagcacguacaugcucaccaacagcgaacugcugucccucaucaacgacaugcccaucaccaacgaccagaagaagcugaugagcaacaacgugcagaucgugcggcagcaguccuacagcaucaugugcaucaucaaggaggaaguccuggccuacguggugcagcucccucuguacggcgucaucgacacccccugcuggaagcugcacacgagcccccucugcaccaccaacaccaaggagggguccaacaucugccugacgcgcaccgaccggggcugguacugcgacaacgcgggguccgugagcuucuucccccaggccgagaccugcaaggugcagagcaaccgcgucuucugcgacacuaugaacagcagaacgcucccguccgaggugaaccugugcaacauagacauauucaaccccaaguacgacugcaagaucaugaccagcaagaccgacgucuccagcuccgugauuaccagccugggcgcaaucguguccugcuacggcaagacgaagugcaccgccagcaacaagaaccgggggaucaucaagaccuucuccaacggcugcgacuaugucagcaacaaggggguggacaccgugagcgucggaaacacgcucuacugcgugaacaagcaagagggcaaguccuuauacgugaagggggagcccaucaucaacuucuacgacccccuggucuucccgagcgacgaguucgacgccagcauaagccaggugaacgagaagaucaaccagucccucgcguucauccgcaagagcgacgagcugcugcacaacgugaacgucggcaaguccaccaccaacaucaugaucaccaccaucaucaucgugaucaucgugauccuccugcugcucaucgccgucgggcuguuccuguacugcaaggcccggagcacgcccgugaccuuguccaaggaccagcucagcggcaucaacaacaucgccuucuccaacugaggacuaguacuggcugcaucucccuuuccucuguccuccauccuucucccaggauggugaagggggaccugguacccagugauccccaccccaggauccuaaaucaugacuuaccugcuaauaaaaacucauuggaaaagugagaagaucuaaaaaaaaaaaaaaaaaaaaaaaaaaaaaaaaaaaaaaaaaaaaaaaaaaaaaaaaaaaaaaaaugcaucccccccccccccccccccccccccccccccaaaggcucuuuucagagccaccagaauu

SEQ ID NO: 16411 - RNA, 1952 nt, Artificial Sequence
  mRNA product Design g-1 comprising derived and/or modified sequence from HRSV(Memphis-37)__AIY60640.1__F_DSCav1_mut4 (opt1)
gggagacuuucccauucuguagcagaauuugguguugccuguggucuuggucccgcggagaagcuuaccauggagcugcccauccucaagaccaacgccaucaccacgauccuggccgcggugacccugugcuucgccagcucccagaacaucaccgaggaguucuaccagagcacgugcuccgccgucagcaagggcuaccucuccgcccugcgcaccgggugguacaccagcgugaucaccaucgagcuguccaacaucaaggagaacaagugcaacggcaccgacgccaaggugaagcucaucaagcaggagcuggacaaguacaagaacgcggucacggagcugcagcuccugaugcagagcaccccggccgccggcuccgggagcgcgaucugcuccggcaucgccgucugcaaggugcugcaccucgagggcgaggugaacaagaucaagaacgcccugcuguccaccaacaaggccgucgugagccucuccaacggggugagcguccugaccuucaaggugcuggaccucaagaacuacaucgacaagcagcugcugcccauccugaacaagcagagcugcuccaucagcaacaucgagaccgucaucgaguuccagcagaagaacaaccgccuccuggagaucacgcgggaguucagcgugaacgcgggcgugaccacccccgucuccaccuacaugcugacgaacagcgagcuccugucccugaucaacgacaugccgaucaccaacgaccagaagaagcucaugagcaacaacgugcagaucgugcgccagcaguccuacagcaucaugugcaucaucaaggaggagguccuggccuacguggugcagcugccccucuacggggucaucgacacccccugcuggaagcugcacaccagcccccugugcacgaccaacaccaaggagggcuccaacaucugccucacccggacggaccgcgggugguacugcgacaacgccggcagcguguccuucuucccgcaggccgagaccugcaagguccagagcaaccggguguucugcgacaccaugaacucccggacccugcccagcgaggugaaccucugcaacaucgacaucuucaaccccaaguacgacugcaagaucaugacguccaagaccgacgucagcuccagcgugaucaccucccugggcgccaucgugagcugcuacgggaagaccaagugcacggcgagcaacaagaaccgcggcaucaucaagaccuucuccaacgggugcgacuacgucagcaacaagggcguggacaccguguccgucggcaacacccuguacugcgugaacaagcaggagggcaagagccucuacgugaagggggagcccaucaucaacuucuacgacccgcuggucuuccccuccgacgaguucgacgccagcaucucccaggugaacgagaagaucaaccagagccuggccuucauccggaaguccgacgagcuccugcacaacgugaacgucggcaagagcaccacgaacaucaugaucaccaccaucaucaucgugaucaucgugauccugcugcuccugaucgccgucgggcuguuccucuacugcaaggcccgcuccacccccgugacgcugagcaaggaccagcuguccgggaucaacaacaucgcguucagcaacugaggacuaguggaagcauuuuccuggcugauuaaaagaaauuacucagcuauggucaucuguuccuguuagaaggcuaugcagcauauuauauacuaugcgcauguuaugaaaugcauaauaaaaaauuuuaaaaaaucuaaaagaucuaaaaaaaaaaaaaaaaaaaaaaaaaaaaaaaaaaaaaaaaaaaaaaaaaaaaaaaaaaaaaaaaugcaucccccccccccccccccccccccccccccccaaaggcucuuuucagagccaccagaauu

SEQ ID NO: 16412 - RNA, 1952 nt, Artificial Sequence
  mRNA product Design g-1 comprising derived and/or modified sequence from HRSV(Memphis-37)__AIY60640.1__F_DSCav1_mut4 (opt1)
gggagacuuucccauucuguagcagaauuugguguugccuguggucuuggucccgcggagaagcuuaccauggagcugcccauccucaagaccaacgccaucaccacgauccuggccgcggugacccugugcuucgccagcucccagaacaucaccgaggaguucuaccagagcacgugcuccgccgucagcaagggcuaccucuccgcccugcgcaccgggugguacaccagcgugaucaccaucgagcuguccaacaucaaggagaacaagugcaacggcaccgacgccaaggugaagcucaucaagcaggagcuggacaaguacaagaacgcggucacggagcugcagcuccugaugcagagcaccccggccgccggguccggcagcgccaucugcuccgggaucgcggugugcaaggugcugcaccucgagggcgaggucaacaagaucaagaacgcccugcugagcaccaacaaggccguggugucccucagcaacggcgucuccgugcugaccuucaaggugcuggaccucaagaacuacaucgacaagcagcugcugcccauccucaacaagcagagcugcuccaucagcaacaucgagacggucaucgaguuccagcagaagaacaaccggcugcuggagaucacccgcgaguucuccgugaacgccggggugaccacccccgucagcacguacaugcucaccaacagcgagcugcugucccucaucaacgacaugcccaucaccaacgaccagaagaagcugaugagcaacaacgugcagaucgugcggcagcaguccuacagcaucaugugcaucaucaaggaggagguccuggccuacguggugcagcucccgcuguacggcgucaucgacacccccugcuggaagcugcacacgagcccccucugcaccaccaacaccaaggagggguccaacaucugccugacgcgcaccgaccggggcugguacugcgacaacgcgggguccgugagcuucuucccccaggccgagaccugcaaggugcaguccaaccgcgucuucugcgacaccaugaacagccggacgcucccguccgaggugaaccugugcaacaucgacaucuucaaccccaaguacgacugcaagaucaugaccagcaagaccgacgucuccagcuccgugaucaccagccugggcgccaucguguccugcuacggcaagacgaagugcaccgccagcaacaagaaccgggggaucaucaagaccuucuccaacggcugcgacuacgucagcaacaaggggguggacaccgugagcgucggcaacacgcucuacugcgugaacaagcaggagggcaagucccuguacgugaagggggagcccaucaucaacuucuacgacccccuggucuucccgagcgacgaguucgacgccuccaucagccaggugaacgagaagaucaaccagucccucgcguucauccgcaagagcgacgagcugcugcacaacgugaacgucggcaaguccaccaccaacaucaugaucaccaccaucaucaucgugaucaucgugauccuccugcugcucaucgccgucgggcuguuccuguacugcaaggcccggagcacgcccgugacccuguccaaggaccagcucagcggcaucaacaacaucgccuucuccaacugaggacuaguggaagcauuuuccuggcugauuaaaagaaauuacucagcuauggucaucuguuccuguuagaaggcuaugcagcauauuauauacuaugcgcauguuaugaaaugcauaauaaaaaauuuuaaaaaaucuaaaagaucuaaaaaaaaaaaaaaaaaaaaaaaaaaaaaaaaaaaaaaaaaaaaaaaaaaaaaaaaaaaaaaaaugcaucccccccccccccccccccccccccccccccaaaggcucuuuucagagccaccagaauu

SEQ ID NO: 16413 - RNA, 1952 nt, Artificial Sequence
  mRNA product Design g-1 comprising derived and/or modified sequence from HRSV(Memphis-37)__AIY60640.1__F_DSCav1_mut4 (opt2)
gggagacuuucccauucuguagcagaauuugguguugccuguggucuuggucccgcggagaagcuuaccauggagcuccccauccucaagaccaacgccaucaccaccauccucgccgccgucacccucugcuucgccuccucccagaacaucaccgaggaguucuaccaguccaccugcuccgccgucuccaagggcuaccucuccgcccuccgcaccggcugguacaccuccgucaucaccaucgagcucuccaacaucaaggagaacaagugcaacggcaccgacgccaaggucaagcucaucaagcaggagcucgacaaguacaagaacgccgucaccgagcuccagcuccucaugcaguccacccccgccgccggcuccggcuccgccaucugcuccggcaucgccgucugcaagguccuccaccucgagggcgaggucaacaagaucaagaacgcccuccucuccaccaacaaggccgucgucucccucuccaacggcgucuccguccucaccuucaagguccucgaccucaagaacuacaucgacaagcagcuccuccccauccucaacaagcaguccugcuccaucuccaacaucgagaccgucaucgaguuccagcagaagaacaaccgccuccucgagaucacccgcgaguucuccgucaacgccggcgucaccacccccgucuccaccuacaugcucaccaacuccgagcuccucucccucaucaacgacaugcccaucaccaacgaccagaagaagcucauguccaacaacguccagaucguccgccagcaguccuacuccaucaugugcaucaucaaggaggagguccucgccuacgucguccagcucccccucuacggcgucaucgacacccccugcuggaagcuccacaccuccccccucugcaccaccaacaccaaggagggcuccaacaucugccucacccgcaccgaccgcggcugguacugcgacaacgccggcuccgucuccuucuucccccaggccgagaccugcaagguccaguccaaccgcgucuucugcgacaccaugaacucccgcacccuccccuccgaggucaaccucugcaacaucgacaucuucaaccccaaguacgacugcaagaucaugaccuccaagaccgacgucuccuccuccgucaucaccucccucggcgccaucgucuccugcuacggcaagaccaagugcaccgccuccaacaagaaccgcggcaucaucaagaccuucuccaacggcugcgacuacgucuccaacaagggcgucgacaccgucuccgucggcaacacccucuacugcgucaacaagcaggagggcaagucccucuacgucaagggcgagcccaucaucaacuucuacgacccccucgucuuccccuccgacgaguucgacgccuccaucucccaggucaacgagaagaucaaccagucccucgccuucauccgcaaguccgacgagcuccuccacaacgucaacgucggcaaguccaccaccaacaucaugaucaccaccaucaucaucgucaucaucgucauccuccuccuccucaucgccgucggccucuuccucuacugcaaggcccgcuccacccccgucacccucuccaaggaccagcucuccggcaucaacaacaucgccuucuccaacugaggacuaguggaagcauuuuccuggcugauuaaaagaaauuacucagcuauggucaucuguuccuguuagaaggcuaugcagcauauuauauacuaugcgcauguuaugaaaugcauaauaaaaaauuuuaaaaaaucuaaaagaucuaaaaaaaaaaaaaaaaaaaaaaaaaaaaaaaaaaaaaaaaaaaaaaaaaaaaaaaaaaaaaaaaugcaucccccccccccccccccccccccccccccccaaaggcucuuuucagagccaccagaauu

SEQ ID NO: 16414 - RNA, 1952 nt, Artificial Sequence
  mRNA product Design g-1 comprising derived and/or modified sequence from HRSV(Memphis-37)__AIY60640.1__F_DSCav1_mut4 (opt3)
gggagacuuucccauucuguagcagaauuugguguugccuguggucuuggucccgcggagaagcuuaccauggagcugcccauccucaagaccaacgccauuacaacuauacuugcugcagugacgcugugcuucgccagcucccagaauaucaccgaagaguuuuaccaaucuacauguucagcggucaguaaaggcuauuugagcgcuuuaagaacugggugguacaccuccguuauuacaaucgaacugucuaacauuaaggagaauaaaugcaacggaaccgacgccaaggugaaacuaaucaagcaggaacucgauaaguauaaaaaugcaguaacugagcugcagcuucugaugcagucgaccccugccgcugguucaggcagcgcaauauguagugggaucgccgugugcaaggucuugcaccucgagggagaagugaacaaaauuaagaaugcucugcuguccacaaacaaagccguugugucucucagcaauggcgucuccguguuaacguucaagguacuggaccuuaagaacuacaucgauaaacaauugcugccaauucuaaauaagcagucauguaguaucagcaacauagagacuguuauugaauuucagcagaaaaauaacaggcuccuggagaucacccgggaguucucugugaaugcgggugucacaacuccgguguccaccuauaugcuuacaaacucagaacuguugagccucauuaacgacaugcccaucaccaaugaucaaaagaaacugaugaguaacaaugugcagaucguccgccagcagucuuacuccauuaugugcauaaucaaggaggaaguuuuagcauaugugguacaacugccucucuacggggugauugacacgccauguuggaaacuucauacuagcccccugugcacaaccaacacuaaggagggaucgaauaucuguuugacacgaaccgaucguggcugguacugcgacaacgccggcucugucuccuuuuucccucaggcugaaacguguaaggugcagucaaauagaguguuuugcgauaccaugaacaguagaacacugccaagcgaggugaaucucugcaacauagacauuuucaaucccaaauaugauuguaagaucaugacuuccaaaaccgacgucucuagcucagugaucacaagucugggggccauuguauccugcuacggaaagacuaaauguaccgcaagcaacaagaauagggguaucauuaagacauuuucuaacggcugcgauuauguuucaaauaaagggguggacaccgucagugugggaaacacucuuuacugugucaacaagcaagagggcaaaagccuguaugugaagggugaaccuauaaucaauuucuacgacccauugguuuuuccguccgaugaguucgacgcuucuauuucgcagguuaacgagaaaaucaaucagagccucgccuuuauccggaaguccgaugaacuguuacacaacguaaaugucgggaagucaacgacaaacauuaugauaaccacuaucauuaucgugauuaucguuauacugcuacuccugaucgcggugggacuuuucuuguauugcaaagcccgcaguacccccgucacacugucuaaggaccagcucagcggcauuaauaacaucgcauucuccaauugaggacuaguggaagcauuuuccuggcugauuaaaagaaauuacucagcuauggucaucuguuccuguuagaaggcuaugcagcauauuauauacuaugcgcauguuaugaaaugcauaauaaaaaauuuuaaaaaaucuaaaagaucuaaaaaaaaaaaaaaaaaaaaaaaaaaaaaaaaaaaaaaaaaaaaaaaaaaaaaaaaaaaaaaaaugcaucccccccccccccccccccccccccccccccaaaggcucuuuucagagccaccagaauu

SEQ ID NO: 16415 - RNA, 1952 nt, Artificial Sequence
  mRNA product Design g-1 comprising derived and/or modified sequence from HRSV(Memphis-37)__AIY60640.1__F_DSCav1_mut4 (opt4)
gggagacuuucccauucuguagcagaauuugguguugccuguggucuuggucccgcggagaagcuuaccauggagcugcccauccugaagaccaacgccaucaccaccauccuggccgccgugacccugugcuucgccagcagccagaacaucaccgaggaguucuaccagagcaccugcagcgccgugagcaagggcuaccugagcgcccugagaaccggcugguacaccagcgugaucaccaucgagcugagcaacaucaaggagaacaagugcaacggcaccgacgccaaggugaagcugaucaagcaggagcuggacaaguacaagaacgccgugaccgagcugcagcugcugaugcagagcacccccgccgccggcagcggcagcgccaucugcagcggcaucgccgugugcaaggugcugcaccuggagggcgaggugaacaagaucaagaacgcccugcugagcaccaacaaggccguggugagccugagcaacggcgugagcgugcugaccuucaaggugcuggaccugaagaacuacaucgacaagcagcugcugcccauccugaacaagcagagcugcagcaucagcaacaucgagaccgugaucgaguuccagcagaagaacaacagacugcuggagaucaccagagaguucagcgugaacgccggcgugaccacccccgugagcaccuacaugcugaccaacagcgagcugcugagccugaucaacgacaugcccaucaccaacgaccagaagaagcugaugagcaacaacgugcagaucgugagacagcagagcuacagcaucaugugcaucaucaaggaggaggugcuggccuacguggugcagcugccccuguacggcgugaucgacacccccugcuggaagcugcacaccagcccccugugcaccaccaacaccaaggagggcagcaacaucugccugaccagaaccgacagaggcugguacugcgacaacgccggcagcgugagcuucuucccccaggccgagaccugcaaggugcagagcaacagaguguucugcgacaccaugaacagcagaacccugcccagcgaggugaaccugugcaacaucgacaucuucaaccccaaguacgacugcaagaucaugaccagcaagaccgacgugagcagcagcgugaucaccagccugggcgccaucgugagcugcuacggcaagaccaagugcaccgccagcaacaagaacagaggcaucaucaagaccuucagcaacggcugcgacuacgugagcaacaagggcguggacaccgugagcgugggcaacacccuguacugcgugaacaagcaggagggcaagagccuguacgugaagggcgagcccaucaucaacuucuacgacccccugguguuccccagcgacgaguucgacgccagcaucagccaggugaacgagaagaucaaccagagccuggccuucaucagaaagagcgacgagcugcugcacaacgugaacgugggcaagagcaccaccaacaucaugaucaccaccaucaucaucgugaucaucgugauccugcugcugcugaucgccgugggccuguuccuguacugcaaggccagaagcacccccgugacccugagcaaggaccagcugagcggcaucaacaacaucgccuucagcaacugaggacuaguggaagcauuuuccuggcugauuaaaagaaauuacucagcuauggucaucuguuccuguuagaaggcuaugcagcauauuauauacuaugcgcauguuaugaaaugcauaauaaaaaauuuuaaaaaaucuaaaagaucuaaaaaaaaaaaaaaaaaaaaaaaaaaaaaaaaaaaaaaaaaaaaaaaaaaaaaaaaaaaaaaaaugcaucccccccccccccccccccccccccccccccaaaggcucuuuucagagccaccagaauu

SEQ ID NO: 16416 - RNA, 1952 nt, Artificial Sequence
  mRNA product Design g-1 comprising derived and/or modified sequence from HRSV(Memphis-37)__AIY60640.1__F_DSCav1_mut4 (opt5)
gggagacuuucccauucuguagcagaauuugguguugccuguggucuuggucccgcggagaagcuuaccauggagcugcccauccucaagaccaacgccauuacaacgauccuggcugccgugacccuuugcuucgcgagcucccagaauauuacagaagaguuuuaccaaucuaccuguagcgcugucuccaaaggcuaucugucugcccucagaacagggugguacaccagcguuaucacaauugaacuguccaacaucaaggagaauaaaugcaacggaaccgacgccaaggugaaacuuaucaagcaggaacuggauaaguauaaaaaugcugugacggagcuccagcugcugaugcagucuaccccugccgcuggcagcggguccgccauuuguagcggaaucgcggucugcaaggugcuccaccuggagggcgaaguuaacaaaauuaagaaugcccuucugucuacaaacaaagcuguggucucccucagcaauggggugucuguucugaccuucaaggugcuugaccugaagaacuacaucgauaaacaacuccugccgauucugaauaagcaguccuguagcaucucuaacauugagacagucaucgaauuucagcagaaaaauaaccggcuccuggagaucacccgcgaguucuccgugaaugccggagugacgacacccgucagcaccuauaugcuuacaaacuccgaacugcucucucugauuaacgacaugccuaucaccaaugaucaaaagaaacuuaugagcaacaauguucagauugugagacagcaguccuacagcaucaugugcauuaucaaggaggaagugcuggcuuaugucgugcaacucccccuguacggcguuaucgacaccccuuguuggaaacugcauacaucuccccucugcacgaccaacacaaaggagggcuccaauauuugucugacccggacagaucgcgggugguacugcgacaacgccggaagcgugagcuuuuucccucaggcggaaaccuguaagguccagucuaauagaguguuuugcgauacgaugaacuccagaacacugccgucugagguuaaucucugcaacaucgacauuuucaaucccaaauaugauuguaagaucaugaccagcaaaaccgacguguccagcucugucauuacaucccugggcgccaucgugagcugcuacgggaagaccaaauguacagcuucuaacaagaaucggggaaucauuaagacguuuuccaacggcugcgauuaugucagcaauaaagggguggacaccguuuccgugggaaacacacuuuacugugucaacaagcaagagggcaaaucucuguaugugaagggcgaaccuaucauuaauuucuacgacccccucguuuuuccuagcgaugaguucgacgccuccaucucucaggugaacgaaaagauuaaucagagccuggcuuuuauccgcaaguccgaugagcugcuccacaacgucaauguggggaaaagcaccacaaacauuaugaucaccacgaucauuaucgugauuaucguuauucugcuucugcucaucgccgucggacuguuccuguauugcaaagccagaucuacccccgugacacuuuccaaggaccagcucagcggcaucaauaacauugcuuucucuaauugaggacuaguggaagcauuuuccuggcugauuaaaagaaauuacucagcuauggucaucuguuccuguuagaaggcuaugcagcauauuauauacuaugcgcauguuaugaaaugcauaauaaaaaauuuuaaaaaaucuaaaagaucuaaaaaaaaaaaaaaaaaaaaaaaaaaaaaaaaaaaaaaaaaaaaaaaaaaaaaaaaaaaaaaaaugcaucccccccccccccccccccccccccccccccaaaggcucuuuucagagccaccagaauu

SEQ ID NO: 16417 - RNA, 1952 nt, Artificial Sequence
  mRNA product Design g-1 comprising derived and/or modified sequence from HRSV(Memphis-37)__AIY60640.1__F_DSCav1_mut4 (opt6)
gggagacuuucccauucuguagcagaauuugguguugccuguggucuuggucccgcggagaagcuuaccauggaacucccaauccuaaaaacaaacgcaauaacaacaauauuagcagccguaacacucuguuucgccucaucccaaaacauaacagaagaauuuuaucaaucuacauguuccgccgucaguaaaggauaucuaucagccuuaagaacaggcugguacacaucaguaaucaccauagaauuauccaacauaaaagaaaacaaaugcaauggcacagaugccaaaguaaaacuaaucaaacaagaacuugauaaauauaaaaacgcaguaacagaauuacaauuauuaaugcaaagcacaccagccgcaggaucaggaucagcaauauguucaggaauagcagucuguaaaguacuacacuuagaaggagaaguaaacaaaauuaaaaacgcauuacuaagcaccaauaaagcaguaguaucacuaucaaacggcguauccguauuaacguucaaaguccucgaccugaaaaacuacauagauaaacaacuacuaccaauacuaaauaaacaaucaugcucaauaucaaacauagaaacuguuaucgaauuucaacagaaaaauaaccgacuacuagaaaucaccagagaauuuucaguaaacgcaggcgucacuacaccaguauccacauacaugcuaaccaacucggaauuacuuucccucauaaacgacaugccaauaacaaacgaccaaaagaaacuuaugucaaacaacguucaaauaguccgccaacaaucauacucaauaauguguaucauaaaagaagaaguccuagcauaugucguacaacuaccauuauacggaguaauugacacaccuugcuggaaacuacacacauccccacuauguacaacaaacacuaaagaaggaucaaacaucugccuaaccagaacagacagaggcugguauugcgacaacgcaggaucaguaucauucuucccacaagcagaaacaugcaaaguacaaucaaacagagucuucugcgacaccaugaacagcagaacccucccauccgaaguaaacuuaugcaacaucgauaucuucaacccaaaauacgacuguaaaauaaugacaucaaaaacagacguuucauccucaguaauaacaucauuaggugccauaguuucauguuacggaaaaaccaaauguaccgcaucaaacaaaaacagaggcauuauuaaaacauucucuaacggaugcgacuaugucaguaacaaaggaguagacacaguaucagucggaaacacauuauauugcguaaauaaacaagaaggaaaaagucuauacguaaaaggagaaccaauaauaaacuuuuacgacccucucguauucccaucagacgaauuugaugcauccauaucacaagucaacgaaaagauaaaccaaucccuagcauucauaagaaaaucagacgaacuacuccauaacguaaacguaggaaaaagcacaaccaauauaaugauaaccacaauaaucauaguaauaauagucauauuauuacuuuuaauugcaguaggacucuuucuauacugcaaagcaagaagcacaccaguaacacuaagcaaagaccaacuaucaggcaucaacaauaucgccuuuucaaauuaaggacuaguggaagcauuuuccuggcugauuaaaagaaauuacucagcuauggucaucuguuccuguuagaaggcuaugcagcauauuauauacuaugcgcauguuaugaaaugcauaauaaaaaauuuuaaaaaaucuaaaagaucuaaaaaaaaaaaaaaaaaaaaaaaaaaaaaaaaaaaaaaaaaaaaaaaaaaaaaaaaaaaaaaaaugcaucccccccccccccccccccccccccccccccaaaggcucuuuucagagccaccagaauu

SEQ ID NO: 16418 - RNA, 1952 nt, Artificial Sequence
  mRNA product Design g-1 comprising derived and/or modified sequence from HRSV(Memphis-37)__AIY60640.1__F_DSCav1_mut4 (opt11)
gggagacuuucccauucuguagcagaauuugguguugccuguggucuuggucccgcggagaagcuuaccauggagcugcccauccucaagaccaacgccaucaccacgauccuggccgcggugacccugugcuucgcgagcucccagaacaucaccgaggaguucuaccagagcacgugcuccgccgucagcaagggcuaccucuccgcccugcgcaccgggugguacaccagcgugaucaccaucgagcuguccaacaucaaggagaacaagugcaacggcaccgacgccaaggugaaacucaucaagcaggagcuggacaaguacaagaacgccgucaccgagcugcagcuccugaugcagagcaccccggccgccggguccggcagcgcuaucugcuccgggaucgcggugugcaaggugcugcaccucgagggcgaggucaacaagaucaagaaugcccugcugagcaccaacaaggccguggugucccucagcaacggagucagcgugcuuaccuucaaggugcuggaccucaagaacuacaucgacaagcagcugcugccuauccucaacaagcagagcugcuccaucagcaacaucgagacggucaucgaguuccagcagaagaacaaccggcugcuggagaucacccgcgaguucuccgugaacgccggggugaccacccccgucagcacguacaugcucaccaacagcgaacugcugucccucaucaacgacaugcccaucaccaacgaccagaagaagcugaugagcaacaacgugcagaucgugcggcagcaguccuacagcaucaugugcaucaucaaggaggaaguccuggccuacguggugcagcucccucuguacggcgucaucgacacccccugcuggaagcugcacacgagcccccucugcaccaccaacaccaaggagggguccaacaucugccugacgcgcaccgaccggggcugguacugcgacaacgcgggguccgugagcuucuucccccaggccgagaccugcaaggugcagagcaaccgcgucuucugcgacacuaugaacagcagaacgcucccguccgaggugaaccugugcaacauagacauauucaaccccaaguacgacugcaagaucaugaccagcaagaccgacgucuccagcuccgugauuaccagccugggcgcaaucguguccugcuacggcaagacgaagugcaccgccagcaacaagaaccgggggaucaucaagaccuucuccaacggcugcgacuaugucagcaacaaggggguggacaccgugagcgucggaaacacgcucuacugcgugaacaagcaagagggcaaguccuuauacgugaagggggagcccaucaucaacuucuacgacccccuggucuucccgagcgacgaguucgacgccagcauaagccaggugaacgagaagaucaaccagucccucgcguucauccgcaagagcgacgagcugcugcacaacgugaacgucggcaaguccaccaccaacaucaugaucaccaccaucaucaucgugaucaucgugauccuccugcugcucaucgccgucgggcuguuccuguacugcaaggcccggagcacgcccgugaccuuguccaaggaccagcucagcggcaucaacaacaucgccuucuccaacugaggacuaguggaagcauuuuccuggcugauuaaaagaaauuacucagcuauggucaucuguuccuguuagaaggcuaugcagcauauuauauacuaugcgcauguuaugaaaugcauaauaaaaaauuuuaaaaaaucuaaaagaucuaaaaaaaaaaaaaaaaaaaaaaaaaaaaaaaaaaaaaaaaaaaaaaaaaaaaaaaaaaaaaaaaugcaucccccccccccccccccccccccccccccccaaaggcucuuuucagagccaccagaauu

SEQ ID NO: 16419 - RNA, 1967 nt, Artificial Sequence
  mRNA product Design g-2 comprising derived and/or modified sequence from HRSV(Memphis-37)__AIY60640.1__F_DSCav1_mut4 (opt1)
gggagaguccgcucagccagguugcagaagcggcuuagcguguguccuaaucuucucucugcguguagguaggccugugccgcaaacaagcuuaccauggagcugcccauccucaagaccaacgccaucaccacgauccuggccgcggugacccugugcuucgccagcucccagaacaucaccgaggaguucuaccagagcacgugcuccgccgucagcaagggcuaccucuccgcccugcgcaccgggugguacaccagcgugaucaccaucgagcuguccaacaucaaggagaacaagugcaacggcaccgacgccaaggugaagcucaucaagcaggagcuggacaaguacaagaacgcggucacggagcugcagcuccugaugcagagcaccccggccgccggcuccgggagcgcgaucugcuccggcaucgccgucugcaaggugcugcaccucgagggcgaggugaacaagaucaagaacgcccugcuguccaccaacaaggccgucgugagccucuccaacggggugagcguccugaccuucaaggugcuggaccucaagaacuacaucgacaagcagcugcugcccauccugaacaagcagagcugcuccaucagcaacaucgagaccgucaucgaguuccagcagaagaacaaccgccuccuggagaucacgcgggaguucagcgugaacgcgggcgugaccacccccgucuccaccuacaugcugacgaacagcgagcuccugucccugaucaacgacaugccgaucaccaacgaccagaagaagcucaugagcaacaacgugcagaucgugcgccagcaguccuacagcaucaugugcaucaucaaggaggagguccuggccuacguggugcagcugccccucuacggggucaucgacacccccugcuggaagcugcacaccagcccccugugcacgaccaacaccaaggagggcuccaacaucugccucacccggacggaccgcgggugguacugcgacaacgccggcagcguguccuucuucccgcaggccgagaccugcaagguccagagcaaccggguguucugcgacaccaugaacucccggacccugcccagcgaggugaaccucugcaacaucgacaucuucaaccccaaguacgacugcaagaucaugacguccaagaccgacgucagcuccagcgugaucaccucccugggcgccaucgugagcugcuacgggaagaccaagugcacggcgagcaacaagaaccgcggcaucaucaagaccuucuccaacgggugcgacuacgucagcaacaagggcguggacaccguguccgucggcaacacccuguacugcgugaacaagcaggagggcaagagccucuacgugaagggggagcccaucaucaacuucuacgacccgcuggucuuccccuccgacgaguucgacgccagcaucucccaggugaacgagaagaucaaccagagccuggccuucauccggaaguccgacgagcuccugcacaacgugaacgucggcaagagcaccacgaacaucaugaucaccaccaucaucaucgugaucaucgugauccugcugcuccugaucgccgucgggcuguuccucuacugcaaggcccgcuccacccccgugacgcugagcaaggaccagcuguccgggaucaacaacaucgcguucagcaacugaggacuaguaauaaggaaacuguaugaaugucugugggcaggaagugaagagauccuucuguaaagguuuuuggaauuaugucugcugaauaauaaacuuuuuugaaauaauaaaucugguagaaaaaugagaucuaaaaaaaaaaaaaaaaaaaaaaaaaaaaaaaaaaaaaaaaaaaaaaaaaaaaaaaaaaaaaaaaugcaucccccccccccccccccccccccccccccccaaaggcucuuuucagagccaccagaauu

SEQ ID NO: 16420 - RNA, 1967 nt, Artificial Sequence
  mRNA product Design g-2 comprising derived and/or modified sequence from HRSV(Memphis-37)__AIY60640.1__F_DSCav1_mut4 (opt1)
gggagaguccgcucagccagguugcagaagcggcuuagcguguguccuaaucuucucucugcguguagguaggccugugccgcaaacaagcuuaccauggagcugcccauccucaagaccaacgccaucaccacgauccuggccgcggugacccugugcuucgccagcucccagaacaucaccgaggaguucuaccagagcacgugcuccgccgucagcaagggcuaccucuccgcccugcgcaccgggugguacaccagcgugaucaccaucgagcuguccaacaucaaggagaacaagugcaacggcaccgacgccaaggugaagcucaucaagcaggagcuggacaaguacaagaacgcggucacggagcugcagcuccugaugcagagcaccccggccgccggguccggcagcgccaucugcuccgggaucgcggugugcaaggugcugcaccucgagggcgaggucaacaagaucaagaacgcccugcugagcaccaacaaggccguggugucccucagcaacggcgucuccgugcugaccuucaaggugcuggaccucaagaacuacaucgacaagcagcugcugcccauccucaacaagcagagcugcuccaucagcaacaucgagacggucaucgaguuccagcagaagaacaaccggcugcuggagaucacccgcgaguucuccgugaacgccggggugaccacccccgucagcacguacaugcucaccaacagcgagcugcugucccucaucaacgacaugcccaucaccaacgaccagaagaagcugaugagcaacaacgugcagaucgugcggcagcaguccuacagcaucaugugcaucaucaaggaggagguccuggccuacguggugcagcucccgcuguacggcgucaucgacacccccugcuggaagcugcacacgagcccccucugcaccaccaacaccaaggagggguccaacaucugccugacgcgcaccgaccggggcugguacugcgacaacgcgggguccgugagcuucuucccccaggccgagaccugcaaggugcaguccaaccgcgucuucugcgacaccaugaacagccggacgcucccguccgaggugaaccugugcaacaucgacaucuucaaccccaaguacgacugcaagaucaugaccagcaagaccgacgucuccagcuccgugaucaccagccugggcgccaucguguccugcuacggcaagacgaagugcaccgccagcaacaagaaccgggggaucaucaagaccuucuccaacggcugcgacuacgucagcaacaaggggguggacaccgugagcgucggcaacacgcucuacugcgugaacaagcaggagggcaagucccuguacgugaagggggagcccaucaucaacuucuacgacccccuggucuucccgagcgacgaguucgacgccuccaucagccaggugaacgagaagaucaaccagucccucgcguucauccgcaagagcgacgagcugcugcacaacgugaacgucggcaaguccaccaccaacaucaugaucaccaccaucaucaucgugaucaucgugauccuccugcugcucaucgccgucgggcuguuccuguacugcaaggcccggagcacgcccgugacccuguccaaggaccagcucagcggcaucaacaacaucgccuucuccaacugaggacuaguaauaaggaaacuguaugaaugucugugggcaggaagugaagagauccuucuguaaagguuuuuggaauuaugucugcugaauaauaaacuuuuuugaaauaauaaaucugguagaaaaaugagaucuaaaaaaaaaaaaaaaaaaaaaaaaaaaaaaaaaaaaaaaaaaaaaaaaaaaaaaaaaaaaaaaaugcaucccccccccccccccccccccccccccccccaaaggcucuuuucagagccaccagaauu

SEQ ID NO: 16421 - RNA, 1967 nt, Artificial Sequence
  mRNA product Design g-2 comprising derived and/or modified sequence from HRSV(Memphis-37)__AIY60640.1__F_DSCav1_mut4 (opt2)
gggagaguccgcucagccagguugcagaagcggcuuagcguguguccuaaucuucucucugcguguagguaggccugugccgcaaacaagcuuaccauggagcuccccauccucaagaccaacgccaucaccaccauccucgccgccgucacccucugcuucgccuccucccagaacaucaccgaggaguucuaccaguccaccugcuccgccgucuccaagggcuaccucuccgcccuccgcaccggcugguacaccuccgucaucaccaucgagcucuccaacaucaaggagaacaagugcaacggcaccgacgccaaggucaagcucaucaagcaggagcucgacaaguacaagaacgccgucaccgagcuccagcuccucaugcaguccacccccgccgccggcuccggcuccgccaucugcuccggcaucgccgucugcaagguccuccaccucgagggcgaggucaacaagaucaagaacgcccuccucuccaccaacaaggccgucgucucccucuccaacggcgucuccguccucaccuucaagguccucgaccucaagaacuacaucgacaagcagcuccuccccauccucaacaagcaguccugcuccaucuccaacaucgagaccgucaucgaguuccagcagaagaacaaccgccuccucgagaucacccgcgaguucuccgucaacgccggcgucaccacccccgucuccaccuacaugcucaccaacuccgagcuccucucccucaucaacgacaugcccaucaccaacgaccagaagaagcucauguccaacaacguccagaucguccgccagcaguccuacuccaucaugugcaucaucaaggaggagguccucgccuacgucguccagcucccccucuacggcgucaucgacacccccugcuggaagcuccacaccuccccccucugcaccaccaacaccaaggagggcuccaacaucugccucacccgcaccgaccgcggcugguacugcgacaacgccggcuccgucuccuucuucccccaggccgagaccugcaagguccaguccaaccgcgucuucugcgacaccaugaacucccgcacccuccccuccgaggucaaccucugcaacaucgacaucuucaaccccaaguacgacugcaagaucaugaccuccaagaccgacgucuccuccuccgucaucaccucccucggcgccaucgucuccugcuacggcaagaccaagugcaccgccuccaacaagaaccgcggcaucaucaagaccuucuccaacggcugcgacuacgucuccaacaagggcgucgacaccgucuccgucggcaacacccucuacugcgucaacaagcaggagggcaagucccucuacgucaagggcgagcccaucaucaacuucuacgacccccucgucuuccccuccgacgaguucgacgccuccaucucccaggucaacgagaagaucaaccagucccucgccuucauccgcaaguccgacgagcuccuccacaacgucaacgucggcaaguccaccaccaacaucaugaucaccaccaucaucaucgucaucaucgucauccuccuccuccucaucgccgucggccucuuccucuacugcaaggcccgcuccacccccgucacccucuccaaggaccagcucuccggcaucaacaacaucgccuucuccaacugaggacuaguaauaaggaaacuguaugaaugucugugggcaggaagugaagagauccuucuguaaagguuuuuggaauuaugucugcugaauaauaaacuuuuuugaaauaauaaaucugguagaaaaaugagaucuaaaaaaaaaaaaaaaaaaaaaaaaaaaaaaaaaaaaaaaaaaaaaaaaaaaaaaaaaaaaaaaaugcaucccccccccccccccccccccccccccccccaaaggcucuuuucagagccaccagaauu

SEQ ID NO: 16422 - RNA, 1967 nt, Artificial Sequence
  mRNA product Design g-2 comprising derived and/or modified sequence from HRSV(Memphis-37)__AIY60640.1__F_DSCav1_mut4 (opt3)
gggagaguccgcucagccagguugcagaagcggcuuagcguguguccuaaucuucucucugcguguagguaggccugugccgcaaacaagcuuaccauggagcugcccauccucaagaccaacgccauuacaacuauacuugcugcagugacgcugugcuucgccagcucccagaauaucaccgaagaguuuuaccaaucuacauguucagcggucaguaaaggcuauuugagcgcuuuaagaacugggugguacaccuccguuauuacaaucgaacugucuaacauuaaggagaauaaaugcaacggaaccgacgccaaggugaaacuaaucaagcaggaacucgauaaguauaaaaaugcaguaacugagcugcagcuucugaugcagucgaccccugccgcugguucaggcagcgcaauauguagugggaucgccgugugcaaggucuugcaccucgagggagaagugaacaaaauuaagaaugcucugcuguccacaaacaaagccguugugucucucagcaauggcgucuccguguuaacguucaagguacuggaccuuaagaacuacaucgauaaacaauugcugccaauucuaaauaagcagucauguaguaucagcaacauagagacuguuauugaauuucagcagaaaaauaacaggcuccuggagaucacccgggaguucucugugaaugcgggugucacaacuccgguguccaccuauaugcuuacaaacucagaacuguugagccucauuaacgacaugcccaucaccaaugaucaaaagaaacugaugaguaacaaugugcagaucguccgccagcagucuuacuccauuaugugcauaaucaaggaggaaguuuuagcauaugugguacaacugccucucuacggggugauugacacgccauguuggaaacuucauacuagcccccugugcacaaccaacacuaaggagggaucgaauaucuguuugacacgaaccgaucguggcugguacugcgacaacgccggcucugucuccuuuuucccucaggcugaaacguguaaggugcagucaaauagaguguuuugcgauaccaugaacaguagaacacugccaagcgaggugaaucucugcaacauagacauuuucaaucccaaauaugauuguaagaucaugacuuccaaaaccgacgucucuagcucagugaucacaagucugggggccauuguauccugcuacggaaagacuaaauguaccgcaagcaacaagaauagggguaucauuaagacauuuucuaacggcugcgauuauguuucaaauaaagggguggacaccgucagugugggaaacacucuuuacugugucaacaagcaagagggcaaaagccuguaugugaagggugaaccuauaaucaauuucuacgacccauugguuuuuccguccgaugaguucgacgcuucuauuucgcagguuaacgagaaaaucaaucagagccucgccuuuauccggaaguccgaugaacuguuacacaacguaaaugucgggaagucaacgacaaacauuaugauaaccacuaucauuaucgugauuaucguuauacugcuacuccugaucgcggugggacuuuucuuguauugcaaagcccgcaguacccccgucacacugucuaaggaccagcucagcggcauuaauaacaucgcauucuccaauugaggacuaguaauaaggaaacuguaugaaugucugugggcaggaagugaagagauccuucuguaaagguuuuuggaauuaugucugcugaauaauaaacuuuuuugaaauaauaaaucugguagaaaaaugagaucuaaaaaaaaaaaaaaaaaaaaaaaaaaaaaaaaaaaaaaaaaaaaaaaaaaaaaaaaaaaaaaaaugcaucccccccccccccccccccccccccccccccaaaggcucuuuucagagccaccagaauu

SEQ ID NO: 16423 - RNA, 1967 nt, Artificial Sequence
  mRNA product Design g-2 comprising derived and/or modified sequence from HRSV(Memphis-37)__AIY60640.1__F_DSCav1_mut4 (opt4)
gggagaguccgcucagccagguugcagaagcggcuuagcguguguccuaaucuucucucugcguguagguaggccugugccgcaaacaagcuuaccauggagcugcccauccugaagaccaacgccaucaccaccauccuggccgccgugacccugugcuucgccagcagccagaacaucaccgaggaguucuaccagagcaccugcagcgccgugagcaagggcuaccugagcgcccugagaaccggcugguacaccagcgugaucaccaucgagcugagcaacaucaaggagaacaagugcaacggcaccgacgccaaggugaagcugaucaagcaggagcuggacaaguacaagaacgccgugaccgagcugcagcugcugaugcagagcacccccgccgccggcagcggcagcgccaucugcagcggcaucgccgugugcaaggugcugcaccuggagggcgaggugaacaagaucaagaacgcccugcugagcaccaacaaggccguggugagccugagcaacggcgugagcgugcugaccuucaaggugcuggaccugaagaacuacaucgacaagcagcugcugcccauccugaacaagcagagcugcagcaucagcaacaucgagaccgugaucgaguuccagcagaagaacaacagacugcuggagaucaccagagaguucagcgugaacgccggcgugaccacccccgugagcaccuacaugcugaccaacagcgagcugcugagccugaucaacgacaugcccaucaccaacgaccagaagaagcugaugagcaacaacgugcagaucgugagacagcagagcuacagcaucaugugcaucaucaaggaggaggugcuggccuacguggugcagcugccccuguacggcgugaucgacacccccugcuggaagcugcacaccagcccccugugcaccaccaacaccaaggagggcagcaacaucugccugaccagaaccgacagaggcugguacugcgacaacgccggcagcgugagcuucuucccccaggccgagaccugcaaggugcagagcaacagaguguucugcgacaccaugaacagcagaacccugcccagcgaggugaaccugugcaacaucgacaucuucaaccccaaguacgacugcaagaucaugaccagcaagaccgacgugagcagcagcgugaucaccagccugggcgccaucgugagcugcuacggcaagaccaagugcaccgccagcaacaagaacagaggcaucaucaagaccuucagcaacggcugcgacuacgugagcaacaagggcguggacaccgugagcgugggcaacacccuguacugcgugaacaagcaggagggcaagagccuguacgugaagggcgagcccaucaucaacuucuacgacccccugguguuccccagcgacgaguucgacgccagcaucagccaggugaacgagaagaucaaccagagccuggccuucaucagaaagagcgacgagcugcugcacaacgugaacgugggcaagagcaccaccaacaucaugaucaccaccaucaucaucgugaucaucgugauccugcugcugcugaucgccgugggccuguuccuguacugcaaggccagaagcacccccgugacccugagcaaggaccagcugagcggcaucaacaacaucgccuucagcaacugaggacuaguaauaaggaaacuguaugaaugucugugggcaggaagugaagagauccuucuguaaagguuuuuggaauuaugucugcugaauaauaaacuuuuuugaaauaauaaaucugguagaaaaaugagaucuaaaaaaaaaaaaaaaaaaaaaaaaaaaaaaaaaaaaaaaaaaaaaaaaaaaaaaaaaaaaaaaaugcaucccccccccccccccccccccccccccccccaaaggcucuuuucagagccaccagaauu

SEQ ID NO: 16424 - RNA, 1967 nt, Artificial Sequence
  mRNA product Design g-2 comprising derived and/or modified sequence from HRSV(Memphis-37)__AIY60640.1__F_DSCav1_mut4 (opt5)
gggagaguccgcucagccagguugcagaagcggcuuagcguguguccuaaucuucucucugcguguagguaggccugugccgcaaacaagcuuaccauggagcugcccauccucaagaccaacgccauuacaacgauccuggcugccgugacccuuugcuucgcgagcucccagaauauuacagaagaguuuuaccaaucuaccuguagcgcugucuccaaaggcuaucugucugcccucagaacagggugguacaccagcguuaucacaauugaacuguccaacaucaaggagaauaaaugcaacggaaccgacgccaaggugaaacuuaucaagcaggaacuggauaaguauaaaaaugcugugacggagcuccagcugcugaugcagucuaccccugccgcuggcagcggguccgccauuuguagcggaaucgcggucugcaaggugcuccaccuggagggcgaaguuaacaaaauuaagaaugcccuucugucuacaaacaaagcuguggucucccucagcaauggggugucuguucugaccuucaaggugcuugaccugaagaacuacaucgauaaacaacuccugccgauucugaauaagcaguccuguagcaucucuaacauugagacagucaucgaauuucagcagaaaaauaaccggcuccuggagaucacccgcgaguucuccgugaaugccggagugacgacacccgucagcaccuauaugcuuacaaacuccgaacugcucucucugauuaacgacaugccuaucaccaaugaucaaaagaaacuuaugagcaacaauguucagauugugagacagcaguccuacagcaucaugugcauuaucaaggaggaagugcuggcuuaugucgugcaacucccccuguacggcguuaucgacaccccuuguuggaaacugcauacaucuccccucugcacgaccaacacaaaggagggcuccaauauuugucugacccggacagaucgcgggugguacugcgacaacgccggaagcgugagcuuuuucccucaggcggaaaccuguaagguccagucuaauagaguguuuugcgauacgaugaacuccagaacacugccgucugagguuaaucucugcaacaucgacauuuucaaucccaaauaugauuguaagaucaugaccagcaaaaccgacguguccagcucugucauuacaucccugggcgccaucgugagcugcuacgggaagaccaaauguacagcuucuaacaagaaucggggaaucauuaagacguuuuccaacggcugcgauuaugucagcaauaaagggguggacaccguuuccgugggaaacacacuuuacugugucaacaagcaagagggcaaaucucuguaugugaagggcgaaccuaucauuaauuucuacgacccccucguuuuuccuagcgaugaguucgacgccuccaucucucaggugaacgaaaagauuaaucagagccuggcuuuuauccgcaaguccgaugagcugcuccacaacgucaauguggggaaaagcaccacaaacauuaugaucaccacgaucauuaucgugauuaucguuauucugcuucugcucaucgccgucggacuguuccuguauugcaaagccagaucuacccccgugacacuuuccaaggaccagcucagcggcaucaauaacauugcuuucucuaauugaggacuaguaauaaggaaacuguaugaaugucugugggcaggaagugaagagauccuucuguaaagguuuuuggaauuaugucugcugaauaauaaacuuuuuugaaauaauaaaucugguagaaaaaugagaucuaaaaaaaaaaaaaaaaaaaaaaaaaaaaaaaaaaaaaaaaaaaaaaaaaaaaaaaaaaaaaaaaugcaucccccccccccccccccccccccccccccccaaaggcucuuuucagagccaccagaauu

SEQ ID NO: 16425 - RNA, 1967 nt, Artificial Sequence
  mRNA product Design g-2 comprising derived and/or modified sequence from HRSV(Memphis-37)__AIY60640.1__F_DSCav1_mut4 (opt6)
gggagaguccgcucagccagguugcagaagcggcuuagcguguguccuaaucuucucucugcguguagguaggccugugccgcaaacaagcuuaccauggaacucccaauccuaaaaacaaacgcaauaacaacaauauuagcagccguaacacucuguuucgccucaucccaaaacauaacagaagaauuuuaucaaucuacauguuccgccgucaguaaaggauaucuaucagccuuaagaacaggcugguacacaucaguaaucaccauagaauuauccaacauaaaagaaaacaaaugcaauggcacagaugccaaaguaaaacuaaucaaacaagaacuugauaaauauaaaaacgcaguaacagaauuacaauuauuaaugcaaagcacaccagccgcaggaucaggaucagcaauauguucaggaauagcagucuguaaaguacuacacuuagaaggagaaguaaacaaaauuaaaaacgcauuacuaagcaccaauaaagcaguaguaucacuaucaaacggcguauccguauuaacguucaaaguccucgaccugaaaaacuacauagauaaacaacuacuaccaauacuaaauaaacaaucaugcucaauaucaaacauagaaacuguuaucgaauuucaacagaaaaauaaccgacuacuagaaaucaccagagaauuuucaguaaacgcaggcgucacuacaccaguauccacauacaugcuaaccaacucggaauuacuuucccucauaaacgacaugccaauaacaaacgaccaaaagaaacuuaugucaaacaacguucaaauaguccgccaacaaucauacucaauaauguguaucauaaaagaagaaguccuagcauaugucguacaacuaccauuauacggaguaauugacacaccuugcuggaaacuacacacauccccacuauguacaacaaacacuaaagaaggaucaaacaucugccuaaccagaacagacagaggcugguauugcgacaacgcaggaucaguaucauucuucccacaagcagaaacaugcaaaguacaaucaaacagagucuucugcgacaccaugaacagcagaacccucccauccgaaguaaacuuaugcaacaucgauaucuucaacccaaaauacgacuguaaaauaaugacaucaaaaacagacguuucauccucaguaauaacaucauuaggugccauaguuucauguuacggaaaaaccaaauguaccgcaucaaacaaaaacagaggcauuauuaaaacauucucuaacggaugcgacuaugucaguaacaaaggaguagacacaguaucagucggaaacacauuauauugcguaaauaaacaagaaggaaaaagucuauacguaaaaggagaaccaauaauaaacuuuuacgacccucucguauucccaucagacgaauuugaugcauccauaucacaagucaacgaaaagauaaaccaaucccuagcauucauaagaaaaucagacgaacuacuccauaacguaaacguaggaaaaagcacaaccaauauaaugauaaccacaauaaucauaguaauaauagucauauuauuacuuuuaauugcaguaggacucuuucuauacugcaaagcaagaagcacaccaguaacacuaagcaaagaccaacuaucaggcaucaacaauaucgccuuuucaaauuaaggacuaguaauaaggaaacuguaugaaugucugugggcaggaagugaagagauccuucuguaaagguuuuuggaauuaugucugcugaauaauaaacuuuuuugaaauaauaaaucugguagaaaaaugagaucuaaaaaaaaaaaaaaaaaaaaaaaaaaaaaaaaaaaaaaaaaaaaaaaaaaaaaaaaaaaaaaaaugcaucccccccccccccccccccccccccccccccaaaggcucuuuucagagccaccagaauu

SEQ ID NO: 16426 - RNA, 1967 nt, Artificial Sequence
  mRNA product Design g-2 comprising derived and/or modified sequence from HRSV(Memphis-37)__AIY60640.1__F_DSCav1_mut4 (opt11)
gggagaguccgcucagccagguugcagaagcggcuuagcguguguccuaaucuucucucugcguguagguaggccugugccgcaaacaagcuuaccauggagcugcccauccucaagaccaacgccaucaccacgauccuggccgcggugacccugugcuucgcgagcucccagaacaucaccgaggaguucuaccagagcacgugcuccgccgucagcaagggcuaccucuccgcccugcgcaccgggugguacaccagcgugaucaccaucgagcuguccaacaucaaggagaacaagugcaacggcaccgacgccaaggugaaacucaucaagcaggagcuggacaaguacaagaacgccgucaccgagcugcagcuccugaugcagagcaccccggccgccggguccggcagcgcuaucugcuccgggaucgcggugugcaaggugcugcaccucgagggcgaggucaacaagaucaagaaugcccugcugagcaccaacaaggccguggugucccucagcaacggagucagcgugcuuaccuucaaggugcuggaccucaagaacuacaucgacaagcagcugcugccuauccucaacaagcagagcugcuccaucagcaacaucgagacggucaucgaguuccagcagaagaacaaccggcugcuggagaucacccgcgaguucuccgugaacgccggggugaccacccccgucagcacguacaugcucaccaacagcgaacugcugucccucaucaacgacaugcccaucaccaacgaccagaagaagcugaugagcaacaacgugcagaucgugcggcagcaguccuacagcaucaugugcaucaucaaggaggaaguccuggccuacguggugcagcucccucuguacggcgucaucgacacccccugcuggaagcugcacacgagcccccucugcaccaccaacaccaaggagggguccaacaucugccugacgcgcaccgaccggggcugguacugcgacaacgcgggguccgugagcuucuucccccaggccgagaccugcaaggugcagagcaaccgcgucuucugcgacacuaugaacagcagaacgcucccguccgaggugaaccugugcaacauagacauauucaaccccaaguacgacugcaagaucaugaccagcaagaccgacgucuccagcuccgugauuaccagccugggcgcaaucguguccugcuacggcaagacgaagugcaccgccagcaacaagaaccgggggaucaucaagaccuucuccaacggcugcgacuaugucagcaacaaggggguggacaccgugagcgucggaaacacgcucuacugcgugaacaagcaagagggcaaguccuuauacgugaagggggagcccaucaucaacuucuacgacccccuggucuucccgagcgacgaguucgacgccagcauaagccaggugaacgagaagaucaaccagucccucgcguucauccgcaagagcgacgagcugcugcacaacgugaacgucggcaaguccaccaccaacaucaugaucaccaccaucaucaucgugaucaucgugauccuccugcugcucaucgccgucgggcuguuccuguacugcaaggcccggagcacgcccgugaccuuguccaaggaccagcucagcggcaucaacaacaucgccuucuccaacugaggacuaguaauaaggaaacuguaugaaugucugugggcaggaagugaagagauccuucuguaaagguuuuuggaauuaugucugcugaauaauaaacuuuuuugaaauaauaaaucugguagaaaaaugagaucuaaaaaaaaaaaaaaaaaaaaaaaaaaaaaaaaaaaaaaaaaaaaaaaaaaaaaaaaaaaaaaaaugcaucccccccccccccccccccccccccccccccaaaggcucuuuucagagccaccagaauu

SEQ ID NO: 16427 - RNA, 2199 nt, Artificial Sequence
  mRNA product Design g-3 comprising derived and/or modified sequence from HRSV(Memphis-37)__AIY60640.1__F_DSCav1_mut4 (opt1)
gggagaguccgcucagccagguugcagaagcggcuuagcguguguccuaaucuucucucugcguguagguaggccugugccgcaaacaagcuuaccauggagcugcccauccucaagaccaacgccaucaccacgauccuggccgcggugacccugugcuucgccagcucccagaacaucaccgaggaguucuaccagagcacgugcuccgccgucagcaagggcuaccucuccgcccugcgcaccgggugguacaccagcgugaucaccaucgagcuguccaacaucaaggagaacaagugcaacggcaccgacgccaaggugaagcucaucaagcaggagcuggacaaguacaagaacgcggucacggagcugcagcuccugaugcagagcaccccggccgccggcuccgggagcgcgaucugcuccggcaucgccgucugcaaggugcugcaccucgagggcgaggugaacaagaucaagaacgcccugcuguccaccaacaaggccgucgugagccucuccaacggggugagcguccugaccuucaaggugcuggaccucaagaacuacaucgacaagcagcugcugcccauccugaacaagcagagcugcuccaucagcaacaucgagaccgucaucgaguuccagcagaagaacaaccgccuccuggagaucacgcgggaguucagcgugaacgcgggcgugaccacccccgucuccaccuacaugcugacgaacagcgagcuccugucccugaucaacgacaugccgaucaccaacgaccagaagaagcucaugagcaacaacgugcagaucgugcgccagcaguccuacagcaucaugugcaucaucaaggaggagguccuggccuacguggugcagcugccccucuacggggucaucgacacccccugcuggaagcugcacaccagcccccugugcacgaccaacaccaaggagggcuccaacaucugccucacccggacggaccgcgggugguacugcgacaacgccggcagcguguccuucuucccgcaggccgagaccugcaagguccagagcaaccggguguucugcgacaccaugaacucccggacccugcccagcgaggugaaccucugcaacaucgacaucuucaaccccaaguacgacugcaagaucaugacguccaagaccgacgucagcuccagcgugaucaccucccugggcgccaucgugagcugcuacgggaagaccaagugcacggcgagcaacaagaaccgcggcaucaucaagaccuucuccaacgggugcgacuacgucagcaacaagggcguggacaccguguccgucggcaacacccuguacugcgugaacaagcaggagggcaagagccucuacgugaagggggagcccaucaucaacuucuacgacccgcuggucuuccccuccgacgaguucgacgccagcaucucccaggugaacgagaagaucaaccagagccuggccuucauccggaaguccgacgagcuccugcacaacgugaacgucggcaagagcaccacgaacaucaugaucaccaccaucaucaucgugaucaucgugauccugcugcuccugaucgccgucgggcuguuccucuacugcaaggcccgcuccacccccgugacgcugagcaaggaccagcuguccgggaucaacaacaucgcguucagcaacugaggacuagugaagggaacacccaaauuuaauucagccuuaagcacaauuaauuaagagugaaacguaauuguacaagcaguuggucacccaccauagggcaugaucaacaccgcaaccuuuccuuuuucccccagugauucugaaaaaccccucuucccuucagcuugcuuagauguuccaaauuuaguaagcuuaaggcggccuacagaagaaaaagaaaaaaaaggccacaaaaguucccucucacuuucaguaaauaaaauaaaagcagcaacagaaauaaagaaauaaaugaaauucaaaaugaaauaaauauuguguugugcagcauuaaaaaaucaauaaaaauuaaaaaugagcaagaucuaaaaaaaaaaaaaaaaaaaaaaaaaaaaaaaaaaaaaaaaaaaaaaaaaaaaaaaaaaaaaaaaugcaucccccccccccccccccccccccccccccccaaaggcucuuuucagagccaccagaauu

SEQ ID NO: 16428 - RNA, 2199 nt, Artificial Sequence
  mRNA product Design g-3 comprising derived and/or modified sequence from HRSV(Memphis-37)__AIY60640.1__F_DSCav1_mut4 (opt1)
gggagaguccgcucagccagguugcagaagcggcuuagcguguguccuaaucuucucucugcguguagguaggccugugccgcaaacaagcuuaccauggagcugcccauccucaagaccaacgccaucaccacgauccuggccgcggugacccugugcuucgccagcucccagaacaucaccgaggaguucuaccagagcacgugcuccgccgucagcaagggcuaccucuccgcccugcgcaccgggugguacaccagcgugaucaccaucgagcuguccaacaucaaggagaacaagugcaacggcaccgacgccaaggugaagcucaucaagcaggagcuggacaaguacaagaacgcggucacggagcugcagcuccugaugcagagcaccccggccgccggguccggcagcgccaucugcuccgggaucgcggugugcaaggugcugcaccucgagggcgaggucaacaagaucaagaacgcccugcugagcaccaacaaggccguggugucccucagcaacggcgucuccgugcugaccuucaaggugcuggaccucaagaacuacaucgacaagcagcugcugcccauccucaacaagcagagcugcuccaucagcaacaucgagacggucaucgaguuccagcagaagaacaaccggcugcuggagaucacccgcgaguucuccgugaacgccggggugaccacccccgucagcacguacaugcucaccaacagcgagcugcugucccucaucaacgacaugcccaucaccaacgaccagaagaagcugaugagcaacaacgugcagaucgugcggcagcaguccuacagcaucaugugcaucaucaaggaggagguccuggccuacguggugcagcucccgcuguacggcgucaucgacacccccugcuggaagcugcacacgagcccccucugcaccaccaacaccaaggagggguccaacaucugccugacgcgcaccgaccggggcugguacugcgacaacgcgggguccgugagcuucuucccccaggccgagaccugcaaggugcaguccaaccgcgucuucugcgacaccaugaacagccggacgcucccguccgaggugaaccugugcaacaucgacaucuucaaccccaaguacgacugcaagaucaugaccagcaagaccgacgucuccagcuccgugaucaccagccugggcgccaucguguccugcuacggcaagacgaagugcaccgccagcaacaagaaccgggggaucaucaagaccuucuccaacggcugcgacuacgucagcaacaaggggguggacaccgugagcgucggcaacacgcucuacugcgugaacaagcaggagggcaagucccuguacgugaagggggagcccaucaucaacuucuacgacccccuggucuucccgagcgacgaguucgacgccuccaucagccaggugaacgagaagaucaaccagucccucgcguucauccgcaagagcgacgagcugcugcacaacgugaacgucggcaaguccaccaccaacaucaugaucaccaccaucaucaucgugaucaucgugauccuccugcugcucaucgccgucgggcuguuccuguacugcaaggcccggagcacgcccgugacccuguccaaggaccagcucagcggcaucaacaacaucgccuucuccaacugaggacuagugaagggaacacccaaauuuaauucagccuuaagcacaauuaauuaagagugaaacguaauuguacaagcaguuggucacccaccauagggcaugaucaacaccgcaaccuuuccuuuuucccccagugauucugaaaaaccccucuucccuucagcuugcuuagauguuccaaauuuaguaagcuuaaggcggccuacagaagaaaaagaaaaaaaaggccacaaaaguucccucucacuuucaguaaauaaaauaaaagcagcaacagaaauaaagaaauaaaugaaauucaaaaugaaauaaauauuguguugugcagcauuaaaaaaucaauaaaaauuaaaaaugagcaagaucuaaaaaaaaaaaaaaaaaaaaaaaaaaaaaaaaaaaaaaaaaaaaaaaaaaaaaaaaaaaaaaaaugcaucccccccccccccccccccccccccccccccaaaggcucuuuucagagccaccagaauu

SEQ ID NO: 16429 - RNA, 2199 nt, Artificial Sequence
  mRNA product Design g-3 comprising derived and/or modified sequence from HRSV(Memphis-37)__AIY60640.1__F_DSCav1_mut4 (opt2)
gggagaguccgcucagccagguugcagaagcggcuuagcguguguccuaaucuucucucugcguguagguaggccugugccgcaaacaagcuuaccauggagcuccccauccucaagaccaacgccaucaccaccauccucgccgccgucacccucugcuucgccuccucccagaacaucaccgaggaguucuaccaguccaccugcuccgccgucuccaagggcuaccucuccgcccuccgcaccggcugguacaccuccgucaucaccaucgagcucuccaacaucaaggagaacaagugcaacggcaccgacgccaaggucaagcucaucaagcaggagcucgacaaguacaagaacgccgucaccgagcuccagcuccucaugcaguccacccccgccgccggcuccggcuccgccaucugcuccggcaucgccgucugcaagguccuccaccucgagggcgaggucaacaagaucaagaacgcccuccucuccaccaacaaggccgucgucucccucuccaacggcgucuccguccucaccuucaagguccucgaccucaagaacuacaucgacaagcagcuccuccccauccucaacaagcaguccugcuccaucuccaacaucgagaccgucaucgaguuccagcagaagaacaaccgccuccucgagaucacccgcgaguucuccgucaacgccggcgucaccacccccgucuccaccuacaugcucaccaacuccgagcuccucucccucaucaacgacaugcccaucaccaacgaccagaagaagcucauguccaacaacguccagaucguccgccagcaguccuacuccaucaugugcaucaucaaggaggagguccucgccuacgucguccagcucccccucuacggcgucaucgacacccccugcuggaagcuccacaccuccccccucugcaccaccaacaccaaggagggcuccaacaucugccucacccgcaccgaccgcggcugguacugcgacaacgccggcuccgucuccuucuucccccaggccgagaccugcaagguccaguccaaccgcgucuucugcgacaccaugaacucccgcacccuccccuccgaggucaaccucugcaacaucgacaucuucaaccccaaguacgacugcaagaucaugaccuccaagaccgacgucuccuccuccgucaucaccucccucggcgccaucgucuccugcuacggcaagaccaagugcaccgccuccaacaagaaccgcggcaucaucaagaccuucuccaacggcugcgacuacgucuccaacaagggcgucgacaccgucuccgucggcaacacccucuacugcgucaacaagcaggagggcaagucccucuacgucaagggcgagcccaucaucaacuucuacgacccccucgucuuccccuccgacgaguucgacgccuccaucucccaggucaacgagaagaucaaccagucccucgccuucauccgcaaguccgacgagcuccuccacaacgucaacgucggcaaguccaccaccaacaucaugaucaccaccaucaucaucgucaucaucgucauccuccuccuccucaucgccgucggccucuuccucuacugcaaggcccgcuccacccccgucacccucuccaaggaccagcucuccggcaucaacaacaucgccuucuccaacugaggacuagugaagggaacacccaaauuuaauucagccuuaagcacaauuaauuaagagugaaacguaauuguacaagcaguuggucacccaccauagggcaugaucaacaccgcaaccuuuccuuuuucccccagugauucugaaaaaccccucuucccuucagcuugcuuagauguuccaaauuuaguaagcuuaaggcggccuacagaagaaaaagaaaaaaaaggccacaaaaguucccucucacuuucaguaaauaaaauaaaagcagcaacagaaauaaagaaauaaaugaaauucaaaaugaaauaaauauuguguugugcagcauuaaaaaaucaauaaaaauuaaaaaugagcaagaucuaaaaaaaaaaaaaaaaaaaaaaaaaaaaaaaaaaaaaaaaaaaaaaaaaaaaaaaaaaaaaaaaugcaucccccccccccccccccccccccccccccccaaaggcucuuuucagagccaccagaauu

SEQ ID NO: 16430 - RNA, 2199 nt, Artificial Sequence
  mRNA product Design g-3 comprising derived and/or modified sequence from HRSV(Memphis-37)__AIY60640.1__F_DSCav1_mut4 (opt3)
gggagaguccgcucagccagguugcagaagcggcuuagcguguguccuaaucuucucucugcguguagguaggccugugccgcaaacaagcuuaccauggagcugcccauccucaagaccaacgccauuacaacuauacuugcugcagugacgcugugcuucgccagcucccagaauaucaccgaagaguuuuaccaaucuacauguucagcggucaguaaaggcuauuugagcgcuuuaagaacugggugguacaccuccguuauuacaaucgaacugucuaacauuaaggagaauaaaugcaacggaaccgacgccaaggugaaacuaaucaagcaggaacucgauaaguauaaaaaugcaguaacugagcugcagcuucugaugcagucgaccccugccgcugguucaggcagcgcaauauguagugggaucgccgugugcaaggucuugcaccucgagggagaagugaacaaaauuaagaaugcucugcuguccacaaacaaagccguugugucucucagcaauggcgucuccguguuaacguucaagguacuggaccuuaagaacuacaucgauaaacaauugcugccaauucuaaauaagcagucauguaguaucagcaacauagagacuguuauugaauuucagcagaaaaauaacaggcuccuggagaucacccgggaguucucugugaaugcgggugucacaacuccgguguccaccuauaugcuuacaaacucagaacuguugagccucauuaacgacaugcccaucaccaaugaucaaaagaaacugaugaguaacaaugugcagaucguccgccagcagucuuacuccauuaugugcauaaucaaggaggaaguuuuagcauaugugguacaacugccucucuacggggugauugacacgccauguuggaaacuucauacuagcccccugugcacaaccaacacuaaggagggaucgaauaucuguuugacacgaaccgaucguggcugguacugcgacaacgccggcucugucuccuuuuucccucaggcugaaacguguaaggugcagucaaauagaguguuuugcgauaccaugaacaguagaacacugccaagcgaggugaaucucugcaacauagacauuuucaaucccaaauaugauuguaagaucaugacuuccaaaaccgacgucucuagcucagugaucacaagucugggggccauuguauccugcuacggaaagacuaaauguaccgcaagcaacaagaauagggguaucauuaagacauuuucuaacggcugcgauuauguuucaaauaaagggguggacaccgucagugugggaaacacucuuuacugugucaacaagcaagagggcaaaagccuguaugugaagggugaaccuauaaucaauuucuacgacccauugguuuuuccguccgaugaguucgacgcuucuauuucgcagguuaacgagaaaaucaaucagagccucgccuuuauccggaaguccgaugaacuguuacacaacguaaaugucgggaagucaacgacaaacauuaugauaaccacuaucauuaucgugauuaucguuauacugcuacuccugaucgcggugggacuuuucuuguauugcaaagcccgcaguacccccgucacacugucuaaggaccagcucagcggcauuaauaacaucgcauucuccaauugaggacuagugaagggaacacccaaauuuaauucagccuuaagcacaauuaauuaagagugaaacguaauuguacaagcaguuggucacccaccauagggcaugaucaacaccgcaaccuuuccuuuuucccccagugauucugaaaaaccccucuucccuucagcuugcuuagauguuccaaauuuaguaagcuuaaggcggccuacagaagaaaaagaaaaaaaaggccacaaaaguucccucucacuuucaguaaauaaaauaaaagcagcaacagaaauaaagaaauaaaugaaauucaaaaugaaauaaauauuguguugugcagcauuaaaaaaucaauaaaaauuaaaaaugagcaagaucuaaaaaaaaaaaaaaaaaaaaaaaaaaaaaaaaaaaaaaaaaaaaaaaaaaaaaaaaaaaaaaaaugcaucccccccccccccccccccccccccccccccaaaggcucuuuucagagccaccagaauu

SEQ ID NO: 16431 - RNA, 2199 nt, Artificial Sequence
  mRNA product Design g-3 comprising derived and/or modified sequence from HRSV(Memphis-37)__AIY60640.1__F_DSCav1_mut4 (opt4)
gggagaguccgcucagccagguugcagaagcggcuuagcguguguccuaaucuucucucugcguguagguaggccugugccgcaaacaagcuuaccauggagcugcccauccugaagaccaacgccaucaccaccauccuggccgccgugacccugugcuucgccagcagccagaacaucaccgaggaguucuaccagagcaccugcagcgccgugagcaagggcuaccugagcgcccugagaaccggcugguacaccagcgugaucaccaucgagcugagcaacaucaaggagaacaagugcaacggcaccgacgccaaggugaagcugaucaagcaggagcuggacaaguacaagaacgccgugaccgagcugcagcugcugaugcagagcacccccgccgccggcagcggcagcgccaucugcagcggcaucgccgugugcaaggugcugcaccuggagggcgaggugaacaagaucaagaacgcccugcugagcaccaacaaggccguggugagccugagcaacggcgugagcgugcugaccuucaaggugcuggaccugaagaacuacaucgacaagcagcugcugcccauccugaacaagcagagcugcagcaucagcaacaucgagaccgugaucgaguuccagcagaagaacaacagacugcuggagaucaccagagaguucagcgugaacgccggcgugaccacccccgugagcaccuacaugcugaccaacagcgagcugcugagccugaucaacgacaugcccaucaccaacgaccagaagaagcugaugagcaacaacgugcagaucgugagacagcagagcuacagcaucaugugcaucaucaaggaggaggugcuggccuacguggugcagcugccccuguacggcgugaucgacacccccugcuggaagcugcacaccagcccccugugcaccaccaacaccaaggagggcagcaacaucugccugaccagaaccgacagaggcugguacugcgacaacgccggcagcgugagcuucuucccccaggccgagaccugcaaggugcagagcaacagaguguucugcgacaccaugaacagcagaacccugcccagcgaggugaaccugugcaacaucgacaucuucaaccccaaguacgacugcaagaucaugaccagcaagaccgacgugagcagcagcgugaucaccagccugggcgccaucgugagcugcuacggcaagaccaagugcaccgccagcaacaagaacagaggcaucaucaagaccuucagcaacggcugcgacuacgugagcaacaagggcguggacaccgugagcgugggcaacacccuguacugcgugaacaagcaggagggcaagagccuguacgugaagggcgagcccaucaucaacuucuacgacccccugguguuccccagcgacgaguucgacgccagcaucagccaggugaacgagaagaucaaccagagccuggccuucaucagaaagagcgacgagcugcugcacaacgugaacgugggcaagagcaccaccaacaucaugaucaccaccaucaucaucgugaucaucgugauccugcugcugcugaucgccgugggccuguuccuguacugcaaggccagaagcacccccgugacccugagcaaggaccagcugagcggcaucaacaacaucgccuucagcaacugaggacuagugaagggaacacccaaauuuaauucagccuuaagcacaauuaauuaagagugaaacguaauuguacaagcaguuggucacccaccauagggcaugaucaacaccgcaaccuuuccuuuuucccccagugauucugaaaaaccccucuucccuucagcuugcuuagauguuccaaauuuaguaagcuuaaggcggccuacagaagaaaaagaaaaaaaaggccacaaaaguucccucucacuuucaguaaauaaaauaaaagcagcaacagaaauaaagaaauaaaugaaauucaaaaugaaauaaauauuguguugugcagcauuaaaaaaucaauaaaaauuaaaaaugagcaagaucuaaaaaaaaaaaaaaaaaaaaaaaaaaaaaaaaaaaaaaaaaaaaaaaaaaaaaaaaaaaaaaaaugcaucccccccccccccccccccccccccccccccaaaggcucuuuucagagccaccagaauu

SEQ ID NO: 16432 - RNA, 2199 nt, Artificial Sequence
  mRNA product Design g-3 comprising derived and/or modified sequence from HRSV(Memphis-37)__AIY60640.1__F_DSCav1_mut4 (opt5)
gggagaguccgcucagccagguugcagaagcggcuuagcguguguccuaaucuucucucugcguguagguaggccugugccgcaaacaagcuuaccauggagcugcccauccucaagaccaacgccauuacaacgauccuggcugccgugacccuuugcuucgcgagcucccagaauauuacagaagaguuuuaccaaucuaccuguagcgcugucuccaaaggcuaucugucugcccucagaacagggugguacaccagcguuaucacaauugaacuguccaacaucaaggagaauaaaugcaacggaaccgacgccaaggugaaacuuaucaagcaggaacuggauaaguauaaaaaugcugugacggagcuccagcugcugaugcagucuaccccugccgcuggcagcggguccgccauuuguagcggaaucgcggucugcaaggugcuccaccuggagggcgaaguuaacaaaauuaagaaugcccuucugucuacaaacaaagcuguggucucccucagcaauggggugucuguucugaccuucaaggugcuugaccugaagaacuacaucgauaaacaacuccugccgauucugaauaagcaguccuguagcaucucuaacauugagacagucaucgaauuucagcagaaaaauaaccggcuccuggagaucacccgcgaguucuccgugaaugccggagugacgacacccgucagcaccuauaugcuuacaaacuccgaacugcucucucugauuaacgacaugccuaucaccaaugaucaaaagaaacuuaugagcaacaauguucagauugugagacagcaguccuacagcaucaugugcauuaucaaggaggaagugcuggcuuaugucgugcaacucccccuguacggcguuaucgacaccccuuguuggaaacugcauacaucuccccucugcacgaccaacacaaaggagggcuccaauauuugucugacccggacagaucgcgggugguacugcgacaacgccggaagcgugagcuuuuucccucaggcggaaaccuguaagguccagucuaauagaguguuuugcgauacgaugaacuccagaacacugccgucugagguuaaucucugcaacaucgacauuuucaaucccaaauaugauuguaagaucaugaccagcaaaaccgacguguccagcucugucauuacaucccugggcgccaucgugagcugcuacgggaagaccaaauguacagcuucuaacaagaaucggggaaucauuaagacguuuuccaacggcugcgauuaugucagcaauaaagggguggacaccguuuccgugggaaacacacuuuacugugucaacaagcaagagggcaaaucucuguaugugaagggcgaaccuaucauuaauuucuacgacccccucguuuuuccuagcgaugaguucgacgccuccaucucucaggugaacgaaaagauuaaucagagccuggcuuuuauccgcaaguccgaugagcugcuccacaacgucaauguggggaaaagcaccacaaacauuaugaucaccacgaucauuaucgugauuaucguuauucugcuucugcucaucgccgucggacuguuccuguauugcaaagccagaucuacccccgugacacuuuccaaggaccagcucagcggcaucaauaacauugcuuucucuaauugaggacuagugaagggaacacccaaauuuaauucagccuuaagcacaauuaauuaagagugaaacguaauuguacaagcaguuggucacccaccauagggcaugaucaacaccgcaaccuuuccuuuuucccccagugauucugaaaaaccccucuucccuucagcuugcuuagauguuccaaauuuaguaagcuuaaggcggccuacagaagaaaaagaaaaaaaaggccacaaaaguucccucucacuuucaguaaauaaaauaaaagcagcaacagaaauaaagaaauaaaugaaauucaaaaugaaauaaauauuguguugugcagcauuaaaaaaucaauaaaaauuaaaaaugagcaagaucuaaaaaaaaaaaaaaaaaaaaaaaaaaaaaaaaaaaaaaaaaaaaaaaaaaaaaaaaaaaaaaaaugcaucccccccccccccccccccccccccccccccaaaggcucuuuucagagccaccagaauu

SEQ ID NO: 16433 - RNA, 2199 nt, Artificial Sequence
  mRNA product Design g-3 comprising derived and/or modified sequence from HRSV(Memphis-37)__AIY60640.1__F_DSCav1_mut4 (opt6)
gggagaguccgcucagccagguugcagaagcggcuuagcguguguccuaaucuucucucugcguguagguaggccugugccgcaaacaagcuuaccauggaacucccaauccuaaaaacaaacgcaauaacaacaauauuagcagccguaacacucuguuucgccucaucccaaaacauaacagaagaauuuuaucaaucuacauguuccgccgucaguaaaggauaucuaucagccuuaagaacaggcugguacacaucaguaaucaccauagaauuauccaacauaaaagaaaacaaaugcaauggcacagaugccaaaguaaaacuaaucaaacaagaacuugauaaauauaaaaacgcaguaacagaauuacaauuauuaaugcaaagcacaccagccgcaggaucaggaucagcaauauguucaggaauagcagucuguaaaguacuacacuuagaaggagaaguaaacaaaauuaaaaacgcauuacuaagcaccaauaaagcaguaguaucacuaucaaacggcguauccguauuaacguucaaaguccucgaccugaaaaacuacauagauaaacaacuacuaccaauacuaaauaaacaaucaugcucaauaucaaacauagaaacuguuaucgaauuucaacagaaaaauaaccgacuacuagaaaucaccagagaauuuucaguaaacgcaggcgucacuacaccaguauccacauacaugcuaaccaacucggaauuacuuucccucauaaacgacaugccaauaacaaacgaccaaaagaaacuuaugucaaacaacguucaaauaguccgccaacaaucauacucaauaauguguaucauaaaagaagaaguccuagcauaugucguacaacuaccauuauacggaguaauugacacaccuugcuggaaacuacacacauccccacuauguacaacaaacacuaaagaaggaucaaacaucugccuaaccagaacagacagaggcugguauugcgacaacgcaggaucaguaucauucuucccacaagcagaaacaugcaaaguacaaucaaacagagucuucugcgacaccaugaacagcagaacccucccauccgaaguaaacuuaugcaacaucgauaucuucaacccaaaauacgacuguaaaauaaugacaucaaaaacagacguuucauccucaguaauaacaucauuaggugccauaguuucauguuacggaaaaaccaaauguaccgcaucaaacaaaaacagaggcauuauuaaaacauucucuaacggaugcgacuaugucaguaacaaaggaguagacacaguaucagucggaaacacauuauauugcguaaauaaacaagaaggaaaaagucuauacguaaaaggagaaccaauaauaaacuuuuacgacccucucguauucccaucagacgaauuugaugcauccauaucacaagucaacgaaaagauaaaccaaucccuagcauucauaagaaaaucagacgaacuacuccauaacguaaacguaggaaaaagcacaaccaauauaaugauaaccacaauaaucauaguaauaauagucauauuauuacuuuuaauugcaguaggacucuuucuauacugcaaagcaagaagcacaccaguaacacuaagcaaagaccaacuaucaggcaucaacaauaucgccuuuucaaauuaaggacuagugaagggaacacccaaauuuaauucagccuuaagcacaauuaauuaagagugaaacguaauuguacaagcaguuggucacccaccauagggcaugaucaacaccgcaaccuuuccuuuuucccccagugauucugaaaaaccccucuucccuucagcuugcuuagauguuccaaauuuaguaagcuuaaggcggccuacagaagaaaaagaaaaaaaaggccacaaaaguucccucucacuuucaguaaauaaaauaaaagcagcaacagaaauaaagaaauaaaugaaauucaaaaugaaauaaauauuguguugugcagcauuaaaaaaucaauaaaaauuaaaaaugagcaagaucuaaaaaaaaaaaaaaaaaaaaaaaaaaaaaaaaaaaaaaaaaaaaaaaaaaaaaaaaaaaaaaaaugcaucccccccccccccccccccccccccccccccaaaggcucuuuucagagccaccagaauu

SEQ ID NO: 16434 - RNA, 2199 nt, Artificial Sequence
  mRNA product Design g-3 comprising derived and/or modified sequence from HRSV(Memphis-37)__AIY60640.1__F_DSCav1_mut4 (opt11)
gggagaguccgcucagccagguugcagaagcggcuuagcguguguccuaaucuucucucugcguguagguaggccugugccgcaaacaagcuuaccauggagcugcccauccucaagaccaacgccaucaccacgauccuggccgcggugacccugugcuucgcgagcucccagaacaucaccgaggaguucuaccagagcacgugcuccgccgucagcaagggcuaccucuccgcccugcgcaccgggugguacaccagcgugaucaccaucgagcuguccaacaucaaggagaacaagugcaacggcaccgacgccaaggugaaacucaucaagcaggagcuggacaaguacaagaacgccgucaccgagcugcagcuccugaugcagagcaccccggccgccggguccggcagcgcuaucugcuccgggaucgcggugugcaaggugcugcaccucgagggcgaggucaacaagaucaagaaugcccugcugagcaccaacaaggccguggugucccucagcaacggagucagcgugcuuaccuucaaggugcuggaccucaagaacuacaucgacaagcagcugcugccuauccucaacaagcagagcugcuccaucagcaacaucgagacggucaucgaguuccagcagaagaacaaccggcugcuggagaucacccgcgaguucuccgugaacgccggggugaccacccccgucagcacguacaugcucaccaacagcgaacugcugucccucaucaacgacaugcccaucaccaacgaccagaagaagcugaugagcaacaacgugcagaucgugcggcagcaguccuacagcaucaugugcaucaucaaggaggaaguccuggccuacguggugcagcucccucuguacggcgucaucgacacccccugcuggaagcugcacacgagcccccucugcaccaccaacaccaaggagggguccaacaucugccugacgcgcaccgaccggggcugguacugcgacaacgcgggguccgugagcuucuucccccaggccgagaccugcaaggugcagagcaaccgcgucuucugcgacacuaugaacagcagaacgcucccguccgaggugaaccugugcaacauagacauauucaaccccaaguacgacugcaagaucaugaccagcaagaccgacgucuccagcuccgugauuaccagccugggcgcaaucguguccugcuacggcaagacgaagugcaccgccagcaacaagaaccgggggaucaucaagaccuucuccaacggcugcgacuaugucagcaacaaggggguggacaccgugagcgucggaaacacgcucuacugcgugaacaagcaagagggcaaguccuuauacgugaagggggagcccaucaucaacuucuacgacccccuggucuucccgagcgacgaguucgacgccagcauaagccaggugaacgagaagaucaaccagucccucgcguucauccgcaagagcgacgagcugcugcacaacgugaacgucggcaaguccaccaccaacaucaugaucaccaccaucaucaucgugaucaucgugauccuccugcugcucaucgccgucgggcuguuccuguacugcaaggcccggagcacgcccgugaccuuguccaaggaccagcucagcggcaucaacaacaucgccuucuccaacugaggacuagugaagggaacacccaaauuuaauucagccuuaagcacaauuaauuaagagugaaacguaauuguacaagcaguuggucacccaccauagggcaugaucaacaccgcaaccuuuccuuuuucccccagugauucugaaaaaccccucuucccuucagcuugcuuagauguuccaaauuuaguaagcuuaaggcggccuacagaagaaaaagaaaaaaaaggccacaaaaguucccucucacuuucaguaaauaaaauaaaagcagcaacagaaauaaagaaauaaaugaaauucaaaaugaaauaaauauuguguugugcagcauuaaaaaaucaauaaaaauuaaaaaugagcaagaucuaaaaaaaaaaaaaaaaaaaaaaaaaaaaaaaaaaaaaaaaaaaaaaaaaaaaaaaaaaaaaaaaugcaucccccccccccccccccccccccccccccccaaaggcucuuuucagagccaccagaauu

SEQ ID NO: 16435 - RNA, 1994 nt, Artificial Sequence
  mRNA product Design g-4 comprising derived and/or modified sequence from HRSV(Memphis-37)__AIY60640.1__F_DSCav1_mut4 (opt1)
gggagacuccugucgggcggaaguaggaggaguagaguuuaaaaacaguacucuuuuuccgguucgggacguaguugaagcaacgacaagccggauaaccgcucuugagacaggaagcuuaccauggagcugcccauccucaagaccaacgccaucaccacgauccuggccgcggugacccugugcuucgccagcucccagaacaucaccgaggaguucuaccagagcacgugcuccgccgucagcaagggcuaccucuccgcccugcgcaccgggugguacaccagcgugaucaccaucgagcuguccaacaucaaggagaacaagugcaacggcaccgacgccaaggugaagcucaucaagcaggagcuggacaaguacaagaacgcggucacggagcugcagcuccugaugcagagcaccccggccgccggcuccgggagcgcgaucugcuccggcaucgccgucugcaaggugcugcaccucgagggcgaggugaacaagaucaagaacgcccugcuguccaccaacaaggccgucgugagccucuccaacggggugagcguccugaccuucaaggugcuggaccucaagaacuacaucgacaagcagcugcugcccauccugaacaagcagagcugcuccaucagcaacaucgagaccgucaucgaguuccagcagaagaacaaccgccuccuggagaucacgcgggaguucagcgugaacgcgggcgugaccacccccgucuccaccuacaugcugacgaacagcgagcuccugucccugaucaacgacaugccgaucaccaacgaccagaagaagcucaugagcaacaacgugcagaucgugcgccagcaguccuacagcaucaugugcaucaucaaggaggagguccuggccuacguggugcagcugccccucuacggggucaucgacacccccugcuggaagcugcacaccagcccccugugcacgaccaacaccaaggagggcuccaacaucugccucacccggacggaccgcgggugguacugcgacaacgccggcagcguguccuucuucccgcaggccgagaccugcaagguccagagcaaccggguguucugcgacaccaugaacucccggacccugcccagcgaggugaaccucugcaacaucgacaucuucaaccccaaguacgacugcaagaucaugacguccaagaccgacgucagcuccagcgugaucaccucccugggcgccaucgugagcugcuacgggaagaccaagugcacggcgagcaacaagaaccgcggcaucaucaagaccuucuccaacgggugcgacuacgucagcaacaagggcguggacaccguguccgucggcaacacccuguacugcgugaacaagcaggagggcaagagccucuacgugaagggggagcccaucaucaacuucuacgacccgcuggucuuccccuccgacgaguucgacgccagcaucucccaggugaacgagaagaucaaccagagccuggccuucauccggaaguccgacgagcuccugcacaacgugaacgucggcaagagcaccacgaacaucaugaucaccaccaucaucaucgugaucaucgugauccugcugcuccugaucgccgucgggcuguuccucuacugcaaggcccgcuccacccccgugacgcugagcaaggaccagcuguccgggaucaacaacaucgcguucagcaacugaggacuaguaauaaggaaacuguaugaaugucugugggcaggaagugaagagauccuucuguaaagguuuuuggaauuaugucugcugaauaauaaacuuuuuugaaauaauaaaucugguagaaaaaugagaucuaaaaaaaaaaaaaaaaaaaaaaaaaaaaaaaaaaaaaaaaaaaaaaaaaaaaaaaaaaaaaaaaugcaucccccccccccccccccccccccccccccccaaaggcucuuuucagagccaccagaauu

SEQ ID NO: 16436 - RNA, 1994 nt, Artificial Sequence
  mRNA product Design g-4 comprising derived and/or modified sequence from HRSV(Memphis-37)__AIY60640.1__F_DSCav1_mut4 (opt1)
gggagacuccugucgggcggaaguaggaggaguagaguuuaaaaacaguacucuuuuuccgguucgggacguaguugaagcaacgacaagccggauaaccgcucuugagacaggaagcuuaccauggagcugcccauccucaagaccaacgccaucaccacgauccuggccgcggugacccugugcuucgccagcucccagaacaucaccgaggaguucuaccagagcacgugcuccgccgucagcaagggcuaccucuccgcccugcgcaccgggugguacaccagcgugaucaccaucgagcuguccaacaucaaggagaacaagugcaacggcaccgacgccaaggugaagcucaucaagcaggagcuggacaaguacaagaacgcggucacggagcugcagcuccugaugcagagcaccccggccgccggguccggcagcgccaucugcuccgggaucgcggugugcaaggugcugcaccucgagggcgaggucaacaagaucaagaacgcccugcugagcaccaacaaggccguggugucccucagcaacggcgucuccgugcugaccuucaaggugcuggaccucaagaacuacaucgacaagcagcugcugcccauccucaacaagcagagcugcuccaucagcaacaucgagacggucaucgaguuccagcagaagaacaaccggcugcuggagaucacccgcgaguucuccgugaacgccggggugaccacccccgucagcacguacaugcucaccaacagcgagcugcugucccucaucaacgacaugcccaucaccaacgaccagaagaagcugaugagcaacaacgugcagaucgugcggcagcaguccuacagcaucaugugcaucaucaaggaggagguccuggccuacguggugcagcucccgcuguacggcgucaucgacacccccugcuggaagcugcacacgagcccccucugcaccaccaacaccaaggagggguccaacaucugccugacgcgcaccgaccggggcugguacugcgacaacgcgggguccgugagcuucuucccccaggccgagaccugcaaggugcaguccaaccgcgucuucugcgacaccaugaacagccggacgcucccguccgaggugaaccugugcaacaucgacaucuucaaccccaaguacgacugcaagaucaugaccagcaagaccgacgucuccagcuccgugaucaccagccugggcgccaucguguccugcuacggcaagacgaagugcaccgccagcaacaagaaccgggggaucaucaagaccuucuccaacggcugcgacuacgucagcaacaaggggguggacaccgugagcgucggcaacacgcucuacugcgugaacaagcaggagggcaagucccuguacgugaagggggagcccaucaucaacuucuacgacccccuggucuucccgagcgacgaguucgacgccuccaucagccaggugaacgagaagaucaaccagucccucgcguucauccgcaagagcgacgagcugcugcacaacgugaacgucggcaaguccaccaccaacaucaugaucaccaccaucaucaucgugaucaucgugauccuccugcugcucaucgccgucgggcuguuccuguacugcaaggcccggagcacgcccgugacccuguccaaggaccagcucagcggcaucaacaacaucgccuucuccaacugaggacuaguaauaaggaaacuguaugaaugucugugggcaggaagugaagagauccuucuguaaagguuuuuggaauuaugucugcugaauaauaaacuuuuuugaaauaauaaaucugguagaaaaaugagaucuaaaaaaaaaaaaaaaaaaaaaaaaaaaaaaaaaaaaaaaaaaaaaaaaaaaaaaaaaaaaaaaaugcaucccccccccccccccccccccccccccccccaaaggcucuuuucagagccaccagaauu

SEQ ID NO: 16437 - RNA, 1994 nt, Artificial Sequence
  mRNA product Design g-4 comprising derived and/or modified sequence from HRSV(Memphis-37)__AIY60640.1__F_DSCav1_mut4 (opt2)
gggagacuccugucgggcggaaguaggaggaguagaguuuaaaaacaguacucuuuuuccgguucgggacguaguugaagcaacgacaagccggauaaccgcucuugagacaggaagcuuaccauggagcuccccauccucaagaccaacgccaucaccaccauccucgccgccgucacccucugcuucgccuccucccagaacaucaccgaggaguucuaccaguccaccugcuccgccgucuccaagggcuaccucuccgcccuccgcaccggcugguacaccuccgucaucaccaucgagcucuccaacaucaaggagaacaagugcaacggcaccgacgccaaggucaagcucaucaagcaggagcucgacaaguacaagaacgccgucaccgagcuccagcuccucaugcaguccacccccgccgccggcuccggcuccgccaucugcuccggcaucgccgucugcaagguccuccaccucgagggcgaggucaacaagaucaagaacgcccuccucuccaccaacaaggccgucgucucccucuccaacggcgucuccguccucaccuucaagguccucgaccucaagaacuacaucgacaagcagcuccuccccauccucaacaagcaguccugcuccaucuccaacaucgagaccgucaucgaguuccagcagaagaacaaccgccuccucgagaucacccgcgaguucuccgucaacgccggcgucaccacccccgucuccaccuacaugcucaccaacuccgagcuccucucccucaucaacgacaugcccaucaccaacgaccagaagaagcucauguccaacaacguccagaucguccgccagcaguccuacuccaucaugugcaucaucaaggaggagguccucgccuacgucguccagcucccccucuacggcgucaucgacacccccugcuggaagcuccacaccuccccccucugcaccaccaacaccaaggagggcuccaacaucugccucacccgcaccgaccgcggcugguacugcgacaacgccggcuccgucuccuucuucccccaggccgagaccugcaagguccaguccaaccgcgucuucugcgacaccaugaacucccgcacccuccccuccgaggucaaccucugcaacaucgacaucuucaaccccaaguacgacugcaagaucaugaccuccaagaccgacgucuccuccuccgucaucaccucccucggcgccaucgucuccugcuacggcaagaccaagugcaccgccuccaacaagaaccgcggcaucaucaagaccuucuccaacggcugcgacuacgucuccaacaagggcgucgacaccgucuccgucggcaacacccucuacugcgucaacaagcaggagggcaagucccucuacgucaagggcgagcccaucaucaacuucuacgacccccucgucuuccccuccgacgaguucgacgccuccaucucccaggucaacgagaagaucaaccagucccucgccuucauccgcaaguccgacgagcuccuccacaacgucaacgucggcaaguccaccaccaacaucaugaucaccaccaucaucaucgucaucaucgucauccuccuccuccucaucgccgucggccucuuccucuacugcaaggcccgcuccacccccgucacccucuccaaggaccagcucuccggcaucaacaacaucgccuucuccaacugaggacuaguaauaaggaaacuguaugaaugucugugggcaggaagugaagagauccuucuguaaagguuuuuggaauuaugucugcugaauaauaaacuuuuuugaaauaauaaaucugguagaaaaaugagaucuaaaaaaaaaaaaaaaaaaaaaaaaaaaaaaaaaaaaaaaaaaaaaaaaaaaaaaaaaaaaaaaaugcaucccccccccccccccccccccccccccccccaaaggcucuuuucagagccaccagaauu

SEQ ID NO: 16438 - RNA, 1994 nt, Artificial Sequence
  mRNA product Design g-4 comprising derived and/or modified sequence from HRSV(Memphis-37)__AIY60640.1__F_DSCav1_mut4 (opt3)
gggagacuccugucgggcggaaguaggaggaguagaguuuaaaaacaguacucuuuuuccgguucgggacguaguugaagcaacgacaagccggauaaccgcucuugagacaggaagcuuaccauggagcugcccauccucaagaccaacgccauuacaacuauacuugcugcagugacgcugugcuucgccagcucccagaauaucaccgaagaguuuuaccaaucuacauguucagcggucaguaaaggcuauuugagcgcuuuaagaacugggugguacaccuccguuauuacaaucgaacugucuaacauuaaggagaauaaaugcaacggaaccgacgccaaggugaaacuaaucaagcaggaacucgauaaguauaaaaaugcaguaacugagcugcagcuucugaugcagucgaccccugccgcugguucaggcagcgcaauauguagugggaucgccgugugcaaggucuugcaccucgagggagaagugaacaaaauuaagaaugcucugcuguccacaaacaaagccguugugucucucagcaauggcgucuccguguuaacguucaagguacuggaccuuaagaacuacaucgauaaacaauugcugccaauucuaaauaagcagucauguaguaucagcaacauagagacuguuauugaauuucagcagaaaaauaacaggcuccuggagaucacccgggaguucucugugaaugcgggugucacaacuccgguguccaccuauaugcuuacaaacucagaacuguugagccucauuaacgacaugcccaucaccaaugaucaaaagaaacugaugaguaacaaugugcagaucguccgccagcagucuuacuccauuaugugcauaaucaaggaggaaguuuuagcauaugugguacaacugccucucuacggggugauugacacgccauguuggaaacuucauacuagcccccugugcacaaccaacacuaaggagggaucgaauaucuguuugacacgaaccgaucguggcugguacugcgacaacgccggcucugucuccuuuuucccucaggcugaaacguguaaggugcagucaaauagaguguuuugcgauaccaugaacaguagaacacugccaagcgaggugaaucucugcaacauagacauuuucaaucccaaauaugauuguaagaucaugacuuccaaaaccgacgucucuagcucagugaucacaagucugggggccauuguauccugcuacggaaagacuaaauguaccgcaagcaacaagaauagggguaucauuaagacauuuucuaacggcugcgauuauguuucaaauaaagggguggacaccgucagugugggaaacacucuuuacugugucaacaagcaagagggcaaaagccuguaugugaagggugaaccuauaaucaauuucuacgacccauugguuuuuccguccgaugaguucgacgcuucuauuucgcagguuaacgagaaaaucaaucagagccucgccuuuauccggaaguccgaugaacuguuacacaacguaaaugucgggaagucaacgacaaacauuaugauaaccacuaucauuaucgugauuaucguuauacugcuacuccugaucgcggugggacuuuucuuguauugcaaagcccgcaguacccccgucacacugucuaaggaccagcucagcggcauuaauaacaucgcauucuccaauugaggacuaguaauaaggaaacuguaugaaugucugugggcaggaagugaagagauccuucuguaaagguuuuuggaauuaugucugcugaauaauaaacuuuuuugaaauaauaaaucugguagaaaaaugagaucuaaaaaaaaaaaaaaaaaaaaaaaaaaaaaaaaaaaaaaaaaaaaaaaaaaaaaaaaaaaaaaaaugcaucccccccccccccccccccccccccccccccaaaggcucuuuucagagccaccagaauu

SEQ ID NO: 16439 - RNA, 1994 nt, Artificial Sequence
  mRNA product Design g-4 comprising derived and/or modified sequence from HRSV(Memphis-37)__AIY60640.1__F_DSCav1_mut4 (opt4)
gggagacuccugucgggcggaaguaggaggaguagaguuuaaaaacaguacucuuuuuccgguucgggacguaguugaagcaacgacaagccggauaaccgcucuugagacaggaagcuuaccauggagcugcccauccugaagaccaacgccaucaccaccauccuggccgccgugacccugugcuucgccagcagccagaacaucaccgaggaguucuaccagagcaccugcagcgccgugagcaagggcuaccugagcgcccugagaaccggcugguacaccagcgugaucaccaucgagcugagcaacaucaaggagaacaagugcaacggcaccgacgccaaggugaagcugaucaagcaggagcuggacaaguacaagaacgccgugaccgagcugcagcugcugaugcagagcacccccgccgccggcagcggcagcgccaucugcagcggcaucgccgugugcaaggugcugcaccuggagggcgaggugaacaagaucaagaacgcccugcugagcaccaacaaggccguggugagccugagcaacggcgugagcgugcugaccuucaaggugcuggaccugaagaacuacaucgacaagcagcugcugcccauccugaacaagcagagcugcagcaucagcaacaucgagaccgugaucgaguuccagcagaagaacaacagacugcuggagaucaccagagaguucagcgugaacgccggcgugaccacccccgugagcaccuacaugcugaccaacagcgagcugcugagccugaucaacgacaugcccaucaccaacgaccagaagaagcugaugagcaacaacgugcagaucgugagacagcagagcuacagcaucaugugcaucaucaaggaggaggugcuggccuacguggugcagcugccccuguacggcgugaucgacacccccugcuggaagcugcacaccagcccccugugcaccaccaacaccaaggagggcagcaacaucugccugaccagaaccgacagaggcugguacugcgacaacgccggcagcgugagcuucuucccccaggccgagaccugcaaggugcagagcaacagaguguucugcgacaccaugaacagcagaacccugcccagcgaggugaaccugugcaacaucgacaucuucaaccccaaguacgacugcaagaucaugaccagcaagaccgacgugagcagcagcgugaucaccagccugggcgccaucgugagcugcuacggcaagaccaagugcaccgccagcaacaagaacagaggcaucaucaagaccuucagcaacggcugcgacuacgugagcaacaagggcguggacaccgugagcgugggcaacacccuguacugcgugaacaagcaggagggcaagagccuguacgugaagggcgagcccaucaucaacuucuacgacccccugguguuccccagcgacgaguucgacgccagcaucagccaggugaacgagaagaucaaccagagccuggccuucaucagaaagagcgacgagcugcugcacaacgugaacgugggcaagagcaccaccaacaucaugaucaccaccaucaucaucgugaucaucgugauccugcugcugcugaucgccgugggccuguuccuguacugcaaggccagaagcacccccgugacccugagcaaggaccagcugagcggcaucaacaacaucgccuucagcaacugaggacuaguaauaaggaaacuguaugaaugucugugggcaggaagugaagagauccuucuguaaagguuuuuggaauuaugucugcugaauaauaaacuuuuuugaaauaauaaaucugguagaaaaaugagaucuaaaaaaaaaaaaaaaaaaaaaaaaaaaaaaaaaaaaaaaaaaaaaaaaaaaaaaaaaaaaaaaaugcaucccccccccccccccccccccccccccccccaaaggcucuuuucagagccaccagaauu

SEQ ID NO: 16440 - RNA, 1994 nt, Artificial Sequence
  mRNA product Design g-4 comprising derived and/or modified sequence from HRSV(Memphis-37)__AIY60640.1__F_DSCav1_mut4 (opt5)
gggagacuccugucgggcggaaguaggaggaguagaguuuaaaaacaguacucuuuuuccgguucgggacguaguugaagcaacgacaagccggauaaccgcucuugagacaggaagcuuaccauggagcugcccauccucaagaccaacgccauuacaacgauccuggcugccgugacccuuugcuucgcgagcucccagaauauuacagaagaguuuuaccaaucuaccuguagcgcugucuccaaaggcuaucugucugcccucagaacagggugguacaccagcguuaucacaauugaacuguccaacaucaaggagaauaaaugcaacggaaccgacgccaaggugaaacuuaucaagcaggaacuggauaaguauaaaaaugcugugacggagcuccagcugcugaugcagucuaccccugccgcuggcagcggguccgccauuuguagcggaaucgcggucugcaaggugcuccaccuggagggcgaaguuaacaaaauuaagaaugcccuucugucuacaaacaaagcuguggucucccucagcaauggggugucuguucugaccuucaaggugcuugaccugaagaacuacaucgauaaacaacuccugccgauucugaauaagcaguccuguagcaucucuaacauugagacagucaucgaauuucagcagaaaaauaaccggcuccuggagaucacccgcgaguucuccgugaaugccggagugacgacacccgucagcaccuauaugcuuacaaacuccgaacugcucucucugauuaacgacaugccuaucaccaaugaucaaaagaaacuuaugagcaacaauguucagauugugagacagcaguccuacagcaucaugugcauuaucaaggaggaagugcuggcuuaugucgugcaacucccccuguacggcguuaucgacaccccuuguuggaaacugcauacaucuccccucugcacgaccaacacaaaggagggcuccaauauuugucugacccggacagaucgcgggugguacugcgacaacgccggaagcgugagcuuuuucccucaggcggaaaccuguaagguccagucuaauagaguguuuugcgauacgaugaacuccagaacacugccgucugagguuaaucucugcaacaucgacauuuucaaucccaaauaugauuguaagaucaugaccagcaaaaccgacguguccagcucugucauuacaucccugggcgccaucgugagcugcuacgggaagaccaaauguacagcuucuaacaagaaucggggaaucauuaagacguuuuccaacggcugcgauuaugucagcaauaaagggguggacaccguuuccgugggaaacacacuuuacugugucaacaagcaagagggcaaaucucuguaugugaagggcgaaccuaucauuaauuucuacgacccccucguuuuuccuagcgaugaguucgacgccuccaucucucaggugaacgaaaagauuaaucagagccuggcuuuuauccgcaaguccgaugagcugcuccacaacgucaauguggggaaaagcaccacaaacauuaugaucaccacgaucauuaucgugauuaucguuauucugcuucugcucaucgccgucggacuguuccuguauugcaaagccagaucuacccccgugacacuuuccaaggaccagcucagcggcaucaauaacauugcuuucucuaauugaggacuaguaauaaggaaacuguaugaaugucugugggcaggaagugaagagauccuucuguaaagguuuuuggaauuaugucugcugaauaauaaacuuuuuugaaauaauaaaucugguagaaaaaugagaucuaaaaaaaaaaaaaaaaaaaaaaaaaaaaaaaaaaaaaaaaaaaaaaaaaaaaaaaaaaaaaaaaugcaucccccccccccccccccccccccccccccccaaaggcucuuuucagagccaccagaauu

SEQ ID NO: 16441 - RNA, 1994 nt, Artificial Sequence
  mRNA product Design g-4 comprising derived and/or modified sequence from HRSV(Memphis-37)__AIY60640.1__F_DSCav1_mut4 (opt6)
gggagacuccugucgggcggaaguaggaggaguagaguuuaaaaacaguacucuuuuuccgguucgggacguaguugaagcaacgacaagccggauaaccgcucuugagacaggaagcuuaccauggaacucccaauccuaaaaacaaacgcaauaacaacaauauuagcagccguaacacucuguuucgccucaucccaaaacauaacagaagaauuuuaucaaucuacauguuccgccgucaguaaaggauaucuaucagccuuaagaacaggcugguacacaucaguaaucaccauagaauuauccaacauaaaagaaaacaaaugcaauggcacagaugccaaaguaaaacuaaucaaacaagaacuugauaaauauaaaaacgcaguaacagaauuacaauuauuaaugcaaagcacaccagccgcaggaucaggaucagcaauauguucaggaauagcagucuguaaaguacuacacuuagaaggagaaguaaacaaaauuaaaaacgcauuacuaagcaccaauaaagcaguaguaucacuaucaaacggcguauccguauuaacguucaaaguccucgaccugaaaaacuacauagauaaacaacuacuaccaauacuaaauaaacaaucaugcucaauaucaaacauagaaacuguuaucgaauuucaacagaaaaauaaccgacuacuagaaaucaccagagaauuuucaguaaacgcaggcgucacuacaccaguauccacauacaugcuaaccaacucggaauuacuuucccucauaaacgacaugccaauaacaaacgaccaaaagaaacuuaugucaaacaacguucaaauaguccgccaacaaucauacucaauaauguguaucauaaaagaagaaguccuagcauaugucguacaacuaccauuauacggaguaauugacacaccuugcuggaaacuacacacauccccacuauguacaacaaacacuaaagaaggaucaaacaucugccuaaccagaacagacagaggcugguauugcgacaacgcaggaucaguaucauucuucccacaagcagaaacaugcaaaguacaaucaaacagagucuucugcgacaccaugaacagcagaacccucccauccgaaguaaacuuaugcaacaucgauaucuucaacccaaaauacgacuguaaaauaaugacaucaaaaacagacguuucauccucaguaauaacaucauuaggugccauaguuucauguuacggaaaaaccaaauguaccgcaucaaacaaaaacagaggcauuauuaaaacauucucuaacggaugcgacuaugucaguaacaaaggaguagacacaguaucagucggaaacacauuauauugcguaaauaaacaagaaggaaaaagucuauacguaaaaggagaaccaauaauaaacuuuuacgacccucucguauucccaucagacgaauuugaugcauccauaucacaagucaacgaaaagauaaaccaaucccuagcauucauaagaaaaucagacgaacuacuccauaacguaaacguaggaaaaagcacaaccaauauaaugauaaccacaauaaucauaguaauaauagucauauuauuacuuuuaauugcaguaggacucuuucuauacugcaaagcaagaagcacaccaguaacacuaagcaaagaccaacuaucaggcaucaacaauaucgccuuuucaaauuaaggacuaguaauaaggaaacuguaugaaugucugugggcaggaagugaagagauccuucuguaaagguuuuuggaauuaugucugcugaauaauaaacuuuuuugaaauaauaaaucugguagaaaaaugagaucuaaaaaaaaaaaaaaaaaaaaaaaaaaaaaaaaaaaaaaaaaaaaaaaaaaaaaaaaaaaaaaaaugcaucccccccccccccccccccccccccccccccaaaggcucuuuucagagccaccagaauu

SEQ ID NO: 16442 - RNA, 1994 nt, Artificial Sequence
  mRNA product Design g-4 comprising derived and/or modified sequence from HRSV(Memphis-37)__AIY60640.1__F_DSCav1_mut4 (opt11)
gggagacuccugucgggcggaaguaggaggaguagaguuuaaaaacaguacucuuuuuccgguucgggacguaguugaagcaacgacaagccggauaaccgcucuugagacaggaagcuuaccauggagcugcccauccucaagaccaacgccaucaccacgauccuggccgcggugacccugugcuucgcgagcucccagaacaucaccgaggaguucuaccagagcacgugcuccgccgucagcaagggcuaccucuccgcccugcgcaccgggugguacaccagcgugaucaccaucgagcuguccaacaucaaggagaacaagugcaacggcaccgacgccaaggugaaacucaucaagcaggagcuggacaaguacaagaacgccgucaccgagcugcagcuccugaugcagagcaccccggccgccggguccggcagcgcuaucugcuccgggaucgcggugugcaaggugcugcaccucgagggcgaggucaacaagaucaagaaugcccugcugagcaccaacaaggccguggugucccucagcaacggagucagcgugcuuaccuucaaggugcuggaccucaagaacuacaucgacaagcagcugcugccuauccucaacaagcagagcugcuccaucagcaacaucgagacggucaucgaguuccagcagaagaacaaccggcugcuggagaucacccgcgaguucuccgugaacgccggggugaccacccccgucagcacguacaugcucaccaacagcgaacugcugucccucaucaacgacaugcccaucaccaacgaccagaagaagcugaugagcaacaacgugcagaucgugcggcagcaguccuacagcaucaugugcaucaucaaggaggaaguccuggccuacguggugcagcucccucuguacggcgucaucgacacccccugcuggaagcugcacacgagcccccucugcaccaccaacaccaaggagggguccaacaucugccugacgcgcaccgaccggggcugguacugcgacaacgcgggguccgugagcuucuucccccaggccgagaccugcaaggugcagagcaaccgcgucuucugcgacacuaugaacagcagaacgcucccguccgaggugaaccugugcaacauagacauauucaaccccaaguacgacugcaagaucaugaccagcaagaccgacgucuccagcuccgugauuaccagccugggcgcaaucguguccugcuacggcaagacgaagugcaccgccagcaacaagaaccgggggaucaucaagaccuucuccaacggcugcgacuaugucagcaacaaggggguggacaccgugagcgucggaaacacgcucuacugcgugaacaagcaagagggcaaguccuuauacgugaagggggagcccaucaucaacuucuacgacccccuggucuucccgagcgacgaguucgacgccagcauaagccaggugaacgagaagaucaaccagucccucgcguucauccgcaagagcgacgagcugcugcacaacgugaacgucggcaaguccaccaccaacaucaugaucaccaccaucaucaucgugaucaucgugauccuccugcugcucaucgccgucgggcuguuccuguacugcaaggcccggagcacgcccgugaccuuguccaaggaccagcucagcggcaucaacaacaucgccuucuccaacugaggacuaguaauaaggaaacuguaugaaugucugugggcaggaagugaagagauccuucuguaaagguuuuuggaauuaugucugcugaauaauaaacuuuuuugaaauaauaaaucugguagaaaaaugagaucuaaaaaaaaaaaaaaaaaaaaaaaaaaaaaaaaaaaaaaaaaaaaaaaaaaaaaaaaaaaaaaaaugcaucccccccccccccccccccccccccccccccaaaggcucuuuucagagccaccagaauu

SEQ ID NO: 16443 - RNA, 1970 nt, Artificial Sequence
  mRNA product Design g-5 comprising derived and/or modified sequence from HRSV(Memphis-37)__AIY60640.1__F_DSCav1_mut4 (opt1)
gggagacccgugacccggaaguuguacggcuacgcgacuuucccucccacaaacccucgcgcccuuccuuuccuacuugggcccggcagaaagcuuaccauggagcugcccauccucaagaccaacgccaucaccacgauccuggccgcggugacccugugcuucgccagcucccagaacaucaccgaggaguucuaccagagcacgugcuccgccgucagcaagggcuaccucuccgcccugcgcaccgggugguacaccagcgugaucaccaucgagcuguccaacaucaaggagaacaagugcaacggcaccgacgccaaggugaagcucaucaagcaggagcuggacaaguacaagaacgcggucacggagcugcagcuccugaugcagagcaccccggccgccggcuccgggagcgcgaucugcuccggcaucgccgucugcaaggugcugcaccucgagggcgaggugaacaagaucaagaacgcccugcuguccaccaacaaggccgucgugagccucuccaacggggugagcguccugaccuucaaggugcuggaccucaagaacuacaucgacaagcagcugcugcccauccugaacaagcagagcugcuccaucagcaacaucgagaccgucaucgaguuccagcagaagaacaaccgccuccuggagaucacgcgggaguucagcgugaacgcgggcgugaccacccccgucuccaccuacaugcugacgaacagcgagcuccugucccugaucaacgacaugccgaucaccaacgaccagaagaagcucaugagcaacaacgugcagaucgugcgccagcaguccuacagcaucaugugcaucaucaaggaggagguccuggccuacguggugcagcugccccucuacggggucaucgacacccccugcuggaagcugcacaccagcccccugugcacgaccaacaccaaggagggcuccaacaucugccucacccggacggaccgcgggugguacugcgacaacgccggcagcguguccuucuucccgcaggccgagaccugcaagguccagagcaaccggguguucugcgacaccaugaacucccggacccugcccagcgaggugaaccucugcaacaucgacaucuucaaccccaaguacgacugcaagaucaugacguccaagaccgacgucagcuccagcgugaucaccucccugggcgccaucgugagcugcuacgggaagaccaagugcacggcgagcaacaagaaccgcggcaucaucaagaccuucuccaacgggugcgacuacgucagcaacaagggcguggacaccguguccgucggcaacacccuguacugcgugaacaagcaggagggcaagagccucuacgugaagggggagcccaucaucaacuucuacgacccgcuggucuuccccuccgacgaguucgacgccagcaucucccaggugaacgagaagaucaaccagagccuggccuucauccggaaguccgacgagcuccugcacaacgugaacgucggcaagagcaccacgaacaucaugaucaccaccaucaucaucgugaucaucgugauccugcugcuccugaucgccgucgggcuguuccucuacugcaaggcccgcuccacccccgugacgcugagcaaggaccagcuguccgggaucaacaacaucgcguucagcaacugaggacuaguaauaaggaaacuguaugaaugucugugggcaggaagugaagagauccuucuguaaagguuuuuggaauuaugucugcugaauaauaaacuuuuuugaaauaauaaaucugguagaaaaaugagaucuaaaaaaaaaaaaaaaaaaaaaaaaaaaaaaaaaaaaaaaaaaaaaaaaaaaaaaaaaaaaaaaaugcaucccccccccccccccccccccccccccccccaaaggcucuuuucagagccaccagaauu

SEQ ID NO: 16444 - RNA, 1970 nt, Artificial Sequence
  mRNA product Design g-5 comprising derived and/or modified sequence from HRSV(Memphis-37)__AIY60640.1__F_DSCav1_mut4 (opt1)
gggagacccgugacccggaaguuguacggcuacgcgacuuucccucccacaaacccucgcgcccuuccuuuccuacuugggcccggcagaaagcuuaccauggagcugcccauccucaagaccaacgccaucaccacgauccuggccgcggugacccugugcuucgccagcucccagaacaucaccgaggaguucuaccagagcacgugcuccgccgucagcaagggcuaccucuccgcccugcgcaccgggugguacaccagcgugaucaccaucgagcuguccaacaucaaggagaacaagugcaacggcaccgacgccaaggugaagcucaucaagcaggagcuggacaaguacaagaacgcggucacggagcugcagcuccugaugcagagcaccccggccgccggguccggcagcgccaucugcuccgggaucgcggugugcaaggugcugcaccucgagggcgaggucaacaagaucaagaacgcccugcugagcaccaacaaggccguggugucccucagcaacggcgucuccgugcugaccuucaaggugcuggaccucaagaacuacaucgacaagcagcugcugcccauccucaacaagcagagcugcuccaucagcaacaucgagacggucaucgaguuccagcagaagaacaaccggcugcuggagaucacccgcgaguucuccgugaacgccggggugaccacccccgucagcacguacaugcucaccaacagcgagcugcugucccucaucaacgacaugcccaucaccaacgaccagaagaagcugaugagcaacaacgugcagaucgugcggcagcaguccuacagcaucaugugcaucaucaaggaggagguccuggccuacguggugcagcucccgcuguacggcgucaucgacacccccugcuggaagcugcacacgagcccccucugcaccaccaacaccaaggagggguccaacaucugccugacgcgcaccgaccggggcugguacugcgacaacgcgggguccgugagcuucuucccccaggccgagaccugcaaggugcaguccaaccgcgucuucugcgacaccaugaacagccggacgcucccguccgaggugaaccugugcaacaucgacaucuucaaccccaaguacgacugcaagaucaugaccagcaagaccgacgucuccagcuccgugaucaccagccugggcgccaucguguccugcuacggcaagacgaagugcaccgccagcaacaagaaccgggggaucaucaagaccuucuccaacggcugcgacuacgucagcaacaaggggguggacaccgugagcgucggcaacacgcucuacugcgugaacaagcaggagggcaagucccuguacgugaagggggagcccaucaucaacuucuacgacccccuggucuucccgagcgacgaguucgacgccuccaucagccaggugaacgagaagaucaaccagucccucgcguucauccgcaagagcgacgagcugcugcacaacgugaacgucggcaaguccaccaccaacaucaugaucaccaccaucaucaucgugaucaucgugauccuccugcugcucaucgccgucgggcuguuccuguacugcaaggcccggagcacgcccgugacccuguccaaggaccagcucagcggcaucaacaacaucgccuucuccaacugaggacuaguaauaaggaaacuguaugaaugucugugggcaggaagugaagagauccuucuguaaagguuuuuggaauuaugucugcugaauaauaaacuuuuuugaaauaauaaaucugguagaaaaaugagaucuaaaaaaaaaaaaaaaaaaaaaaaaaaaaaaaaaaaaaaaaaaaaaaaaaaaaaaaaaaaaaaaaugcaucccccccccccccccccccccccccccccccaaaggcucuuuucagagccaccagaauu

SEQ ID NO: 16445 - RNA, 1970 nt, Artificial Sequence
  mRNA product Design g-5 comprising derived and/or modified sequence from HRSV(Memphis-37)__AIY60640.1__F_DSCav1_mut4 (opt2)
gggagacccgugacccggaaguuguacggcuacgcgacuuucccucccacaaacccucgcgcccuuccuuuccuacuugggcccggcagaaagcuuaccauggagcuccccauccucaagaccaacgccaucaccaccauccucgccgccgucacccucugcuucgccuccucccagaacaucaccgaggaguucuaccaguccaccugcuccgccgucuccaagggcuaccucuccgcccuccgcaccggcugguacaccuccgucaucaccaucgagcucuccaacaucaaggagaacaagugcaacggcaccgacgccaaggucaagcucaucaagcaggagcucgacaaguacaagaacgccgucaccgagcuccagcuccucaugcaguccacccccgccgccggcuccggcuccgccaucugcuccggcaucgccgucugcaagguccuccaccucgagggcgaggucaacaagaucaagaacgcccuccucuccaccaacaaggccgucgucucccucuccaacggcgucuccguccucaccuucaagguccucgaccucaagaacuacaucgacaagcagcuccuccccauccucaacaagcaguccugcuccaucuccaacaucgagaccgucaucgaguuccagcagaagaacaaccgccuccucgagaucacccgcgaguucuccgucaacgccggcgucaccacccccgucuccaccuacaugcucaccaacuccgagcuccucucccucaucaacgacaugcccaucaccaacgaccagaagaagcucauguccaacaacguccagaucguccgccagcaguccuacuccaucaugugcaucaucaaggaggagguccucgccuacgucguccagcucccccucuacggcgucaucgacacccccugcuggaagcuccacaccuccccccucugcaccaccaacaccaaggagggcuccaacaucugccucacccgcaccgaccgcggcugguacugcgacaacgccggcuccgucuccuucuucccccaggccgagaccugcaagguccaguccaaccgcgucuucugcgacaccaugaacucccgcacccuccccuccgaggucaaccucugcaacaucgacaucuucaaccccaaguacgacugcaagaucaugaccuccaagaccgacgucuccuccuccgucaucaccucccucggcgccaucgucuccugcuacggcaagaccaagugcaccgccuccaacaagaaccgcggcaucaucaagaccuucuccaacggcugcgacuacgucuccaacaagggcgucgacaccgucuccgucggcaacacccucuacugcgucaacaagcaggagggcaagucccucuacgucaagggcgagcccaucaucaacuucuacgacccccucgucuuccccuccgacgaguucgacgccuccaucucccaggucaacgagaagaucaaccagucccucgccuucauccgcaaguccgacgagcuccuccacaacgucaacgucggcaaguccaccaccaacaucaugaucaccaccaucaucaucgucaucaucgucauccuccuccuccucaucgccgucggccucuuccucuacugcaaggcccgcuccacccccgucacccucuccaaggaccagcucuccggcaucaacaacaucgccuucuccaacugaggacuaguaauaaggaaacuguaugaaugucugugggcaggaagugaagagauccuucuguaaagguuuuuggaauuaugucugcugaauaauaaacuuuuuugaaauaauaaaucugguagaaaaaugagaucuaaaaaaaaaaaaaaaaaaaaaaaaaaaaaaaaaaaaaaaaaaaaaaaaaaaaaaaaaaaaaaaaugcaucccccccccccccccccccccccccccccccaaaggcucuuuucagagccaccagaauu

SEQ ID NO: 16446 - RNA, 1970 nt, Artificial Sequence
  mRNA product Design g-5 comprising derived and/or modified sequence from HRSV(Memphis-37)__AIY60640.1__F_DSCav1_mut4 (opt3)
gggagacccgugacccggaaguuguacggcuacgcgacuuucccucccacaaacccucgcgcccuuccuuuccuacuugggcccggcagaaagcuuaccauggagcugcccauccucaagaccaacgccauuacaacuauacuugcugcagugacgcugugcuucgccagcucccagaauaucaccgaagaguuuuaccaaucuacauguucagcggucaguaaaggcuauuugagcgcuuuaagaacugggugguacaccuccguuauuacaaucgaacugucuaacauuaaggagaauaaaugcaacggaaccgacgccaaggugaaacuaaucaagcaggaacucgauaaguauaaaaaugcaguaacugagcugcagcuucugaugcagucgaccccugccgcugguucaggcagcgcaauauguagugggaucgccgugugcaaggucuugcaccucgagggagaagugaacaaaauuaagaaugcucugcuguccacaaacaaagccguugugucucucagcaauggcgucuccguguuaacguucaagguacuggaccuuaagaacuacaucgauaaacaauugcugccaauucuaaauaagcagucauguaguaucagcaacauagagacuguuauugaauuucagcagaaaaauaacaggcuccuggagaucacccgggaguucucugugaaugcgggugucacaacuccgguguccaccuauaugcuuacaaacucagaacuguugagccucauuaacgacaugcccaucaccaaugaucaaaagaaacugaugaguaacaaugugcagaucguccgccagcagucuuacuccauuaugugcauaaucaaggaggaaguuuuagcauaugugguacaacugccucucuacggggugauugacacgccauguuggaaacuucauacuagcccccugugcacaaccaacacuaaggagggaucgaauaucuguuugacacgaaccgaucguggcugguacugcgacaacgccggcucugucuccuuuuucccucaggcugaaacguguaaggugcagucaaauagaguguuuugcgauaccaugaacaguagaacacugccaagcgaggugaaucucugcaacauagacauuuucaaucccaaauaugauuguaagaucaugacuuccaaaaccgacgucucuagcucagugaucacaagucugggggccauuguauccugcuacggaaagacuaaauguaccgcaagcaacaagaauagggguaucauuaagacauuuucuaacggcugcgauuauguuucaaauaaagggguggacaccgucagugugggaaacacucuuuacugugucaacaagcaagagggcaaaagccuguaugugaagggugaaccuauaaucaauuucuacgacccauugguuuuuccguccgaugaguucgacgcuucuauuucgcagguuaacgagaaaaucaaucagagccucgccuuuauccggaaguccgaugaacuguuacacaacguaaaugucgggaagucaacgacaaacauuaugauaaccacuaucauuaucgugauuaucguuauacugcuacuccugaucgcggugggacuuuucuuguauugcaaagcccgcaguacccccgucacacugucuaaggaccagcucagcggcauuaauaacaucgcauucuccaauugaggacuaguaauaaggaaacuguaugaaugucugugggcaggaagugaagagauccuucuguaaagguuuuuggaauuaugucugcugaauaauaaacuuuuuugaaauaauaaaucugguagaaaaaugagaucuaaaaaaaaaaaaaaaaaaaaaaaaaaaaaaaaaaaaaaaaaaaaaaaaaaaaaaaaaaaaaaaaugcaucccccccccccccccccccccccccccccccaaaggcucuuuucagagccaccagaauu

SEQ ID NO: 16447 - RNA, 1970 nt, Artificial Sequence
  mRNA product Design g-5 comprising derived and/or modified sequence from HRSV(Memphis-37)__AIY60640.1__F_DSCav1_mut4 (opt4)
gggagacccgugacccggaaguuguacggcuacgcgacuuucccucccacaaacccucgcgcccuuccuuuccuacuugggcccggcagaaagcuuaccauggagcugcccauccugaagaccaacgccaucaccaccauccuggccgccgugacccugugcuucgccagcagccagaacaucaccgaggaguucuaccagagcaccugcagcgccgugagcaagggcuaccugagcgcccugagaaccggcugguacaccagcgugaucaccaucgagcugagcaacaucaaggagaacaagugcaacggcaccgacgccaaggugaagcugaucaagcaggagcuggacaaguacaagaacgccgugaccgagcugcagcugcugaugcagagcacccccgccgccggcagcggcagcgccaucugcagcggcaucgccgugugcaaggugcugcaccuggagggcgaggugaacaagaucaagaacgcccugcugagcaccaacaaggccguggugagccugagcaacggcgugagcgugcugaccuucaaggugcuggaccugaagaacuacaucgacaagcagcugcugcccauccugaacaagcagagcugcagcaucagcaacaucgagaccgugaucgaguuccagcagaagaacaacagacugcuggagaucaccagagaguucagcgugaacgccggcgugaccacccccgugagcaccuacaugcugaccaacagcgagcugcugagccugaucaacgacaugcccaucaccaacgaccagaagaagcugaugagcaacaacgugcagaucgugagacagcagagcuacagcaucaugugcaucaucaaggaggaggugcuggccuacguggugcagcugccccuguacggcgugaucgacacccccugcuggaagcugcacaccagcccccugugcaccaccaacaccaaggagggcagcaacaucugccugaccagaaccgacagaggcugguacugcgacaacgccggcagcgugagcuucuucccccaggccgagaccugcaaggugcagagcaacagaguguucugcgacaccaugaacagcagaacccugcccagcgaggugaaccugugcaacaucgacaucuucaaccccaaguacgacugcaagaucaugaccagcaagaccgacgugagcagcagcgugaucaccagccugggcgccaucgugagcugcuacggcaagaccaagugcaccgccagcaacaagaacagaggcaucaucaagaccuucagcaacggcugcgacuacgugagcaacaagggcguggacaccgugagcgugggcaacacccuguacugcgugaacaagcaggagggcaagagccuguacgugaagggcgagcccaucaucaacuucuacgacccccugguguuccccagcgacgaguucgacgccagcaucagccaggugaacgagaagaucaaccagagccuggccuucaucagaaagagcgacgagcugcugcacaacgugaacgugggcaagagcaccaccaacaucaugaucaccaccaucaucaucgugaucaucgugauccugcugcugcugaucgccgugggccuguuccuguacugcaaggccagaagcacccccgugacccugagcaaggaccagcugagcggcaucaacaacaucgccuucagcaacugaggacuaguaauaaggaaacuguaugaaugucugugggcaggaagugaagagauccuucuguaaagguuuuuggaauuaugucugcugaauaauaaacuuuuuugaaauaauaaaucugguagaaaaaugagaucuaaaaaaaaaaaaaaaaaaaaaaaaaaaaaaaaaaaaaaaaaaaaaaaaaaaaaaaaaaaaaaaaugcaucccccccccccccccccccccccccccccccaaaggcucuuuucagagccaccagaauu

SEQ ID NO: 16448 - RNA, 1970 nt, Artificial Sequence
  mRNA product Design g-5 comprising derived and/or modified sequence from HRSV(Memphis-37)__AIY60640.1__F_DSCav1_mut4 (opt5)
gggagacccgugacccggaaguuguacggcuacgcgacuuucccucccacaaacccucgcgcccuuccuuuccuacuugggcccggcagaaagcuuaccauggagcugcccauccucaagaccaacgccauuacaacgauccuggcugccgugacccuuugcuucgcgagcucccagaauauuacagaagaguuuuaccaaucuaccuguagcgcugucuccaaaggcuaucugucugcccucagaacagggugguacaccagcguuaucacaauugaacuguccaacaucaaggagaauaaaugcaacggaaccgacgccaaggugaaacuuaucaagcaggaacuggauaaguauaaaaaugcugugacggagcuccagcugcugaugcagucuaccccugccgcuggcagcggguccgccauuuguagcggaaucgcggucugcaaggugcuccaccuggagggcgaaguuaacaaaauuaagaaugcccuucugucuacaaacaaagcuguggucucccucagcaauggggugucuguucugaccuucaaggugcuugaccugaagaacuacaucgauaaacaacuccugccgauucugaauaagcaguccuguagcaucucuaacauugagacagucaucgaauuucagcagaaaaauaaccggcuccuggagaucacccgcgaguucuccgugaaugccggagugacgacacccgucagcaccuauaugcuuacaaacuccgaacugcucucucugauuaacgacaugccuaucaccaaugaucaaaagaaacuuaugagcaacaauguucagauugugagacagcaguccuacagcaucaugugcauuaucaaggaggaagugcuggcuuaugucgugcaacucccccuguacggcguuaucgacaccccuuguuggaaacugcauacaucuccccucugcacgaccaacacaaaggagggcuccaauauuugucugacccggacagaucgcgggugguacugcgacaacgccggaagcgugagcuuuuucccucaggcggaaaccuguaagguccagucuaauagaguguuuugcgauacgaugaacuccagaacacugccgucugagguuaaucucugcaacaucgacauuuucaaucccaaauaugauuguaagaucaugaccagcaaaaccgacguguccagcucugucauuacaucccugggcgccaucgugagcugcuacgggaagaccaaauguacagcuucuaacaagaaucggggaaucauuaagacguuuuccaacggcugcgauuaugucagcaauaaagggguggacaccguuuccgugggaaacacacuuuacugugucaacaagcaagagggcaaaucucuguaugugaagggcgaaccuaucauuaauuucuacgacccccucguuuuuccuagcgaugaguucgacgccuccaucucucaggugaacgaaaagauuaaucagagccuggcuuuuauccgcaaguccgaugagcugcuccacaacgucaauguggggaaaagcaccacaaacauuaugaucaccacgaucauuaucgugauuaucguuauucugcuucugcucaucgccgucggacuguuccuguauugcaaagccagaucuacccccgugacacuuuccaaggaccagcucagcggcaucaauaacauugcuuucucuaauugaggacuaguaauaaggaaacuguaugaaugucugugggcaggaagugaagagauccuucuguaaagguuuuuggaauuaugucugcugaauaauaaacuuuuuugaaauaauaaaucugguagaaaaaugagaucuaaaaaaaaaaaaaaaaaaaaaaaaaaaaaaaaaaaaaaaaaaaaaaaaaaaaaaaaaaaaaaaaugcaucccccccccccccccccccccccccccccccaaaggcucuuuucagagccaccagaauu

SEQ ID NO: 16449 - RNA, 1970 nt, Artificial Sequence
  mRNA product Design g-5 comprising derived and/or modified sequence from HRSV(Memphis-37)__AIY60640.1__F_DSCav1_mut4 (opt6)
gggagacccgugacccggaaguuguacggcuacgcgacuuucccucccacaaacccucgcgcccuuccuuuccuacuugggcccggcagaaagcuuaccauggaacucccaauccuaaaaacaaacgcaauaacaacaauauuagcagccguaacacucuguuucgccucaucccaaaacauaacagaagaauuuuaucaaucuacauguuccgccgucaguaaaggauaucuaucagccuuaagaacaggcugguacacaucaguaaucaccauagaauuauccaacauaaaagaaaacaaaugcaauggcacagaugccaaaguaaaacuaaucaaacaagaacuugauaaauauaaaaacgcaguaacagaauuacaauuauuaaugcaaagcacaccagccgcaggaucaggaucagcaauauguucaggaauagcagucuguaaaguacuacacuuagaaggagaaguaaacaaaauuaaaaacgcauuacuaagcaccaauaaagcaguaguaucacuaucaaacggcguauccguauuaacguucaaaguccucgaccugaaaaacuacauagauaaacaacuacuaccaauacuaaauaaacaaucaugcucaauaucaaacauagaaacuguuaucgaauuucaacagaaaaauaaccgacuacuagaaaucaccagagaauuuucaguaaacgcaggcgucacuacaccaguauccacauacaugcuaaccaacucggaauuacuuucccucauaaacgacaugccaauaacaaacgaccaaaagaaacuuaugucaaacaacguucaaauaguccgccaacaaucauacucaauaauguguaucauaaaagaagaaguccuagcauaugucguacaacuaccauuauacggaguaauugacacaccuugcuggaaacuacacacauccccacuauguacaacaaacacuaaagaaggaucaaacaucugccuaaccagaacagacagaggcugguauugcgacaacgcaggaucaguaucauucuucccacaagcagaaacaugcaaaguacaaucaaacagagucuucugcgacaccaugaacagcagaacccucccauccgaaguaaacuuaugcaacaucgauaucuucaacccaaaauacgacuguaaaauaaugacaucaaaaacagacguuucauccucaguaauaacaucauuaggugccauaguuucauguuacggaaaaaccaaauguaccgcaucaaacaaaaacagaggcauuauuaaaacauucucuaacggaugcgacuaugucaguaacaaaggaguagacacaguaucagucggaaacacauuauauugcguaaauaaacaagaaggaaaaagucuauacguaaaaggagaaccaauaauaaacuuuuacgacccucucguauucccaucagacgaauuugaugcauccauaucacaagucaacgaaaagauaaaccaaucccuagcauucauaagaaaaucagacgaacuacuccauaacguaaacguaggaaaaagcacaaccaauauaaugauaaccacaauaaucauaguaauaauagucauauuauuacuuuuaauugcaguaggacucuuucuauacugcaaagcaagaagcacaccaguaacacuaagcaaagaccaacuaucaggcaucaacaauaucgccuuuucaaauuaaggacuaguaauaaggaaacuguaugaaugucugugggcaggaagugaagagauccuucuguaaagguuuuuggaauuaugucugcugaauaauaaacuuuuuugaaauaauaaaucugguagaaaaaugagaucuaaaaaaaaaaaaaaaaaaaaaaaaaaaaaaaaaaaaaaaaaaaaaaaaaaaaaaaaaaaaaaaaugcaucccccccccccccccccccccccccccccccaaaggcucuuuucagagccaccagaauu

SEQ ID NO: 16450 - RNA, 1970 nt, Artificial Sequence
  mRNA product Design g-5 comprising derived and/or modified sequence from HRSV(Memphis-37)__AIY60640.1__F_DSCav1_mut4 (opt11)
gggagacccgugacccggaaguuguacggcuacgcgacuuucccucccacaaacccucgcgcccuuccuuuccuacuugggcccggcagaaagcuuaccauggagcugcccauccucaagaccaacgccaucaccacgauccuggccgcggugacccugugcuucgcgagcucccagaacaucaccgaggaguucuaccagagcacgugcuccgccgucagcaagggcuaccucuccgcccugcgcaccgggugguacaccagcgugaucaccaucgagcuguccaacaucaaggagaacaagugcaacggcaccgacgccaaggugaaacucaucaagcaggagcuggacaaguacaagaacgccgucaccgagcugcagcuccugaugcagagcaccccggccgccggguccggcagcgcuaucugcuccgggaucgcggugugcaaggugcugcaccucgagggcgaggucaacaagaucaagaaugcccugcugagcaccaacaaggccguggugucccucagcaacggagucagcgugcuuaccuucaaggugcuggaccucaagaacuacaucgacaagcagcugcugccuauccucaacaagcagagcugcuccaucagcaacaucgagacggucaucgaguuccagcagaagaacaaccggcugcuggagaucacccgcgaguucuccgugaacgccggggugaccacccccgucagcacguacaugcucaccaacagcgaacugcugucccucaucaacgacaugcccaucaccaacgaccagaagaagcugaugagcaacaacgugcagaucgugcggcagcaguccuacagcaucaugugcaucaucaaggaggaaguccuggccuacguggugcagcucccucuguacggcgucaucgacacccccugcuggaagcugcacacgagcccccucugcaccaccaacaccaaggagggguccaacaucugccugacgcgcaccgaccggggcugguacugcgacaacgcgggguccgugagcuucuucccccaggccgagaccugcaaggugcagagcaaccgcgucuucugcgacacuaugaacagcagaacgcucccguccgaggugaaccugugcaacauagacauauucaaccccaaguacgacugcaagaucaugaccagcaagaccgacgucuccagcuccgugauuaccagccugggcgcaaucguguccugcuacggcaagacgaagugcaccgccagcaacaagaaccgggggaucaucaagaccuucuccaacggcugcgacuaugucagcaacaaggggguggacaccgugagcgucggaaacacgcucuacugcgugaacaagcaagagggcaaguccuuauacgugaagggggagcccaucaucaacuucuacgacccccuggucuucccgagcgacgaguucgacgccagcauaagccaggugaacgagaagaucaaccagucccucgcguucauccgcaagagcgacgagcugcugcacaacgugaacgucggcaaguccaccaccaacaucaugaucaccaccaucaucaucgugaucaucgugauccuccugcugcucaucgccgucgggcuguuccuguacugcaaggcccggagcacgcccgugaccuuguccaaggaccagcucagcggcaucaacaacaucgccuucuccaacugaggacuaguaauaaggaaacuguaugaaugucugugggcaggaagugaagagauccuucuguaaagguuuuuggaauuaugucugcugaauaauaaacuuuuuugaaauaauaaaucugguagaaaaaugagaucuaaaaaaaaaaaaaaaaaaaaaaaaaaaaaaaaaaaaaaaaaaaaaaaaaaaaaaaaaaaaaaaaugcaucccccccccccccccccccccccccccccccaaaggcucuuuucagagccaccagaauu

SEQ ID NO: 16451 - RNA, 1986 nt, Artificial Sequence
  mRNA product Design h-1 comprising derived and/or modified sequence from HRSV(Memphis-37)__AIY60640.1__F_DSCav1_mut4 (opt1)
gggagacccgugacccggaaguuguacggcuacgcgacuuucccucccacaaacccucgcgcccuuccuuuccuacuugggcccggcagaaagcuuaccauggagcugcccauccucaagaccaacgccaucaccacgauccuggccgcggugacccugugcuucgccagcucccagaacaucaccgaggaguucuaccagagcacgugcuccgccgucagcaagggcuaccucuccgcccugcgcaccgggugguacaccagcgugaucaccaucgagcuguccaacaucaaggagaacaagugcaacggcaccgacgccaaggugaagcucaucaagcaggagcuggacaaguacaagaacgcggucacggagcugcagcuccugaugcagagcaccccggccgccggcuccgggagcgcgaucugcuccggcaucgccgucugcaaggugcugcaccucgagggcgaggugaacaagaucaagaacgcccugcuguccaccaacaaggccgucgugagccucuccaacggggugagcguccugaccuucaaggugcuggaccucaagaacuacaucgacaagcagcugcugcccauccugaacaagcagagcugcuccaucagcaacaucgagaccgucaucgaguuccagcagaagaacaaccgccuccuggagaucacgcgggaguucagcgugaacgcgggcgugaccacccccgucuccaccuacaugcugacgaacagcgagcuccugucccugaucaacgacaugccgaucaccaacgaccagaagaagcucaugagcaacaacgugcagaucgugcgccagcaguccuacagcaucaugugcaucaucaaggaggagguccuggccuacguggugcagcugccccucuacggggucaucgacacccccugcuggaagcugcacaccagcccccugugcacgaccaacaccaaggagggcuccaacaucugccucacccggacggaccgcgggugguacugcgacaacgccggcagcguguccuucuucccgcaggccgagaccugcaagguccagagcaaccggguguucugcgacaccaugaacucccggacccugcccagcgaggugaaccucugcaacaucgacaucuucaaccccaaguacgacugcaagaucaugacguccaagaccgacgucagcuccagcgugaucaccucccugggcgccaucgugagcugcuacgggaagaccaagugcacggcgagcaacaagaaccgcggcaucaucaagaccuucuccaacgggugcgacuacgucagcaacaagggcguggacaccguguccgucggcaacacccuguacugcgugaacaagcaggagggcaagagccucuacgugaagggggagcccaucaucaacuucuacgacccgcuggucuuccccuccgacgaguucgacgccagcaucucccaggugaacgagaagaucaaccagagccuggccuucauccggaaguccgacgagcuccugcacaacgugaacgucggcaagagcaccacgaacaucaugaucaccaccaucaucaucgugaucaucgugauccugcugcuccugaucgccgucgggcuguuccucuacugcaaggcccgcuccacccccgugacgcugagcaaggaccagcuguccgggaucaacaacaucgcguucagcaacugaggacuaguacuggcugcaucucccuuuccucuguccuccauccuucucccaggauggugaagggggaccugguacccagugauccccaccccaggauccuaaaucaugacuuaccugcuaauaaaaacucauuggaaaagugagaagaucuaaaaaaaaaaaaaaaaaaaaaaaaaaaaaaaaaaaaaaaaaaaaaaaaaaaaaaaaaaaaaaaaugcaucccccccccccccccccccccccccccccccaaaggcucuuuucagagccaccagaauu

SEQ ID NO: 16452 - RNA, 1986 nt, Artificial Sequence
  mRNA product Design h-1 comprising derived and/or modified sequence from HRSV(Memphis-37)__AIY60640.1__F_DSCav1_mut4 (opt1)
gggagacccgugacccggaaguuguacggcuacgcgacuuucccucccacaaacccucgcgcccuuccuuuccuacuugggcccggcagaaagcuuaccauggagcugcccauccucaagaccaacgccaucaccacgauccuggccgcggugacccugugcuucgccagcucccagaacaucaccgaggaguucuaccagagcacgugcuccgccgucagcaagggcuaccucuccgcccugcgcaccgggugguacaccagcgugaucaccaucgagcuguccaacaucaaggagaacaagugcaacggcaccgacgccaaggugaagcucaucaagcaggagcuggacaaguacaagaacgcggucacggagcugcagcuccugaugcagagcaccccggccgccggguccggcagcgccaucugcuccgggaucgcggugugcaaggugcugcaccucgagggcgaggucaacaagaucaagaacgcccugcugagcaccaacaaggccguggugucccucagcaacggcgucuccgugcugaccuucaaggugcuggaccucaagaacuacaucgacaagcagcugcugcccauccucaacaagcagagcugcuccaucagcaacaucgagacggucaucgaguuccagcagaagaacaaccggcugcuggagaucacccgcgaguucuccgugaacgccggggugaccacccccgucagcacguacaugcucaccaacagcgagcugcugucccucaucaacgacaugcccaucaccaacgaccagaagaagcugaugagcaacaacgugcagaucgugcggcagcaguccuacagcaucaugugcaucaucaaggaggagguccuggccuacguggugcagcucccgcuguacggcgucaucgacacccccugcuggaagcugcacacgagcccccucugcaccaccaacaccaaggagggguccaacaucugccugacgcgcaccgaccggggcugguacugcgacaacgcgggguccgugagcuucuucccccaggccgagaccugcaaggugcaguccaaccgcgucuucugcgacaccaugaacagccggacgcucccguccgaggugaaccugugcaacaucgacaucuucaaccccaaguacgacugcaagaucaugaccagcaagaccgacgucuccagcuccgugaucaccagccugggcgccaucguguccugcuacggcaagacgaagugcaccgccagcaacaagaaccgggggaucaucaagaccuucuccaacggcugcgacuacgucagcaacaaggggguggacaccgugagcgucggcaacacgcucuacugcgugaacaagcaggagggcaagucccuguacgugaagggggagcccaucaucaacuucuacgacccccuggucuucccgagcgacgaguucgacgccuccaucagccaggugaacgagaagaucaaccagucccucgcguucauccgcaagagcgacgagcugcugcacaacgugaacgucggcaaguccaccaccaacaucaugaucaccaccaucaucaucgugaucaucgugauccuccugcugcucaucgccgucgggcuguuccuguacugcaaggcccggagcacgcccgugacccuguccaaggaccagcucagcggcaucaacaacaucgccuucuccaacugaggacuaguacuggcugcaucucccuuuccucuguccuccauccuucucccaggauggugaagggggaccugguacccagugauccccaccccaggauccuaaaucaugacuuaccugcuaauaaaaacucauuggaaaagugagaagaucuaaaaaaaaaaaaaaaaaaaaaaaaaaaaaaaaaaaaaaaaaaaaaaaaaaaaaaaaaaaaaaaaugcaucccccccccccccccccccccccccccccccaaaggcucuuuucagagccaccagaauu

SEQ ID NO: 16453 - RNA, 1986 nt, Artificial Sequence
  mRNA product Design h-1 comprising derived and/or modified sequence from HRSV(Memphis-37)__AIY60640.1__F_DSCav1_mut4 (opt2)
gggagacccgugacccggaaguuguacggcuacgcgacuuucccucccacaaacccucgcgcccuuccuuuccuacuugggcccggcagaaagcuuaccauggagcuccccauccucaagaccaacgccaucaccaccauccucgccgccgucacccucugcuucgccuccucccagaacaucaccgaggaguucuaccaguccaccugcuccgccgucuccaagggcuaccucuccgcccuccgcaccggcugguacaccuccgucaucaccaucgagcucuccaacaucaaggagaacaagugcaacggcaccgacgccaaggucaagcucaucaagcaggagcucgacaaguacaagaacgccgucaccgagcuccagcuccucaugcaguccacccccgccgccggcuccggcuccgccaucugcuccggcaucgccgucugcaagguccuccaccucgagggcgaggucaacaagaucaagaacgcccuccucuccaccaacaaggccgucgucucccucuccaacggcgucuccguccucaccuucaagguccucgaccucaagaacuacaucgacaagcagcuccuccccauccucaacaagcaguccugcuccaucuccaacaucgagaccgucaucgaguuccagcagaagaacaaccgccuccucgagaucacccgcgaguucuccgucaacgccggcgucaccacccccgucuccaccuacaugcucaccaacuccgagcuccucucccucaucaacgacaugcccaucaccaacgaccagaagaagcucauguccaacaacguccagaucguccgccagcaguccuacuccaucaugugcaucaucaaggaggagguccucgccuacgucguccagcucccccucuacggcgucaucgacacccccugcuggaagcuccacaccuccccccucugcaccaccaacaccaaggagggcuccaacaucugccucacccgcaccgaccgcggcugguacugcgacaacgccggcuccgucuccuucuucccccaggccgagaccugcaagguccaguccaaccgcgucuucugcgacaccaugaacucccgcacccuccccuccgaggucaaccucugcaacaucgacaucuucaaccccaaguacgacugcaagaucaugaccuccaagaccgacgucuccuccuccgucaucaccucccucggcgccaucgucuccugcuacggcaagaccaagugcaccgccuccaacaagaaccgcggcaucaucaagaccuucuccaacggcugcgacuacgucuccaacaagggcgucgacaccgucuccgucggcaacacccucuacugcgucaacaagcaggagggcaagucccucuacgucaagggcgagcccaucaucaacuucuacgacccccucgucuuccccuccgacgaguucgacgccuccaucucccaggucaacgagaagaucaaccagucccucgccuucauccgcaaguccgacgagcuccuccacaacgucaacgucggcaaguccaccaccaacaucaugaucaccaccaucaucaucgucaucaucgucauccuccuccuccucaucgccgucggccucuuccucuacugcaaggcccgcuccacccccgucacccucuccaaggaccagcucuccggcaucaacaacaucgccuucuccaacugaggacuaguacuggcugcaucucccuuuccucuguccuccauccuucucccaggauggugaagggggaccugguacccagugauccccaccccaggauccuaaaucaugacuuaccugcuaauaaaaacucauuggaaaagugagaagaucuaaaaaaaaaaaaaaaaaaaaaaaaaaaaaaaaaaaaaaaaaaaaaaaaaaaaaaaaaaaaaaaaugcaucccccccccccccccccccccccccccccccaaaggcucuuuucagagccaccagaauu

SEQ ID NO: 16454 - RNA, 1986 nt, Artificial Sequence
  mRNA product Design h-1 comprising derived and/or modified sequence from HRSV(Memphis-37)__AIY60640.1__F_DSCav1_mut4 (opt3)
gggagacccgugacccggaaguuguacggcuacgcgacuuucccucccacaaacccucgcgcccuuccuuuccuacuugggcccggcagaaagcuuaccauggagcugcccauccucaagaccaacgccauuacaacuauacuugcugcagugacgcugugcuucgccagcucccagaauaucaccgaagaguuuuaccaaucuacauguucagcggucaguaaaggcuauuugagcgcuuuaagaacugggugguacaccuccguuauuacaaucgaacugucuaacauuaaggagaauaaaugcaacggaaccgacgccaaggugaaacuaaucaagcaggaacucgauaaguauaaaaaugcaguaacugagcugcagcuucugaugcagucgaccccugccgcugguucaggcagcgcaauauguagugggaucgccgugugcaaggucuugcaccucgagggagaagugaacaaaauuaagaaugcucugcuguccacaaacaaagccguugugucucucagcaauggcgucuccguguuaacguucaagguacuggaccuuaagaacuacaucgauaaacaauugcugccaauucuaaauaagcagucauguaguaucagcaacauagagacuguuauugaauuucagcagaaaaauaacaggcuccuggagaucacccgggaguucucugugaaugcgggugucacaacuccgguguccaccuauaugcuuacaaacucagaacuguugagccucauuaacgacaugcccaucaccaaugaucaaaagaaacugaugaguaacaaugugcagaucguccgccagcagucuuacuccauuaugugcauaaucaaggaggaaguuuuagcauaugugguacaacugccucucuacggggugauugacacgccauguuggaaacuucauacuagcccccugugcacaaccaacacuaaggagggaucgaauaucuguuugacacgaaccgaucguggcugguacugcgacaacgccggcucugucuccuuuuucccucaggcugaaacguguaaggugcagucaaauagaguguuuugcgauaccaugaacaguagaacacugccaagcgaggugaaucucugcaacauagacauuuucaaucccaaauaugauuguaagaucaugacuuccaaaaccgacgucucuagcucagugaucacaagucugggggccauuguauccugcuacggaaagacuaaauguaccgcaagcaacaagaauagggguaucauuaagacauuuucuaacggcugcgauuauguuucaaauaaagggguggacaccgucagugugggaaacacucuuuacugugucaacaagcaagagggcaaaagccuguaugugaagggugaaccuauaaucaauuucuacgacccauugguuuuuccguccgaugaguucgacgcuucuauuucgcagguuaacgagaaaaucaaucagagccucgccuuuauccggaaguccgaugaacuguuacacaacguaaaugucgggaagucaacgacaaacauuaugauaaccacuaucauuaucgugauuaucguuauacugcuacuccugaucgcggugggacuuuucuuguauugcaaagcccgcaguacccccgucacacugucuaaggaccagcucagcggcauuaauaacaucgcauucuccaauugaggacuaguacuggcugcaucucccuuuccucuguccuccauccuucucccaggauggugaagggggaccugguacccagugauccccaccccaggauccuaaaucaugacuuaccugcuaauaaaaacucauuggaaaagugagaagaucuaaaaaaaaaaaaaaaaaaaaaaaaaaaaaaaaaaaaaaaaaaaaaaaaaaaaaaaaaaaaaaaaugcaucccccccccccccccccccccccccccccccaaaggcucuuuucagagccaccagaauu

SEQ ID NO: 16455 - RNA, 1986 nt, Artificial Sequence
  mRNA product Design h-1 comprising derived and/or modified sequence from HRSV(Memphis-37)__AIY60640.1__F_DSCav1_mut4 (opt4)
gggagacccgugacccggaaguuguacggcuacgcgacuuucccucccacaaacccucgcgcccuuccuuuccuacuugggcccggcagaaagcuuaccauggagcugcccauccugaagaccaacgccaucaccaccauccuggccgccgugacccugugcuucgccagcagccagaacaucaccgaggaguucuaccagagcaccugcagcgccgugagcaagggcuaccugagcgcccugagaaccggcugguacaccagcgugaucaccaucgagcugagcaacaucaaggagaacaagugcaacggcaccgacgccaaggugaagcugaucaagcaggagcuggacaaguacaagaacgccgugaccgagcugcagcugcugaugcagagcacccccgccgccggcagcggcagcgccaucugcagcggcaucgccgugugcaaggugcugcaccuggagggcgaggugaacaagaucaagaacgcccugcugagcaccaacaaggccguggugagccugagcaacggcgugagcgugcugaccuucaaggugcuggaccugaagaacuacaucgacaagcagcugcugcccauccugaacaagcagagcugcagcaucagcaacaucgagaccgugaucgaguuccagcagaagaacaacagacugcuggagaucaccagagaguucagcgugaacgccggcgugaccacccccgugagcaccuacaugcugaccaacagcgagcugcugagccugaucaacgacaugcccaucaccaacgaccagaagaagcugaugagcaacaacgugcagaucgugagacagcagagcuacagcaucaugugcaucaucaaggaggaggugcuggccuacguggugcagcugccccuguacggcgugaucgacacccccugcuggaagcugcacaccagcccccugugcaccaccaacaccaaggagggcagcaacaucugccugaccagaaccgacagaggcugguacugcgacaacgccggcagcgugagcuucuucccccaggccgagaccugcaaggugcagagcaacagaguguucugcgacaccaugaacagcagaacccugcccagcgaggugaaccugugcaacaucgacaucuucaaccccaaguacgacugcaagaucaugaccagcaagaccgacgugagcagcagcgugaucaccagccugggcgccaucgugagcugcuacggcaagaccaagugcaccgccagcaacaagaacagaggcaucaucaagaccuucagcaacggcugcgacuacgugagcaacaagggcguggacaccgugagcgugggcaacacccuguacugcgugaacaagcaggagggcaagagccuguacgugaagggcgagcccaucaucaacuucuacgacccccugguguuccccagcgacgaguucgacgccagcaucagccaggugaacgagaagaucaaccagagccuggccuucaucagaaagagcgacgagcugcugcacaacgugaacgugggcaagagcaccaccaacaucaugaucaccaccaucaucaucgugaucaucgugauccugcugcugcugaucgccgugggccuguuccuguacugcaaggccagaagcacccccgugacccugagcaaggaccagcugagcggcaucaacaacaucgccuucagcaacugaggacuaguacuggcugcaucucccuuuccucuguccuccauccuucucccaggauggugaagggggaccugguacccagugauccccaccccaggauccuaaaucaugacuuaccugcuaauaaaaacucauuggaaaagugagaagaucuaaaaaaaaaaaaaaaaaaaaaaaaaaaaaaaaaaaaaaaaaaaaaaaaaaaaaaaaaaaaaaaaugcaucccccccccccccccccccccccccccccccaaaggcucuuuucagagccaccagaauu

SEQ ID NO: 16456 - RNA, 1986 nt, Artificial Sequence
  mRNA product Design h-1 comprising derived and/or modified sequence from HRSV(Memphis-37)__AIY60640.1__F_DSCav1_mut4 (opt5)
gggagacccgugacccggaaguuguacggcuacgcgacuuucccucccacaaacccucgcgcccuuccuuuccuacuugggcccggcagaaagcuuaccauggagcugcccauccucaagaccaacgccauuacaacgauccuggcugccgugacccuuugcuucgcgagcucccagaauauuacagaagaguuuuaccaaucuaccuguagcgcugucuccaaaggcuaucugucugcccucagaacagggugguacaccagcguuaucacaauugaacuguccaacaucaaggagaauaaaugcaacggaaccgacgccaaggugaaacuuaucaagcaggaacuggauaaguauaaaaaugcugugacggagcuccagcugcugaugcagucuaccccugccgcuggcagcggguccgccauuuguagcggaaucgcggucugcaaggugcuccaccuggagggcgaaguuaacaaaauuaagaaugcccuucugucuacaaacaaagcuguggucucccucagcaauggggugucuguucugaccuucaaggugcuugaccugaagaacuacaucgauaaacaacuccugccgauucugaauaagcaguccuguagcaucucuaacauugagacagucaucgaauuucagcagaaaaauaaccggcuccuggagaucacccgcgaguucuccgugaaugccggagugacgacacccgucagcaccuauaugcuuacaaacuccgaacugcucucucugauuaacgacaugccuaucaccaaugaucaaaagaaacuuaugagcaacaauguucagauugugagacagcaguccuacagcaucaugugcauuaucaaggaggaagugcuggcuuaugucgugcaacucccccuguacggcguuaucgacaccccuuguuggaaacugcauacaucuccccucugcacgaccaacacaaaggagggcuccaauauuugucugacccggacagaucgcgggugguacugcgacaacgccggaagcgugagcuuuuucccucaggcggaaaccuguaagguccagucuaauagaguguuuugcgauacgaugaacuccagaacacugccgucugagguuaaucucugcaacaucgacauuuucaaucccaaauaugauuguaagaucaugaccagcaaaaccgacguguccagcucugucauuacaucccugggcgccaucgugagcugcuacgggaagaccaaauguacagcuucuaacaagaaucggggaaucauuaagacguuuuccaacggcugcgauuaugucagcaauaaagggguggacaccguuuccgugggaaacacacuuuacugugucaacaagcaagagggcaaaucucuguaugugaagggcgaaccuaucauuaauuucuacgacccccucguuuuuccuagcgaugaguucgacgccuccaucucucaggugaacgaaaagauuaaucagagccuggcuuuuauccgcaaguccgaugagcugcuccacaacgucaauguggggaaaagcaccacaaacauuaugaucaccacgaucauuaucgugauuaucguuauucugcuucugcucaucgccgucggacuguuccuguauugcaaagccagaucuacccccgugacacuuuccaaggaccagcucagcggcaucaauaacauugcuuucucuaauugaggacuaguacuggcugcaucucccuuuccucuguccuccauccuucucccaggauggugaagggggaccugguacccagugauccccaccccaggauccuaaaucaugacuuaccugcuaauaaaaacucauuggaaaagugagaagaucuaaaaaaaaaaaaaaaaaaaaaaaaaaaaaaaaaaaaaaaaaaaaaaaaaaaaaaaaaaaaaaaaugcaucccccccccccccccccccccccccccccccaaaggcucuuuucagagccaccagaauu

SEQ ID NO: 16457 - RNA, 1986 nt, Artificial Sequence
  mRNA product Design h-1 comprising derived and/or modified sequence from HRSV(Memphis-37)__AIY60640.1__F_DSCav1_mut4 (opt6)
gggagacccgugacccggaaguuguacggcuacgcgacuuucccucccacaaacccucgcgcccuuccuuuccuacuugggcccggcagaaagcuuaccauggaacucccaauccuaaaaacaaacgcaauaacaacaauauuagcagccguaacacucuguuucgccucaucccaaaacauaacagaagaauuuuaucaaucuacauguuccgccgucaguaaaggauaucuaucagccuuaagaacaggcugguacacaucaguaaucaccauagaauuauccaacauaaaagaaaacaaaugcaauggcacagaugccaaaguaaaacuaaucaaacaagaacuugauaaauauaaaaacgcaguaacagaauuacaauuauuaaugcaaagcacaccagccgcaggaucaggaucagcaauauguucaggaauagcagucuguaaaguacuacacuuagaaggagaaguaaacaaaauuaaaaacgcauuacuaagcaccaauaaagcaguaguaucacuaucaaacggcguauccguauuaacguucaaaguccucgaccugaaaaacuacauagauaaacaacuacuaccaauacuaaauaaacaaucaugcucaauaucaaacauagaaacuguuaucgaauuucaacagaaaaauaaccgacuacuagaaaucaccagagaauuuucaguaaacgcaggcgucacuacaccaguauccacauacaugcuaaccaacucggaauuacuuucccucauaaacgacaugccaauaacaaacgaccaaaagaaacuuaugucaaacaacguucaaauaguccgccaacaaucauacucaauaauguguaucauaaaagaagaaguccuagcauaugucguacaacuaccauuauacggaguaauugacacaccuugcuggaaacuacacacauccccacuauguacaacaaacacuaaagaaggaucaaacaucugccuaaccagaacagacagaggcugguauugcgacaacgcaggaucaguaucauucuucccacaagcagaaacaugcaaaguacaaucaaacagagucuucugcgacaccaugaacagcagaacccucccauccgaaguaaacuuaugcaacaucgauaucuucaacccaaaauacgacuguaaaauaaugacaucaaaaacagacguuucauccucaguaauaacaucauuaggugccauaguuucauguuacggaaaaaccaaauguaccgcaucaaacaaaaacagaggcauuauuaaaacauucucuaacggaugcgacuaugucaguaacaaaggaguagacacaguaucagucggaaacacauuauauugcguaaauaaacaagaaggaaaaagucuauacguaaaaggagaaccaauaauaaacuuuuacgacccucucguauucccaucagacgaauuugaugcauccauaucacaagucaacgaaaagauaaaccaaucccuagcauucauaagaaaaucagacgaacuacuccauaacguaaacguaggaaaaagcacaaccaauauaaugauaaccacaauaaucauaguaauaauagucauauuauuacuuuuaauugcaguaggacucuuucuauacugcaaagcaagaagcacaccaguaacacuaagcaaagaccaacuaucaggcaucaacaauaucgccuuuucaaauuaaggacuaguacuggcugcaucucccuuuccucuguccuccauccuucucccaggauggugaagggggaccugguacccagugauccccaccccaggauccuaaaucaugacuuaccugcuaauaaaaacucauuggaaaagugagaagaucuaaaaaaaaaaaaaaaaaaaaaaaaaaaaaaaaaaaaaaaaaaaaaaaaaaaaaaaaaaaaaaaaugcaucccccccccccccccccccccccccccccccaaaggcucuuuucagagccaccagaauu

SEQ ID NO: 16458 - RNA, 1986 nt, Artificial Sequence
  mRNA product Design h-1 comprising derived and/or modified sequence from HRSV(Memphis-37)__AIY60640.1__F_DSCav1_mut4 (opt11)
gggagacccgugacccggaaguuguacggcuacgcgacuuucccucccacaaacccucgcgcccuuccuuuccuacuugggcccggcagaaagcuuaccauggagcugcccauccucaagaccaacgccaucaccacgauccuggccgcggugacccugugcuucgcgagcucccagaacaucaccgaggaguucuaccagagcacgugcuccgccgucagcaagggcuaccucuccgcccugcgcaccgggugguacaccagcgugaucaccaucgagcuguccaacaucaaggagaacaagugcaacggcaccgacgccaaggugaaacucaucaagcaggagcuggacaaguacaagaacgccgucaccgagcugcagcuccugaugcagagcaccccggccgccggguccggcagcgcuaucugcuccgggaucgcggugugcaaggugcugcaccucgagggcgaggucaacaagaucaagaaugcccugcugagcaccaacaaggccguggugucccucagcaacggagucagcgugcuuaccuucaaggugcuggaccucaagaacuacaucgacaagcagcugcugccuauccucaacaagcagagcugcuccaucagcaacaucgagacggucaucgaguuccagcagaagaacaaccggcugcuggagaucacccgcgaguucuccgugaacgccggggugaccacccccgucagcacguacaugcucaccaacagcgaacugcugucccucaucaacgacaugcccaucaccaacgaccagaagaagcugaugagcaacaacgugcagaucgugcggcagcaguccuacagcaucaugugcaucaucaaggaggaaguccuggccuacguggugcagcucccucuguacggcgucaucgacacccccugcuggaagcugcacacgagcccccucugcaccaccaacaccaaggagggguccaacaucugccugacgcgcaccgaccggggcugguacugcgacaacgcgggguccgugagcuucuucccccaggccgagaccugcaaggugcagagcaaccgcgucuucugcgacacuaugaacagcagaacgcucccguccgaggugaaccugugcaacauagacauauucaaccccaaguacgacugcaagaucaugaccagcaagaccgacgucuccagcuccgugauuaccagccugggcgcaaucguguccugcuacggcaagacgaagugcaccgccagcaacaagaaccgggggaucaucaagaccuucuccaacggcugcgacuaugucagcaacaaggggguggacaccgugagcgucggaaacacgcucuacugcgugaacaagcaagagggcaaguccuuauacgugaagggggagcccaucaucaacuucuacgacccccuggucuucccgagcgacgaguucgacgccagcauaagccaggugaacgagaagaucaaccagucccucgcguucauccgcaagagcgacgagcugcugcacaacgugaacgucggcaaguccaccaccaacaucaugaucaccaccaucaucaucgugaucaucgugauccuccugcugcucaucgccgucgggcuguuccuguacugcaaggcccggagcacgcccgugaccuuguccaaggaccagcucagcggcaucaacaacaucgccuucuccaacugaggacuaguacuggcugcaucucccuuuccucuguccuccauccuucucccaggauggugaagggggaccugguacccagugauccccaccccaggauccuaaaucaugacuuaccugcuaauaaaaacucauuggaaaagugagaagaucuaaaaaaaaaaaaaaaaaaaaaaaaaaaaaaaaaaaaaaaaaaaaaaaaaaaaaaaaaaaaaaaaugcaucccccccccccccccccccccccccccccccaaaggcucuuuucagagccaccagaauu

SEQ ID NO: 16459 - RNA, 2202 nt, Artificial Sequence
  mRNA product Design h-2 comprising derived and/or modified sequence from HRSV(Memphis-37)__AIY60640.1__F_DSCav1_mut4 (opt1)
gggagacccgugacccggaaguuguacggcuacgcgacuuucccucccacaaacccucgcgcccuuccuuuccuacuugggcccggcagaaagcuuaccauggagcugcccauccucaagaccaacgccaucaccacgauccuggccgcggugacccugugcuucgccagcucccagaacaucaccgaggaguucuaccagagcacgugcuccgccgucagcaagggcuaccucuccgcccugcgcaccgggugguacaccagcgugaucaccaucgagcuguccaacaucaaggagaacaagugcaacggcaccgacgccaaggugaagcucaucaagcaggagcuggacaaguacaagaacgcggucacggagcugcagcuccugaugcagagcaccccggccgccggcuccgggagcgcgaucugcuccggcaucgccgucugcaaggugcugcaccucgagggcgaggugaacaagaucaagaacgcccugcuguccaccaacaaggccgucgugagccucuccaacggggugagcguccugaccuucaaggugcuggaccucaagaacuacaucgacaagcagcugcugcccauccugaacaagcagagcugcuccaucagcaacaucgagaccgucaucgaguuccagcagaagaacaaccgccuccuggagaucacgcgggaguucagcgugaacgcgggcgugaccacccccgucuccaccuacaugcugacgaacagcgagcuccugucccugaucaacgacaugccgaucaccaacgaccagaagaagcucaugagcaacaacgugcagaucgugcgccagcaguccuacagcaucaugugcaucaucaaggaggagguccuggccuacguggugcagcugccccucuacggggucaucgacacccccugcuggaagcugcacaccagcccccugugcacgaccaacaccaaggagggcuccaacaucugccucacccggacggaccgcgggugguacugcgacaacgccggcagcguguccuucuucccgcaggccgagaccugcaagguccagagcaaccggguguucugcgacaccaugaacucccggacccugcccagcgaggugaaccucugcaacaucgacaucuucaaccccaaguacgacugcaagaucaugacguccaagaccgacgucagcuccagcgugaucaccucccugggcgccaucgugagcugcuacgggaagaccaagugcacggcgagcaacaagaaccgcggcaucaucaagaccuucuccaacgggugcgacuacgucagcaacaagggcguggacaccguguccgucggcaacacccuguacugcgugaacaagcaggagggcaagagccucuacgugaagggggagcccaucaucaacuucuacgacccgcuggucuuccccuccgacgaguucgacgccagcaucucccaggugaacgagaagaucaaccagagccuggccuucauccggaaguccgacgagcuccugcacaacgugaacgucggcaagagcaccacgaacaucaugaucaccaccaucaucaucgugaucaucgugauccugcugcuccugaucgccgucgggcuguuccucuacugcaaggcccgcuccacccccgugacgcugagcaaggaccagcuguccgggaucaacaacaucgcguucagcaacugaggacuagugaagggaacacccaaauuuaauucagccuuaagcacaauuaauuaagagugaaacguaauuguacaagcaguuggucacccaccauagggcaugaucaacaccgcaaccuuuccuuuuucccccagugauucugaaaaaccccucuucccuucagcuugcuuagauguuccaaauuuaguaagcuuaaggcggccuacagaagaaaaagaaaaaaaaggccacaaaaguucccucucacuuucaguaaauaaaauaaaagcagcaacagaaauaaagaaauaaaugaaauucaaaaugaaauaaauauuguguugugcagcauuaaaaaaucaauaaaaauuaaaaaugagcaagaucuaaaaaaaaaaaaaaaaaaaaaaaaaaaaaaaaaaaaaaaaaaaaaaaaaaaaaaaaaaaaaaaaugcaucccccccccccccccccccccccccccccccaaaggcucuuuucagagccaccagaauu

SEQ ID NO: 16460 - RNA, 2202 nt, Artificial Sequence
  mRNA product Design h-2 comprising derived and/or modified sequence from HRSV(Memphis-37)__AIY60640.1__F_DSCav1_mut4 (opt1)
gggagacccgugacccggaaguuguacggcuacgcgacuuucccucccacaaacccucgcgcccuuccuuuccuacuugggcccggcagaaagcuuaccauggagcugcccauccucaagaccaacgccaucaccacgauccuggccgcggugacccugugcuucgccagcucccagaacaucaccgaggaguucuaccagagcacgugcuccgccgucagcaagggcuaccucuccgcccugcgcaccgggugguacaccagcgugaucaccaucgagcuguccaacaucaaggagaacaagugcaacggcaccgacgccaaggugaagcucaucaagcaggagcuggacaaguacaagaacgcggucacggagcugcagcuccugaugcagagcaccccggccgccggguccggcagcgccaucugcuccgggaucgcggugugcaaggugcugcaccucgagggcgaggucaacaagaucaagaacgcccugcugagcaccaacaaggccguggugucccucagcaacggcgucuccgugcugaccuucaaggugcuggaccucaagaacuacaucgacaagcagcugcugcccauccucaacaagcagagcugcuccaucagcaacaucgagacggucaucgaguuccagcagaagaacaaccggcugcuggagaucacccgcgaguucuccgugaacgccggggugaccacccccgucagcacguacaugcucaccaacagcgagcugcugucccucaucaacgacaugcccaucaccaacgaccagaagaagcugaugagcaacaacgugcagaucgugcggcagcaguccuacagcaucaugugcaucaucaaggaggagguccuggccuacguggugcagcucccgcuguacggcgucaucgacacccccugcuggaagcugcacacgagcccccucugcaccaccaacaccaaggagggguccaacaucugccugacgcgcaccgaccggggcugguacugcgacaacgcgggguccgugagcuucuucccccaggccgagaccugcaaggugcaguccaaccgcgucuucugcgacaccaugaacagccggacgcucccguccgaggugaaccugugcaacaucgacaucuucaaccccaaguacgacugcaagaucaugaccagcaagaccgacgucuccagcuccgugaucaccagccugggcgccaucguguccugcuacggcaagacgaagugcaccgccagcaacaagaaccgggggaucaucaagaccuucuccaacggcugcgacuacgucagcaacaaggggguggacaccgugagcgucggcaacacgcucuacugcgugaacaagcaggagggcaagucccuguacgugaagggggagcccaucaucaacuucuacgacccccuggucuucccgagcgacgaguucgacgccuccaucagccaggugaacgagaagaucaaccagucccucgcguucauccgcaagagcgacgagcugcugcacaacgugaacgucggcaaguccaccaccaacaucaugaucaccaccaucaucaucgugaucaucgugauccuccugcugcucaucgccgucgggcuguuccuguacugcaaggcccggagcacgcccgugacccuguccaaggaccagcucagcggcaucaacaacaucgccuucuccaacugaggacuagugaagggaacacccaaauuuaauucagccuuaagcacaauuaauuaagagugaaacguaauuguacaagcaguuggucacccaccauagggcaugaucaacaccgcaaccuuuccuuuuucccccagugauucugaaaaaccccucuucccuucagcuugcuuagauguuccaaauuuaguaagcuuaaggcggccuacagaagaaaaagaaaaaaaaggccacaaaaguucccucucacuuucaguaaauaaaauaaaagcagcaacagaaauaaagaaauaaaugaaauucaaaaugaaauaaauauuguguugugcagcauuaaaaaaucaauaaaaauuaaaaaugagcaagaucuaaaaaaaaaaaaaaaaaaaaaaaaaaaaaaaaaaaaaaaaaaaaaaaaaaaaaaaaaaaaaaaaugcaucccccccccccccccccccccccccccccccaaaggcucuuuucagagccaccagaauu

SEQ ID NO: 16461 - RNA, 2202 nt, Artificial Sequence
  mRNA product Design h-2 comprising derived and/or modified sequence from HRSV(Memphis-37)__AIY60640.1__F_DSCav1_mut4 (opt2)
gggagacccgugacccggaaguuguacggcuacgcgacuuucccucccacaaacccucgcgcccuuccuuuccuacuugggcccggcagaaagcuuaccauggagcuccccauccucaagaccaacgccaucaccaccauccucgccgccgucacccucugcuucgccuccucccagaacaucaccgaggaguucuaccaguccaccugcuccgccgucuccaagggcuaccucuccgcccuccgcaccggcugguacaccuccgucaucaccaucgagcucuccaacaucaaggagaacaagugcaacggcaccgacgccaaggucaagcucaucaagcaggagcucgacaaguacaagaacgccgucaccgagcuccagcuccucaugcaguccacccccgccgccggcuccggcuccgccaucugcuccggcaucgccgucugcaagguccuccaccucgagggcgaggucaacaagaucaagaacgcccuccucuccaccaacaaggccgucgucucccucuccaacggcgucuccguccucaccuucaagguccucgaccucaagaacuacaucgacaagcagcuccuccccauccucaacaagcaguccugcuccaucuccaacaucgagaccgucaucgaguuccagcagaagaacaaccgccuccucgagaucacccgcgaguucuccgucaacgccggcgucaccacccccgucuccaccuacaugcucaccaacuccgagcuccucucccucaucaacgacaugcccaucaccaacgaccagaagaagcucauguccaacaacguccagaucguccgccagcaguccuacuccaucaugugcaucaucaaggaggagguccucgccuacgucguccagcucccccucuacggcgucaucgacacccccugcuggaagcuccacaccuccccccucugcaccaccaacaccaaggagggcuccaacaucugccucacccgcaccgaccgcggcugguacugcgacaacgccggcuccgucuccuucuucccccaggccgagaccugcaagguccaguccaaccgcgucuucugcgacaccaugaacucccgcacccuccccuccgaggucaaccucugcaacaucgacaucuucaaccccaaguacgacugcaagaucaugaccuccaagaccgacgucuccuccuccgucaucaccucccucggcgccaucgucuccugcuacggcaagaccaagugcaccgccuccaacaagaaccgcggcaucaucaagaccuucuccaacggcugcgacuacgucuccaacaagggcgucgacaccgucuccgucggcaacacccucuacugcgucaacaagcaggagggcaagucccucuacgucaagggcgagcccaucaucaacuucuacgacccccucgucuuccccuccgacgaguucgacgccuccaucucccaggucaacgagaagaucaaccagucccucgccuucauccgcaaguccgacgagcuccuccacaacgucaacgucggcaaguccaccaccaacaucaugaucaccaccaucaucaucgucaucaucgucauccuccuccuccucaucgccgucggccucuuccucuacugcaaggcccgcuccacccccgucacccucuccaaggaccagcucuccggcaucaacaacaucgccuucuccaacugaggacuagugaagggaacacccaaauuuaauucagccuuaagcacaauuaauuaagagugaaacguaauuguacaagcaguuggucacccaccauagggcaugaucaacaccgcaaccuuuccuuuuucccccagugauucugaaaaaccccucuucccuucagcuugcuuagauguuccaaauuuaguaagcuuaaggcggccuacagaagaaaaagaaaaaaaaggccacaaaaguucccucucacuuucaguaaauaaaauaaaagcagcaacagaaauaaagaaauaaaugaaauucaaaaugaaauaaauauuguguugugcagcauuaaaaaaucaauaaaaauuaaaaaugagcaagaucuaaaaaaaaaaaaaaaaaaaaaaaaaaaaaaaaaaaaaaaaaaaaaaaaaaaaaaaaaaaaaaaaugcaucccccccccccccccccccccccccccccccaaaggcucuuuucagagccaccagaauu

SEQ ID NO: 16462 - RNA, 2202 nt, Artificial Sequence
  mRNA product Design h-2 comprising derived and/or modified sequence from HRSV(Memphis-37)__AIY60640.1__F_DSCav1_mut4 (opt3)
gggagacccgugacccggaaguuguacggcuacgcgacuuucccucccacaaacccucgcgcccuuccuuuccuacuugggcccggcagaaagcuuaccauggagcugcccauccucaagaccaacgccauuacaacuauacuugcugcagugacgcugugcuucgccagcucccagaauaucaccgaagaguuuuaccaaucuacauguucagcggucaguaaaggcuauuugagcgcuuuaagaacugggugguacaccuccguuauuacaaucgaacugucuaacauuaaggagaauaaaugcaacggaaccgacgccaaggugaaacuaaucaagcaggaacucgauaaguauaaaaaugcaguaacugagcugcagcuucugaugcagucgaccccugccgcugguucaggcagcgcaauauguagugggaucgccgugugcaaggucuugcaccucgagggagaagugaacaaaauuaagaaugcucugcuguccacaaacaaagccguugugucucucagcaauggcgucuccguguuaacguucaagguacuggaccuuaagaacuacaucgauaaacaauugcugccaauucuaaauaagcagucauguaguaucagcaacauagagacuguuauugaauuucagcagaaaaauaacaggcuccuggagaucacccgggaguucucugugaaugcgggugucacaacuccgguguccaccuauaugcuuacaaacucagaacuguugagccucauuaacgacaugcccaucaccaaugaucaaaagaaacugaugaguaacaaugugcagaucguccgccagcagucuuacuccauuaugugcauaaucaaggaggaaguuuuagcauaugugguacaacugccucucuacggggugauugacacgccauguuggaaacuucauacuagcccccugugcacaaccaacacuaaggagggaucgaauaucuguuugacacgaaccgaucguggcugguacugcgacaacgccggcucugucuccuuuuucccucaggcugaaacguguaaggugcagucaaauagaguguuuugcgauaccaugaacaguagaacacugccaagcgaggugaaucucugcaacauagacauuuucaaucccaaauaugauuguaagaucaugacuuccaaaaccgacgucucuagcucagugaucacaagucugggggccauuguauccugcuacggaaagacuaaauguaccgcaagcaacaagaauagggguaucauuaagacauuuucuaacggcugcgauuauguuucaaauaaagggguggacaccgucagugugggaaacacucuuuacugugucaacaagcaagagggcaaaagccuguaugugaagggugaaccuauaaucaauuucuacgacccauugguuuuuccguccgaugaguucgacgcuucuauuucgcagguuaacgagaaaaucaaucagagccucgccuuuauccggaaguccgaugaacuguuacacaacguaaaugucgggaagucaacgacaaacauuaugauaaccacuaucauuaucgugauuaucguuauacugcuacuccugaucgcggugggacuuuucuuguauugcaaagcccgcaguacccccgucacacugucuaaggaccagcucagcggcauuaauaacaucgcauucuccaauugaggacuagugaagggaacacccaaauuuaauucagccuuaagcacaauuaauuaagagugaaacguaauuguacaagcaguuggucacccaccauagggcaugaucaacaccgcaaccuuuccuuuuucccccagugauucugaaaaaccccucuucccuucagcuugcuuagauguuccaaauuuaguaagcuuaaggcggccuacagaagaaaaagaaaaaaaaggccacaaaaguucccucucacuuucaguaaauaaaauaaaagcagcaacagaaauaaagaaauaaaugaaauucaaaaugaaauaaauauuguguugugcagcauuaaaaaaucaauaaaaauuaaaaaugagcaagaucuaaaaaaaaaaaaaaaaaaaaaaaaaaaaaaaaaaaaaaaaaaaaaaaaaaaaaaaaaaaaaaaaugcaucccccccccccccccccccccccccccccccaaaggcucuuuucagagccaccagaauu

SEQ ID NO: 16463 - RNA, 2202 nt, Artificial Sequence
  mRNA product Design h-2 comprising derived and/or modified sequence from HRSV(Memphis-37)__AIY60640.1__F_DSCav1_mut4 (opt4)
gggagacccgugacccggaaguuguacggcuacgcgacuuucccucccacaaacccucgcgcccuuccuuuccuacuugggcccggcagaaagcuuaccauggagcugcccauccugaagaccaacgccaucaccaccauccuggccgccgugacccugugcuucgccagcagccagaacaucaccgaggaguucuaccagagcaccugcagcgccgugagcaagggcuaccugagcgcccugagaaccggcugguacaccagcgugaucaccaucgagcugagcaacaucaaggagaacaagugcaacggcaccgacgccaaggugaagcugaucaagcaggagcuggacaaguacaagaacgccgugaccgagcugcagcugcugaugcagagcacccccgccgccggcagcggcagcgccaucugcagcggcaucgccgugugcaaggugcugcaccuggagggcgaggugaacaagaucaagaacgcccugcugagcaccaacaaggccguggugagccugagcaacggcgugagcgugcugaccuucaaggugcuggaccugaagaacuacaucgacaagcagcugcugcccauccugaacaagcagagcugcagcaucagcaacaucgagaccgugaucgaguuccagcagaagaacaacagacugcuggagaucaccagagaguucagcgugaacgccggcgugaccacccccgugagcaccuacaugcugaccaacagcgagcugcugagccugaucaacgacaugcccaucaccaacgaccagaagaagcugaugagcaacaacgugcagaucgugagacagcagagcuacagcaucaugugcaucaucaaggaggaggugcuggccuacguggugcagcugccccuguacggcgugaucgacacccccugcuggaagcugcacaccagcccccugugcaccaccaacaccaaggagggcagcaacaucugccugaccagaaccgacagaggcugguacugcgacaacgccggcagcgugagcuucuucccccaggccgagaccugcaaggugcagagcaacagaguguucugcgacaccaugaacagcagaacccugcccagcgaggugaaccugugcaacaucgacaucuucaaccccaaguacgacugcaagaucaugaccagcaagaccgacgugagcagcagcgugaucaccagccugggcgccaucgugagcugcuacggcaagaccaagugcaccgccagcaacaagaacagaggcaucaucaagaccuucagcaacggcugcgacuacgugagcaacaagggcguggacaccgugagcgugggcaacacccuguacugcgugaacaagcaggagggcaagagccuguacgugaagggcgagcccaucaucaacuucuacgacccccugguguuccccagcgacgaguucgacgccagcaucagccaggugaacgagaagaucaaccagagccuggccuucaucagaaagagcgacgagcugcugcacaacgugaacgugggcaagagcaccaccaacaucaugaucaccaccaucaucaucgugaucaucgugauccugcugcugcugaucgccgugggccuguuccuguacugcaaggccagaagcacccccgugacccugagcaaggaccagcugagcggcaucaacaacaucgccuucagcaacugaggacuagugaagggaacacccaaauuuaauucagccuuaagcacaauuaauuaagagugaaacguaauuguacaagcaguuggucacccaccauagggcaugaucaacaccgcaaccuuuccuuuuucccccagugauucugaaaaaccccucuucccuucagcuugcuuagauguuccaaauuuaguaagcuuaaggcggccuacagaagaaaaagaaaaaaaaggccacaaaaguucccucucacuuucaguaaauaaaauaaaagcagcaacagaaauaaagaaauaaaugaaauucaaaaugaaauaaauauuguguugugcagcauuaaaaaaucaauaaaaauuaaaaaugagcaagaucuaaaaaaaaaaaaaaaaaaaaaaaaaaaaaaaaaaaaaaaaaaaaaaaaaaaaaaaaaaaaaaaaugcaucccccccccccccccccccccccccccccccaaaggcucuuuucagagccaccagaauu

SEQ ID NO: 16464 - RNA, 2202 nt, Artificial Sequence
  mRNA product Design h-2 comprising derived and/or modified sequence from HRSV(Memphis-37)__AIY60640.1__F_DSCav1_mut4 (opt5)
gggagacccgugacccggaaguuguacggcuacgcgacuuucccucccacaaacccucgcgcccuuccuuuccuacuugggcccggcagaaagcuuaccauggagcugcccauccucaagaccaacgccauuacaacgauccuggcugccgugacccuuugcuucgcgagcucccagaauauuacagaagaguuuuaccaaucuaccuguagcgcugucuccaaaggcuaucugucugcccucagaacagggugguacaccagcguuaucacaauugaacuguccaacaucaaggagaauaaaugcaacggaaccgacgccaaggugaaacuuaucaagcaggaacuggauaaguauaaaaaugcugugacggagcuccagcugcugaugcagucuaccccugccgcuggcagcggguccgccauuuguagcggaaucgcggucugcaaggugcuccaccuggagggcgaaguuaacaaaauuaagaaugcccuucugucuacaaacaaagcuguggucucccucagcaauggggugucuguucugaccuucaaggugcuugaccugaagaacuacaucgauaaacaacuccugccgauucugaauaagcaguccuguagcaucucuaacauugagacagucaucgaauuucagcagaaaaauaaccggcuccuggagaucacccgcgaguucuccgugaaugccggagugacgacacccgucagcaccuauaugcuuacaaacuccgaacugcucucucugauuaacgacaugccuaucaccaaugaucaaaagaaacuuaugagcaacaauguucagauugugagacagcaguccuacagcaucaugugcauuaucaaggaggaagugcuggcuuaugucgugcaacucccccuguacggcguuaucgacaccccuuguuggaaacugcauacaucuccccucugcacgaccaacacaaaggagggcuccaauauuugucugacccggacagaucgcgggugguacugcgacaacgccggaagcgugagcuuuuucccucaggcggaaaccuguaagguccagucuaauagaguguuuugcgauacgaugaacuccagaacacugccgucugagguuaaucucugcaacaucgacauuuucaaucccaaauaugauuguaagaucaugaccagcaaaaccgacguguccagcucugucauuacaucccugggcgccaucgugagcugcuacgggaagaccaaauguacagcuucuaacaagaaucggggaaucauuaagacguuuuccaacggcugcgauuaugucagcaauaaagggguggacaccguuuccgugggaaacacacuuuacugugucaacaagcaagagggcaaaucucuguaugugaagggcgaaccuaucauuaauuucuacgacccccucguuuuuccuagcgaugaguucgacgccuccaucucucaggugaacgaaaagauuaaucagagccuggcuuuuauccgcaaguccgaugagcugcuccacaacgucaauguggggaaaagcaccacaaacauuaugaucaccacgaucauuaucgugauuaucguuauucugcuucugcucaucgccgucggacuguuccuguauugcaaagccagaucuacccccgugacacuuuccaaggaccagcucagcggcaucaauaacauugcuuucucuaauugaggacuagugaagggaacacccaaauuuaauucagccuuaagcacaauuaauuaagagugaaacguaauuguacaagcaguuggucacccaccauagggcaugaucaacaccgcaaccuuuccuuuuucccccagugauucugaaaaaccccucuucccuucagcuugcuuagauguuccaaauuuaguaagcuuaaggcggccuacagaagaaaaagaaaaaaaaggccacaaaaguucccucucacuuucaguaaauaaaauaaaagcagcaacagaaauaaagaaauaaaugaaauucaaaaugaaauaaauauuguguugugcagcauuaaaaaaucaauaaaaauuaaaaaugagcaagaucuaaaaaaaaaaaaaaaaaaaaaaaaaaaaaaaaaaaaaaaaaaaaaaaaaaaaaaaaaaaaaaaaugcaucccccccccccccccccccccccccccccccaaaggcucuuuucagagccaccagaauu

SEQ ID NO: 16465 - RNA, 2202 nt, Artificial Sequence
  mRNA product Design h-2 comprising derived and/or modified sequence from HRSV(Memphis-37)__AIY60640.1__F_DSCav1_mut4 (opt6)
gggagacccgugacccggaaguuguacggcuacgcgacuuucccucccacaaacccucgcgcccuuccuuuccuacuugggcccggcagaaagcuuaccauggaacucccaauccuaaaaacaaacgcaauaacaacaauauuagcagccguaacacucuguuucgccucaucccaaaacauaacagaagaauuuuaucaaucuacauguuccgccgucaguaaaggauaucuaucagccuuaagaacaggcugguacacaucaguaaucaccauagaauuauccaacauaaaagaaaacaaaugcaauggcacagaugccaaaguaaaacuaaucaaacaagaacuugauaaauauaaaaacgcaguaacagaauuacaauuauuaaugcaaagcacaccagccgcaggaucaggaucagcaauauguucaggaauagcagucuguaaaguacuacacuuagaaggagaaguaaacaaaauuaaaaacgcauuacuaagcaccaauaaagcaguaguaucacuaucaaacggcguauccguauuaacguucaaaguccucgaccugaaaaacuacauagauaaacaacuacuaccaauacuaaauaaacaaucaugcucaauaucaaacauagaaacuguuaucgaauuucaacagaaaaauaaccgacuacuagaaaucaccagagaauuuucaguaaacgcaggcgucacuacaccaguauccacauacaugcuaaccaacucggaauuacuuucccucauaaacgacaugccaauaacaaacgaccaaaagaaacuuaugucaaacaacguucaaauaguccgccaacaaucauacucaauaauguguaucauaaaagaagaaguccuagcauaugucguacaacuaccauuauacggaguaauugacacaccuugcuggaaacuacacacauccccacuauguacaacaaacacuaaagaaggaucaaacaucugccuaaccagaacagacagaggcugguauugcgacaacgcaggaucaguaucauucuucccacaagcagaaacaugcaaaguacaaucaaacagagucuucugcgacaccaugaacagcagaacccucccauccgaaguaaacuuaugcaacaucgauaucuucaacccaaaauacgacuguaaaauaaugacaucaaaaacagacguuucauccucaguaauaacaucauuaggugccauaguuucauguuacggaaaaaccaaauguaccgcaucaaacaaaaacagaggcauuauuaaaacauucucuaacggaugcgacuaugucaguaacaaaggaguagacacaguaucagucggaaacacauuauauugcguaaauaaacaagaaggaaaaagucuauacguaaaaggagaaccaauaauaaacuuuuacgacccucucguauucccaucagacgaauuugaugcauccauaucacaagucaacgaaaagauaaaccaaucccuagcauucauaagaaaaucagacgaacuacuccauaacguaaacguaggaaaaagcacaaccaauauaaugauaaccacaauaaucauaguaauaauagucauauuauuacuuuuaauugcaguaggacucuuucuauacugcaaagcaagaagcacaccaguaacacuaagcaaagaccaacuaucaggcaucaacaauaucgccuuuucaaauuaaggacuagugaagggaacacccaaauuuaauucagccuuaagcacaauuaauuaagagugaaacguaauuguacaagcaguuggucacccaccauagggcaugaucaacaccgcaaccuuuccuuuuucccccagugauucugaaaaaccccucuucccuucagcuugcuuagauguuccaaauuuaguaagcuuaaggcggccuacagaagaaaaagaaaaaaaaggccacaaaaguucccucucacuuucaguaaauaaaauaaaagcagcaacagaaauaaagaaauaaaugaaauucaaaaugaaauaaauauuguguugugcagcauuaaaaaaucaauaaaaauuaaaaaugagcaagaucuaaaaaaaaaaaaaaaaaaaaaaaaaaaaaaaaaaaaaaaaaaaaaaaaaaaaaaaaaaaaaaaaugcaucccccccccccccccccccccccccccccccaaaggcucuuuucagagccaccagaauu

SEQ ID NO: 16466 - RNA, 2202 nt, Artificial Sequence
  mRNA product Design h-2 comprising derived and/or modified sequence from HRSV(Memphis-37)__AIY60640.1__F_DSCav1_mut4 (opt11)
gggagacccgugacccggaaguuguacggcuacgcgacuuucccucccacaaacccucgcgcccuuccuuuccuacuugggcccggcagaaagcuuaccauggagcugcccauccucaagaccaacgccaucaccacgauccuggccgcggugacccugugcuucgcgagcucccagaacaucaccgaggaguucuaccagagcacgugcuccgccgucagcaagggcuaccucuccgcccugcgcaccgggugguacaccagcgugaucaccaucgagcuguccaacaucaaggagaacaagugcaacggcaccgacgccaaggugaaacucaucaagcaggagcuggacaaguacaagaacgccgucaccgagcugcagcuccugaugcagagcaccccggccgccggguccggcagcgcuaucugcuccgggaucgcggugugcaaggugcugcaccucgagggcgaggucaacaagaucaagaaugcccugcugagcaccaacaaggccguggugucccucagcaacggagucagcgugcuuaccuucaaggugcuggaccucaagaacuacaucgacaagcagcugcugccuauccucaacaagcagagcugcuccaucagcaacaucgagacggucaucgaguuccagcagaagaacaaccggcugcuggagaucacccgcgaguucuccgugaacgccggggugaccacccccgucagcacguacaugcucaccaacagcgaacugcugucccucaucaacgacaugcccaucaccaacgaccagaagaagcugaugagcaacaacgugcagaucgugcggcagcaguccuacagcaucaugugcaucaucaaggaggaaguccuggccuacguggugcagcucccucuguacggcgucaucgacacccccugcuggaagcugcacacgagcccccucugcaccaccaacaccaaggagggguccaacaucugccugacgcgcaccgaccggggcugguacugcgacaacgcgggguccgugagcuucuucccccaggccgagaccugcaaggugcagagcaaccgcgucuucugcgacacuaugaacagcagaacgcucccguccgaggugaaccugugcaacauagacauauucaaccccaaguacgacugcaagaucaugaccagcaagaccgacgucuccagcuccgugauuaccagccugggcgcaaucguguccugcuacggcaagacgaagugcaccgccagcaacaagaaccgggggaucaucaagaccuucuccaacggcugcgacuaugucagcaacaaggggguggacaccgugagcgucggaaacacgcucuacugcgugaacaagcaagagggcaaguccuuauacgugaagggggagcccaucaucaacuucuacgacccccuggucuucccgagcgacgaguucgacgccagcauaagccaggugaacgagaagaucaaccagucccucgcguucauccgcaagagcgacgagcugcugcacaacgugaacgucggcaaguccaccaccaacaucaugaucaccaccaucaucaucgugaucaucgugauccuccugcugcucaucgccgucgggcuguuccuguacugcaaggcccggagcacgcccgugaccuuguccaaggaccagcucagcggcaucaacaacaucgccuucuccaacugaggacuagugaagggaacacccaaauuuaauucagccuuaagcacaauuaauuaagagugaaacguaauuguacaagcaguuggucacccaccauagggcaugaucaacaccgcaaccuuuccuuuuucccccagugauucugaaaaaccccucuucccuucagcuugcuuagauguuccaaauuuaguaagcuuaaggcggccuacagaagaaaaagaaaaaaaaggccacaaaaguucccucucacuuucaguaaauaaaauaaaagcagcaacagaaauaaagaaauaaaugaaauucaaaaugaaauaaauauuguguugugcagcauuaaaaaaucaauaaaaauuaaaaaugagcaagaucuaaaaaaaaaaaaaaaaaaaaaaaaaaaaaaaaaaaaaaaaaaaaaaaaaaaaaaaaaaaaaaaaugcaucccccccccccccccccccccccccccccccaaaggcucuuuucagagccaccagaauu

SEQ ID NO: 16467 - RNA, 1982 nt, Artificial Sequence
  mRNA product Design h-3 comprising derived and/or modified sequence from HRSV(Memphis-37)__AIY60640.1__F_DSCav1_mut4 (opt1)
gggagacccgugacccggaaguuguacggcuacgcgacuuucccucccacaaacccucgcgcccuuccuuuccuacuugggcccggcagaaagcuuaccauggagcugcccauccucaagaccaacgccaucaccacgauccuggccgcggugacccugugcuucgccagcucccagaacaucaccgaggaguucuaccagagcacgugcuccgccgucagcaagggcuaccucuccgcccugcgcaccgggugguacaccagcgugaucaccaucgagcuguccaacaucaaggagaacaagugcaacggcaccgacgccaaggugaagcucaucaagcaggagcuggacaaguacaagaacgcggucacggagcugcagcuccugaugcagagcaccccggccgccggcuccgggagcgcgaucugcuccggcaucgccgucugcaaggugcugcaccucgagggcgaggugaacaagaucaagaacgcccugcuguccaccaacaaggccgucgugagccucuccaacggggugagcguccugaccuucaaggugcuggaccucaagaacuacaucgacaagcagcugcugcccauccugaacaagcagagcugcuccaucagcaacaucgagaccgucaucgaguuccagcagaagaacaaccgccuccuggagaucacgcgggaguucagcgugaacgcgggcgugaccacccccgucuccaccuacaugcugacgaacagcgagcuccugucccugaucaacgacaugccgaucaccaacgaccagaagaagcucaugagcaacaacgugcagaucgugcgccagcaguccuacagcaucaugugcaucaucaaggaggagguccuggccuacguggugcagcugccccucuacggggucaucgacacccccugcuggaagcugcacaccagcccccugugcacgaccaacaccaaggagggcuccaacaucugccucacccggacggaccgcgggugguacugcgacaacgccggcagcguguccuucuucccgcaggccgagaccugcaagguccagagcaaccggguguucugcgacaccaugaacucccggacccugcccagcgaggugaaccucugcaacaucgacaucuucaaccccaaguacgacugcaagaucaugacguccaagaccgacgucagcuccagcgugaucaccucccugggcgccaucgugagcugcuacgggaagaccaagugcacggcgagcaacaagaaccgcggcaucaucaagaccuucuccaacgggugcgacuacgucagcaacaagggcguggacaccguguccgucggcaacacccuguacugcgugaacaagcaggagggcaagagccucuacgugaagggggagcccaucaucaacuucuacgacccgcuggucuuccccuccgacgaguucgacgccagcaucucccaggugaacgagaagaucaaccagagccuggccuucauccggaaguccgacgagcuccugcacaacgugaacgucggcaagagcaccacgaacaucaugaucaccaccaucaucaucgugaucaucgugauccugcugcuccugaucgccgucgggcuguuccucuacugcaaggcccgcuccacccccgugacgcugagcaaggaccagcuguccgggaucaacaacaucgcguucagcaacugaggacuaguggaagcauuuuccuggcugauuaaaagaaauuacucagcuauggucaucuguuccuguuagaaggcuaugcagcauauuauauacuaugcgcauguuaugaaaugcauaauaaaaaauuuuaaaaaaucuaaaagaucuaaaaaaaaaaaaaaaaaaaaaaaaaaaaaaaaaaaaaaaaaaaaaaaaaaaaaaaaaaaaaaaaugcaucccccccccccccccccccccccccccccccaaaggcucuuuucagagccaccagaauu

SEQ ID NO: 16468 - RNA, 1982 nt, Artificial Sequence
  mRNA product Design h-3 comprising derived and/or modified sequence from HRSV(Memphis-37)__AIY60640.1__F_DSCav1_mut4 (opt1)
gggagacccgugacccggaaguuguacggcuacgcgacuuucccucccacaaacccucgcgcccuuccuuuccuacuugggcccggcagaaagcuuaccauggagcugcccauccucaagaccaacgccaucaccacgauccuggccgcggugacccugugcuucgccagcucccagaacaucaccgaggaguucuaccagagcacgugcuccgccgucagcaagggcuaccucuccgcccugcgcaccgggugguacaccagcgugaucaccaucgagcuguccaacaucaaggagaacaagugcaacggcaccgacgccaaggugaagcucaucaagcaggagcuggacaaguacaagaacgcggucacggagcugcagcuccugaugcagagcaccccggccgccggguccggcagcgccaucugcuccgggaucgcggugugcaaggugcugcaccucgagggcgaggucaacaagaucaagaacgcccugcugagcaccaacaaggccguggugucccucagcaacggcgucuccgugcugaccuucaaggugcuggaccucaagaacuacaucgacaagcagcugcugcccauccucaacaagcagagcugcuccaucagcaacaucgagacggucaucgaguuccagcagaagaacaaccggcugcuggagaucacccgcgaguucuccgugaacgccggggugaccacccccgucagcacguacaugcucaccaacagcgagcugcugucccucaucaacgacaugcccaucaccaacgaccagaagaagcugaugagcaacaacgugcagaucgugcggcagcaguccuacagcaucaugugcaucaucaaggaggagguccuggccuacguggugcagcucccgcuguacggcgucaucgacacccccugcuggaagcugcacacgagcccccucugcaccaccaacaccaaggagggguccaacaucugccugacgcgcaccgaccggggcugguacugcgacaacgcgggguccgugagcuucuucccccaggccgagaccugcaaggugcaguccaaccgcgucuucugcgacaccaugaacagccggacgcucccguccgaggugaaccugugcaacaucgacaucuucaaccccaaguacgacugcaagaucaugaccagcaagaccgacgucuccagcuccgugaucaccagccugggcgccaucguguccugcuacggcaagacgaagugcaccgccagcaacaagaaccgggggaucaucaagaccuucuccaacggcugcgacuacgucagcaacaaggggguggacaccgugagcgucggcaacacgcucuacugcgugaacaagcaggagggcaagucccuguacgugaagggggagcccaucaucaacuucuacgacccccuggucuucccgagcgacgaguucgacgccuccaucagccaggugaacgagaagaucaaccagucccucgcguucauccgcaagagcgacgagcugcugcacaacgugaacgucggcaaguccaccaccaacaucaugaucaccaccaucaucaucgugaucaucgugauccuccugcugcucaucgccgucgggcuguuccuguacugcaaggcccggagcacgcccgugacccuguccaaggaccagcucagcggcaucaacaacaucgccuucuccaacugaggacuaguggaagcauuuuccuggcugauuaaaagaaauuacucagcuauggucaucuguuccuguuagaaggcuaugcagcauauuauauacuaugcgcauguuaugaaaugcauaauaaaaaauuuuaaaaaaucuaaaagaucuaaaaaaaaaaaaaaaaaaaaaaaaaaaaaaaaaaaaaaaaaaaaaaaaaaaaaaaaaaaaaaaaugcaucccccccccccccccccccccccccccccccaaaggcucuuuucagagccaccagaauu

SEQ ID NO: 16469 - RNA, 1982 nt, Artificial Sequence
  mRNA product Design h-3 comprising derived and/or modified sequence from HRSV(Memphis-37)__AIY60640.1__F_DSCav1_mut4 (opt2)
gggagacccgugacccggaaguuguacggcuacgcgacuuucccucccacaaacccucgcgcccuuccuuuccuacuugggcccggcagaaagcuuaccauggagcuccccauccucaagaccaacgccaucaccaccauccucgccgccgucacccucugcuucgccuccucccagaacaucaccgaggaguucuaccaguccaccugcuccgccgucuccaagggcuaccucuccgcccuccgcaccggcugguacaccuccgucaucaccaucgagcucuccaacaucaaggagaacaagugcaacggcaccgacgccaaggucaagcucaucaagcaggagcucgacaaguacaagaacgccgucaccgagcuccagcuccucaugcaguccacccccgccgccggcuccggcuccgccaucugcuccggcaucgccgucugcaagguccuccaccucgagggcgaggucaacaagaucaagaacgcccuccucuccaccaacaaggccgucgucucccucuccaacggcgucuccguccucaccuucaagguccucgaccucaagaacuacaucgacaagcagcuccuccccauccucaacaagcaguccugcuccaucuccaacaucgagaccgucaucgaguuccagcagaagaacaaccgccuccucgagaucacccgcgaguucuccgucaacgccggcgucaccacccccgucuccaccuacaugcucaccaacuccgagcuccucucccucaucaacgacaugcccaucaccaacgaccagaagaagcucauguccaacaacguccagaucguccgccagcaguccuacuccaucaugugcaucaucaaggaggagguccucgccuacgucguccagcucccccucuacggcgucaucgacacccccugcuggaagcuccacaccuccccccucugcaccaccaacaccaaggagggcuccaacaucugccucacccgcaccgaccgcggcugguacugcgacaacgccggcuccgucuccuucuucccccaggccgagaccugcaagguccaguccaaccgcgucuucugcgacaccaugaacucccgcacccuccccuccgaggucaaccucugcaacaucgacaucuucaaccccaaguacgacugcaagaucaugaccuccaagaccgacgucuccuccuccgucaucaccucccucggcgccaucgucuccugcuacggcaagaccaagugcaccgccuccaacaagaaccgcggcaucaucaagaccuucuccaacggcugcgacuacgucuccaacaagggcgucgacaccgucuccgucggcaacacccucuacugcgucaacaagcaggagggcaagucccucuacgucaagggcgagcccaucaucaacuucuacgacccccucgucuuccccuccgacgaguucgacgccuccaucucccaggucaacgagaagaucaaccagucccucgccuucauccgcaaguccgacgagcuccuccacaacgucaacgucggcaaguccaccaccaacaucaugaucaccaccaucaucaucgucaucaucgucauccuccuccuccucaucgccgucggccucuuccucuacugcaaggcccgcuccacccccgucacccucuccaaggaccagcucuccggcaucaacaacaucgccuucuccaacugaggacuaguggaagcauuuuccuggcugauuaaaagaaauuacucagcuauggucaucuguuccuguuagaaggcuaugcagcauauuauauacuaugcgcauguuaugaaaugcauaauaaaaaauuuuaaaaaaucuaaaagaucuaaaaaaaaaaaaaaaaaaaaaaaaaaaaaaaaaaaaaaaaaaaaaaaaaaaaaaaaaaaaaaaaugcaucccccccccccccccccccccccccccccccaaaggcucuuuucagagccaccagaauu

SEQ ID NO: 16470 - RNA, 1982 nt, Artificial Sequence
  mRNA product Design h-3 comprising derived and/or modified sequence from HRSV(Memphis-37)__AIY60640.1__F_DSCav1_mut4 (opt3)
gggagacccgugacccggaaguuguacggcuacgcgacuuucccucccacaaacccucgcgcccuuccuuuccuacuugggcccggcagaaagcuuaccauggagcugcccauccucaagaccaacgccauuacaacuauacuugcugcagugacgcugugcuucgccagcucccagaauaucaccgaagaguuuuaccaaucuacauguucagcggucaguaaaggcuauuugagcgcuuuaagaacugggugguacaccuccguuauuacaaucgaacugucuaacauuaaggagaauaaaugcaacggaaccgacgccaaggugaaacuaaucaagcaggaacucgauaaguauaaaaaugcaguaacugagcugcagcuucugaugcagucgaccccugccgcugguucaggcagcgcaauauguagugggaucgccgugugcaaggucuugcaccucgagggagaagugaacaaaauuaagaaugcucugcuguccacaaacaaagccguugugucucucagcaauggcgucuccguguuaacguucaagguacuggaccuuaagaacuacaucgauaaacaauugcugccaauucuaaauaagcagucauguaguaucagcaacauagagacuguuauugaauuucagcagaaaaauaacaggcuccuggagaucacccgggaguucucugugaaugcgggugucacaacuccgguguccaccuauaugcuuacaaacucagaacuguugagccucauuaacgacaugcccaucaccaaugaucaaaagaaacugaugaguaacaaugugcagaucguccgccagcagucuuacuccauuaugugcauaaucaaggaggaaguuuuagcauaugugguacaacugccucucuacggggugauugacacgccauguuggaaacuucauacuagcccccugugcacaaccaacacuaaggagggaucgaauaucuguuugacacgaaccgaucguggcugguacugcgacaacgccggcucugucuccuuuuucccucaggcugaaacguguaaggugcagucaaauagaguguuuugcgauaccaugaacaguagaacacugccaagcgaggugaaucucugcaacauagacauuuucaaucccaaauaugauuguaagaucaugacuuccaaaaccgacgucucuagcucagugaucacaagucugggggccauuguauccugcuacggaaagacuaaauguaccgcaagcaacaagaauagggguaucauuaagacauuuucuaacggcugcgauuauguuucaaauaaagggguggacaccgucagugugggaaacacucuuuacugugucaacaagcaagagggcaaaagccuguaugugaagggugaaccuauaaucaauuucuacgacccauugguuuuuccguccgaugaguucgacgcuucuauuucgcagguuaacgagaaaaucaaucagagccucgccuuuauccggaaguccgaugaacuguuacacaacguaaaugucgggaagucaacgacaaacauuaugauaaccacuaucauuaucgugauuaucguuauacugcuacuccugaucgcggugggacuuuucuuguauugcaaagcccgcaguacccccgucacacugucuaaggaccagcucagcggcauuaauaacaucgcauucuccaauugaggacuaguggaagcauuuuccuggcugauuaaaagaaauuacucagcuauggucaucuguuccuguuagaaggcuaugcagcauauuauauacuaugcgcauguuaugaaaugcauaauaaaaaauuuuaaaaaaucuaaaagaucuaaaaaaaaaaaaaaaaaaaaaaaaaaaaaaaaaaaaaaaaaaaaaaaaaaaaaaaaaaaaaaaaugcaucccccccccccccccccccccccccccccccaaaggcucuuuucagagccaccagaauu

SEQ ID NO: 16471 - RNA, 1982 nt, Artificial Sequence
  mRNA product Design h-3 comprising derived and/or modified sequence from HRSV(Memphis-37)__AIY60640.1__F_DSCav1_mut4 (opt4)
gggagacccgugacccggaaguuguacggcuacgcgacuuucccucccacaaacccucgcgcccuuccuuuccuacuugggcccggcagaaagcuuaccauggagcugcccauccugaagaccaacgccaucaccaccauccuggccgccgugacccugugcuucgccagcagccagaacaucaccgaggaguucuaccagagcaccugcagcgccgugagcaagggcuaccugagcgcccugagaaccggcugguacaccagcgugaucaccaucgagcugagcaacaucaaggagaacaagugcaacggcaccgacgccaaggugaagcugaucaagcaggagcuggacaaguacaagaacgccgugaccgagcugcagcugcugaugcagagcacccccgccgccggcagcggcagcgccaucugcagcggcaucgccgugugcaaggugcugcaccuggagggcgaggugaacaagaucaagaacgcccugcugagcaccaacaaggccguggugagccugagcaacggcgugagcgugcugaccuucaaggugcuggaccugaagaacuacaucgacaagcagcugcugcccauccugaacaagcagagcugcagcaucagcaacaucgagaccgugaucgaguuccagcagaagaacaacagacugcuggagaucaccagagaguucagcgugaacgccggcgugaccacccccgugagcaccuacaugcugaccaacagcgagcugcugagccugaucaacgacaugcccaucaccaacgaccagaagaagcugaugagcaacaacgugcagaucgugagacagcagagcuacagcaucaugugcaucaucaaggaggaggugcuggccuacguggugcagcugccccuguacggcgugaucgacacccccugcuggaagcugcacaccagcccccugugcaccaccaacaccaaggagggcagcaacaucugccugaccagaaccgacagaggcugguacugcgacaacgccggcagcgugagcuucuucccccaggccgagaccugcaaggugcagagcaacagaguguucugcgacaccaugaacagcagaacccugcccagcgaggugaaccugugcaacaucgacaucuucaaccccaaguacgacugcaagaucaugaccagcaagaccgacgugagcagcagcgugaucaccagccugggcgccaucgugagcugcuacggcaagaccaagugcaccgccagcaacaagaacagaggcaucaucaagaccuucagcaacggcugcgacuacgugagcaacaagggcguggacaccgugagcgugggcaacacccuguacugcgugaacaagcaggagggcaagagccuguacgugaagggcgagcccaucaucaacuucuacgacccccugguguuccccagcgacgaguucgacgccagcaucagccaggugaacgagaagaucaaccagagccuggccuucaucagaaagagcgacgagcugcugcacaacgugaacgugggcaagagcaccaccaacaucaugaucaccaccaucaucaucgugaucaucgugauccugcugcugcugaucgccgugggccuguuccuguacugcaaggccagaagcacccccgugacccugagcaaggaccagcugagcggcaucaacaacaucgccuucagcaacugaggacuaguggaagcauuuuccuggcugauuaaaagaaauuacucagcuauggucaucuguuccuguuagaaggcuaugcagcauauuauauacuaugcgcauguuaugaaaugcauaauaaaaaauuuuaaaaaaucuaaaagaucuaaaaaaaaaaaaaaaaaaaaaaaaaaaaaaaaaaaaaaaaaaaaaaaaaaaaaaaaaaaaaaaaugcaucccccccccccccccccccccccccccccccaaaggcucuuuucagagccaccagaauu

SEQ ID NO: 16472 - RNA, 1982 nt, Artificial Sequence
  mRNA product Design h-3 comprising derived and/or modified sequence from HRSV(Memphis-37)__AIY60640.1__F_DSCav1_mut4 (opt5)
gggagacccgugacccggaaguuguacggcuacgcgacuuucccucccacaaacccucgcgcccuuccuuuccuacuugggcccggcagaaagcuuaccauggagcugcccauccucaagaccaacgccauuacaacgauccuggcugccgugacccuuugcuucgcgagcucccagaauauuacagaagaguuuuaccaaucuaccuguagcgcugucuccaaaggcuaucugucugcccucagaacagggugguacaccagcguuaucacaauugaacuguccaacaucaaggagaauaaaugcaacggaaccgacgccaaggugaaacuuaucaagcaggaacuggauaaguauaaaaaugcugugacggagcuccagcugcugaugcagucuaccccugccgcuggcagcggguccgccauuuguagcggaaucgcggucugcaaggugcuccaccuggagggcgaaguuaacaaaauuaagaaugcccuucugucuacaaacaaagcuguggucucccucagcaauggggugucuguucugaccuucaaggugcuugaccugaagaacuacaucgauaaacaacuccugccgauucugaauaagcaguccuguagcaucucuaacauugagacagucaucgaauuucagcagaaaaauaaccggcuccuggagaucacccgcgaguucuccgugaaugccggagugacgacacccgucagcaccuauaugcuuacaaacuccgaacugcucucucugauuaacgacaugccuaucaccaaugaucaaaagaaacuuaugagcaacaauguucagauugugagacagcaguccuacagcaucaugugcauuaucaaggaggaagugcuggcuuaugucgugcaacucccccuguacggcguuaucgacaccccuuguuggaaacugcauacaucuccccucugcacgaccaacacaaaggagggcuccaauauuugucugacccggacagaucgcgggugguacugcgacaacgccggaagcgugagcuuuuucccucaggcggaaaccuguaagguccagucuaauagaguguuuugcgauacgaugaacuccagaacacugccgucugagguuaaucucugcaacaucgacauuuucaaucccaaauaugauuguaagaucaugaccagcaaaaccgacguguccagcucugucauuacaucccugggcgccaucgugagcugcuacgggaagaccaaauguacagcuucuaacaagaaucggggaaucauuaagacguuuuccaacggcugcgauuaugucagcaauaaagggguggacaccguuuccgugggaaacacacuuuacugugucaacaagcaagagggcaaaucucuguaugugaagggcgaaccuaucauuaauuucuacgacccccucguuuuuccuagcgaugaguucgacgccuccaucucucaggugaacgaaaagauuaaucagagccuggcuuuuauccgcaaguccgaugagcugcuccacaacgucaauguggggaaaagcaccacaaacauuaugaucaccacgaucauuaucgugauuaucguuauucugcuucugcucaucgccgucggacuguuccuguauugcaaagccagaucuacccccgugacacuuuccaaggaccagcucagcggcaucaauaacauugcuuucucuaauugaggacuaguggaagcauuuuccuggcugauuaaaagaaauuacucagcuauggucaucuguuccuguuagaaggcuaugcagcauauuauauacuaugcgcauguuaugaaaugcauaauaaaaaauuuuaaaaaaucuaaaagaucuaaaaaaaaaaaaaaaaaaaaaaaaaaaaaaaaaaaaaaaaaaaaaaaaaaaaaaaaaaaaaaaaugcaucccccccccccccccccccccccccccccccaaaggcucuuuucagagccaccagaauu

SEQ ID NO: 16473 - RNA, 1982 nt, Artificial Sequence
  mRNA product Design h-3 comprising derived and/or modified sequence from HRSV(Memphis-37)__AIY60640.1__F_DSCav1_mut4 (opt6)
gggagacccgugacccggaaguuguacggcuacgcgacuuucccucccacaaacccucgcgcccuuccuuuccuacuugggcccggcagaaagcuuaccauggaacucccaauccuaaaaacaaacgcaauaacaacaauauuagcagccguaacacucuguuucgccucaucccaaaacauaacagaagaauuuuaucaaucuacauguuccgccgucaguaaaggauaucuaucagccuuaagaacaggcugguacacaucaguaaucaccauagaauuauccaacauaaaagaaaacaaaugcaauggcacagaugccaaaguaaaacuaaucaaacaagaacuugauaaauauaaaaacgcaguaacagaauuacaauuauuaaugcaaagcacaccagccgcaggaucaggaucagcaauauguucaggaauagcagucuguaaaguacuacacuuagaaggagaaguaaacaaaauuaaaaacgcauuacuaagcaccaauaaagcaguaguaucacuaucaaacggcguauccguauuaacguucaaaguccucgaccugaaaaacuacauagauaaacaacuacuaccaauacuaaauaaacaaucaugcucaauaucaaacauagaaacuguuaucgaauuucaacagaaaaauaaccgacuacuagaaaucaccagagaauuuucaguaaacgcaggcgucacuacaccaguauccacauacaugcuaaccaacucggaauuacuuucccucauaaacgacaugccaauaacaaacgaccaaaagaaacuuaugucaaacaacguucaaauaguccgccaacaaucauacucaauaauguguaucauaaaagaagaaguccuagcauaugucguacaacuaccauuauacggaguaauugacacaccuugcuggaaacuacacacauccccacuauguacaacaaacacuaaagaaggaucaaacaucugccuaaccagaacagacagaggcugguauugcgacaacgcaggaucaguaucauucuucccacaagcagaaacaugcaaaguacaaucaaacagagucuucugcgacaccaugaacagcagaacccucccauccgaaguaaacuuaugcaacaucgauaucuucaacccaaaauacgacuguaaaauaaugacaucaaaaacagacguuucauccucaguaauaacaucauuaggugccauaguuucauguuacggaaaaaccaaauguaccgcaucaaacaaaaacagaggcauuauuaaaacauucucuaacggaugcgacuaugucaguaacaaaggaguagacacaguaucagucggaaacacauuauauugcguaaauaaacaagaaggaaaaagucuauacguaaaaggagaaccaauaauaaacuuuuacgacccucucguauucccaucagacgaauuugaugcauccauaucacaagucaacgaaaagauaaaccaaucccuagcauucauaagaaaaucagacgaacuacuccauaacguaaacguaggaaaaagcacaaccaauauaaugauaaccacaauaaucauaguaauaauagucauauuauuacuuuuaauugcaguaggacucuuucuauacugcaaagcaagaagcacaccaguaacacuaagcaaagaccaacuaucaggcaucaacaauaucgccuuuucaaauuaaggacuaguggaagcauuuuccuggcugauuaaaagaaauuacucagcuauggucaucuguuccuguuagaaggcuaugcagcauauuauauacuaugcgcauguuaugaaaugcauaauaaaaaauuuuaaaaaaucuaaaagaucuaaaaaaaaaaaaaaaaaaaaaaaaaaaaaaaaaaaaaaaaaaaaaaaaaaaaaaaaaaaaaaaaugcaucccccccccccccccccccccccccccccccaaaggcucuuuucagagccaccagaauu

SEQ ID NO: 16474 - RNA, 1982 nt, Artificial Sequence
  mRNA product Design h-3 comprising derived and/or modified sequence from HRSV(Memphis-37)__AIY60640.1__F_DSCav1_mut4 (opt11)
gggagacccgugacccggaaguuguacggcuacgcgacuuucccucccacaaacccucgcgcccuuccuuuccuacuugggcccggcagaaagcuuaccauggagcugcccauccucaagaccaacgccaucaccacgauccuggccgcggugacccugugcuucgcgagcucccagaacaucaccgaggaguucuaccagagcacgugcuccgccgucagcaagggcuaccucuccgcccugcgcaccgggugguacaccagcgugaucaccaucgagcuguccaacaucaaggagaacaagugcaacggcaccgacgccaaggugaaacucaucaagcaggagcuggacaaguacaagaacgccgucaccgagcugcagcuccugaugcagagcaccccggccgccggguccggcagcgcuaucugcuccgggaucgcggugugcaaggugcugcaccucgagggcgaggucaacaagaucaagaaugcccugcugagcaccaacaaggccguggugucccucagcaacggagucagcgugcuuaccuucaaggugcuggaccucaagaacuacaucgacaagcagcugcugccuauccucaacaagcagagcugcuccaucagcaacaucgagacggucaucgaguuccagcagaagaacaaccggcugcuggagaucacccgcgaguucuccgugaacgccggggugaccacccccgucagcacguacaugcucaccaacagcgaacugcugucccucaucaacgacaugcccaucaccaacgaccagaagaagcugaugagcaacaacgugcagaucgugcggcagcaguccuacagcaucaugugcaucaucaaggaggaaguccuggccuacguggugcagcucccucuguacggcgucaucgacacccccugcuggaagcugcacacgagcccccucugcaccaccaacaccaaggagggguccaacaucugccugacgcgcaccgaccggggcugguacugcgacaacgcgggguccgugagcuucuucccccaggccgagaccugcaaggugcagagcaaccgcgucuucugcgacacuaugaacagcagaacgcucccguccgaggugaaccugugcaacauagacauauucaaccccaaguacgacugcaagaucaugaccagcaagaccgacgucuccagcuccgugauuaccagccugggcgcaaucguguccugcuacggcaagacgaagugcaccgccagcaacaagaaccgggggaucaucaagaccuucuccaacggcugcgacuaugucagcaacaaggggguggacaccgugagcgucggaaacacgcucuacugcgugaacaagcaagagggcaaguccuuauacgugaagggggagcccaucaucaacuucuacgacccccuggucuucccgagcgacgaguucgacgccagcauaagccaggugaacgagaagaucaaccagucccucgcguucauccgcaagagcgacgagcugcugcacaacgugaacgucggcaaguccaccaccaacaucaugaucaccaccaucaucaucgugaucaucgugauccuccugcugcucaucgccgucgggcuguuccuguacugcaaggcccggagcacgcccgugaccuuguccaaggaccagcucagcggcaucaacaacaucgccuucuccaacugaggacuaguggaagcauuuuccuggcugauuaaaagaaauuacucagcuauggucaucuguuccuguuagaaggcuaugcagcauauuauauacuaugcgcauguuaugaaaugcauaauaaaaaauuuuaaaaaaucuaaaagaucuaaaaaaaaaaaaaaaaaaaaaaaaaaaaaaaaaaaaaaaaaaaaaaaaaaaaaaaaaaaaaaaaugcaucccccccccccccccccccccccccccccccaaaggcucuuuucagagccaccagaauu

SEQ ID NO: 16475 - RNA, 2045 nt, Artificial Sequence
  mRNA product Design h-4 comprising derived and/or modified sequence from HRSV(Memphis-37)__AIY60640.1__F_DSCav1_mut4 (opt1)
gggagagggcgcuuggcuugcaaggacccugagcugcggcauugaagcacacccaacccaacucgacugaagucagccucacugaaccggaucugagaaucuucucucucugggcuugccagggcucuccgaaccuagcuagcauccucuucaauuccaacuagaaagcuuaccauggagcugcccauccucaagaccaacgccaucaccacgauccuggccgcggugacccugugcuucgccagcucccagaacaucaccgaggaguucuaccagagcacgugcuccgccgucagcaagggcuaccucuccgcccugcgcaccgggugguacaccagcgugaucaccaucgagcuguccaacaucaaggagaacaagugcaacggcaccgacgccaaggugaagcucaucaagcaggagcuggacaaguacaagaacgcggucacggagcugcagcuccugaugcagagcaccccggccgccggcuccgggagcgcgaucugcuccggcaucgccgucugcaaggugcugcaccucgagggcgaggugaacaagaucaagaacgcccugcuguccaccaacaaggccgucgugagccucuccaacggggugagcguccugaccuucaaggugcuggaccucaagaacuacaucgacaagcagcugcugcccauccugaacaagcagagcugcuccaucagcaacaucgagaccgucaucgaguuccagcagaagaacaaccgccuccuggagaucacgcgggaguucagcgugaacgcgggcgugaccacccccgucuccaccuacaugcugacgaacagcgagcuccugucccugaucaacgacaugccgaucaccaacgaccagaagaagcucaugagcaacaacgugcagaucgugcgccagcaguccuacagcaucaugugcaucaucaaggaggagguccuggccuacguggugcagcugccccucuacggggucaucgacacccccugcuggaagcugcacaccagcccccugugcacgaccaacaccaaggagggcuccaacaucugccucacccggacggaccgcgggugguacugcgacaacgccggcagcguguccuucuucccgcaggccgagaccugcaagguccagagcaaccggguguucugcgacaccaugaacucccggacccugcccagcgaggugaaccucugcaacaucgacaucuucaaccccaaguacgacugcaagaucaugacguccaagaccgacgucagcuccagcgugaucaccucccugggcgccaucgugagcugcuacgggaagaccaagugcacggcgagcaacaagaaccgcggcaucaucaagaccuucuccaacgggugcgacuacgucagcaacaagggcguggacaccguguccgucggcaacacccuguacugcgugaacaagcaggagggcaagagccucuacgugaagggggagcccaucaucaacuucuacgacccgcuggucuuccccuccgacgaguucgacgccagcaucucccaggugaacgagaagaucaaccagagccuggccuucauccggaaguccgacgagcuccugcacaacgugaacgucggcaagagcaccacgaacaucaugaucaccaccaucaucaucgugaucaucgugauccugcugcuccugaucgccgucgggcuguuccucuacugcaaggcccgcuccacccccgugacgcugagcaaggaccagcuguccgggaucaacaacaucgcguucagcaacugaggacuaguaauaaggaaacuguaugaaugucugugggcaggaagugaagagauccuucuguaaagguuuuuggaauuaugucugcugaauaauaaacuuuuuugaaauaauaaaucugguagaaaaaugagaucuaaaaaaaaaaaaaaaaaaaaaaaaaaaaaaaaaaaaaaaaaaaaaaaaaaaaaaaaaaaaaaaaugcaucccccccccccccccccccccccccccccccaaaggcucuuuucagagccaccagaauu

SEQ ID NO: 16476 - RNA, 2045 nt, Artificial Sequence
  mRNA product Design h-4 comprising derived and/or modified sequence from HRSV(Memphis-37)__AIY60640.1__F_DSCav1_mut4 (opt1)
gggagagggcgcuuggcuugcaaggacccugagcugcggcauugaagcacacccaacccaacucgacugaagucagccucacugaaccggaucugagaaucuucucucucugggcuugccagggcucuccgaaccuagcuagcauccucuucaauuccaacuagaaagcuuaccauggagcugcccauccucaagaccaacgccaucaccacgauccuggccgcggugacccugugcuucgccagcucccagaacaucaccgaggaguucuaccagagcacgugcuccgccgucagcaagggcuaccucuccgcccugcgcaccgggugguacaccagcgugaucaccaucgagcuguccaacaucaaggagaacaagugcaacggcaccgacgccaaggugaagcucaucaagcaggagcuggacaaguacaagaacgcggucacggagcugcagcuccugaugcagagcaccccggccgccggguccggcagcgccaucugcuccgggaucgcggugugcaaggugcugcaccucgagggcgaggucaacaagaucaagaacgcccugcugagcaccaacaaggccguggugucccucagcaacggcgucuccgugcugaccuucaaggugcuggaccucaagaacuacaucgacaagcagcugcugcccauccucaacaagcagagcugcuccaucagcaacaucgagacggucaucgaguuccagcagaagaacaaccggcugcuggagaucacccgcgaguucuccgugaacgccggggugaccacccccgucagcacguacaugcucaccaacagcgagcugcugucccucaucaacgacaugcccaucaccaacgaccagaagaagcugaugagcaacaacgugcagaucgugcggcagcaguccuacagcaucaugugcaucaucaaggaggagguccuggccuacguggugcagcucccgcuguacggcgucaucgacacccccugcuggaagcugcacacgagcccccucugcaccaccaacaccaaggagggguccaacaucugccugacgcgcaccgaccggggcugguacugcgacaacgcgggguccgugagcuucuucccccaggccgagaccugcaaggugcaguccaaccgcgucuucugcgacaccaugaacagccggacgcucccguccgaggugaaccugugcaacaucgacaucuucaaccccaaguacgacugcaagaucaugaccagcaagaccgacgucuccagcuccgugaucaccagccugggcgccaucguguccugcuacggcaagacgaagugcaccgccagcaacaagaaccgggggaucaucaagaccuucuccaacggcugcgacuacgucagcaacaaggggguggacaccgugagcgucggcaacacgcucuacugcgugaacaagcaggagggcaagucccuguacgugaagggggagcccaucaucaacuucuacgacccccuggucuucccgagcgacgaguucgacgccuccaucagccaggugaacgagaagaucaaccagucccucgcguucauccgcaagagcgacgagcugcugcacaacgugaacgucggcaaguccaccaccaacaucaugaucaccaccaucaucaucgugaucaucgugauccuccugcugcucaucgccgucgggcuguuccuguacugcaaggcccggagcacgcccgugacccuguccaaggaccagcucagcggcaucaacaacaucgccuucuccaacugaggacuaguaauaaggaaacuguaugaaugucugugggcaggaagugaagagauccuucuguaaagguuuuuggaauuaugucugcugaauaauaaacuuuuuugaaauaauaaaucugguagaaaaaugagaucuaaaaaaaaaaaaaaaaaaaaaaaaaaaaaaaaaaaaaaaaaaaaaaaaaaaaaaaaaaaaaaaaugcaucccccccccccccccccccccccccccccccaaaggcucuuuucagagccaccagaauu

SEQ ID NO: 16477 - RNA, 2045 nt, Artificial Sequence
  mRNA product Design h-4 comprising derived and/or modified sequence from HRSV(Memphis-37)__AIY60640.1__F_DSCav1_mut4 (opt2)
gggagagggcgcuuggcuugcaaggacccugagcugcggcauugaagcacacccaacccaacucgacugaagucagccucacugaaccggaucugagaaucuucucucucugggcuugccagggcucuccgaaccuagcuagcauccucuucaauuccaacuagaaagcuuaccauggagcuccccauccucaagaccaacgccaucaccaccauccucgccgccgucacccucugcuucgccuccucccagaacaucaccgaggaguucuaccaguccaccugcuccgccgucuccaagggcuaccucuccgcccuccgcaccggcugguacaccuccgucaucaccaucgagcucuccaacaucaaggagaacaagugcaacggcaccgacgccaaggucaagcucaucaagcaggagcucgacaaguacaagaacgccgucaccgagcuccagcuccucaugcaguccacccccgccgccggcuccggcuccgccaucugcuccggcaucgccgucugcaagguccuccaccucgagggcgaggucaacaagaucaagaacgcccuccucuccaccaacaaggccgucgucucccucuccaacggcgucuccguccucaccuucaagguccucgaccucaagaacuacaucgacaagcagcuccuccccauccucaacaagcaguccugcuccaucuccaacaucgagaccgucaucgaguuccagcagaagaacaaccgccuccucgagaucacccgcgaguucuccgucaacgccggcgucaccacccccgucuccaccuacaugcucaccaacuccgagcuccucucccucaucaacgacaugcccaucaccaacgaccagaagaagcucauguccaacaacguccagaucguccgccagcaguccuacuccaucaugugcaucaucaaggaggagguccucgccuacgucguccagcucccccucuacggcgucaucgacacccccugcuggaagcuccacaccuccccccucugcaccaccaacaccaaggagggcuccaacaucugccucacccgcaccgaccgcggcugguacugcgacaacgccggcuccgucuccuucuucccccaggccgagaccugcaagguccaguccaaccgcgucuucugcgacaccaugaacucccgcacccuccccuccgaggucaaccucugcaacaucgacaucuucaaccccaaguacgacugcaagaucaugaccuccaagaccgacgucuccuccuccgucaucaccucccucggcgccaucgucuccugcuacggcaagaccaagugcaccgccuccaacaagaaccgcggcaucaucaagaccuucuccaacggcugcgacuacgucuccaacaagggcgucgacaccgucuccgucggcaacacccucuacugcgucaacaagcaggagggcaagucccucuacgucaagggcgagcccaucaucaacuucuacgacccccucgucuuccccuccgacgaguucgacgccuccaucucccaggucaacgagaagaucaaccagucccucgccuucauccgcaaguccgacgagcuccuccacaacgucaacgucggcaaguccaccaccaacaucaugaucaccaccaucaucaucgucaucaucgucauccuccuccuccucaucgccgucggccucuuccucuacugcaaggcccgcuccacccccgucacccucuccaaggaccagcucuccggcaucaacaacaucgccuucuccaacugaggacuaguaauaaggaaacuguaugaaugucugugggcaggaagugaagagauccuucuguaaagguuuuuggaauuaugucugcugaauaauaaacuuuuuugaaauaauaaaucugguagaaaaaugagaucuaaaaaaaaaaaaaaaaaaaaaaaaaaaaaaaaaaaaaaaaaaaaaaaaaaaaaaaaaaaaaaaaugcaucccccccccccccccccccccccccccccccaaaggcucuuuucagagccaccagaauu

SEQ ID NO: 16478 - RNA, 2045 nt, Artificial Sequence
  mRNA product Design h-4 comprising derived and/or modified sequence from HRSV(Memphis-37)__AIY60640.1__F_DSCav1_mut4 (opt3)
gggagagggcgcuuggcuugcaaggacccugagcugcggcauugaagcacacccaacccaacucgacugaagucagccucacugaaccggaucugagaaucuucucucucugggcuugccagggcucuccgaaccuagcuagcauccucuucaauuccaacuagaaagcuuaccauggagcugcccauccucaagaccaacgccauuacaacuauacuugcugcagugacgcugugcuucgccagcucccagaauaucaccgaagaguuuuaccaaucuacauguucagcggucaguaaaggcuauuugagcgcuuuaagaacugggugguacaccuccguuauuacaaucgaacugucuaacauuaaggagaauaaaugcaacggaaccgacgccaaggugaaacuaaucaagcaggaacucgauaaguauaaaaaugcaguaacugagcugcagcuucugaugcagucgaccccugccgcugguucaggcagcgcaauauguagugggaucgccgugugcaaggucuugcaccucgagggagaagugaacaaaauuaagaaugcucugcuguccacaaacaaagccguugugucucucagcaauggcgucuccguguuaacguucaagguacuggaccuuaagaacuacaucgauaaacaauugcugccaauucuaaauaagcagucauguaguaucagcaacauagagacuguuauugaauuucagcagaaaaauaacaggcuccuggagaucacccgggaguucucugugaaugcgggugucacaacuccgguguccaccuauaugcuuacaaacucagaacuguugagccucauuaacgacaugcccaucaccaaugaucaaaagaaacugaugaguaacaaugugcagaucguccgccagcagucuuacuccauuaugugcauaaucaaggaggaaguuuuagcauaugugguacaacugccucucuacggggugauugacacgccauguuggaaacuucauacuagcccccugugcacaaccaacacuaaggagggaucgaauaucuguuugacacgaaccgaucguggcugguacugcgacaacgccggcucugucuccuuuuucccucaggcugaaacguguaaggugcagucaaauagaguguuuugcgauaccaugaacaguagaacacugccaagcgaggugaaucucugcaacauagacauuuucaaucccaaauaugauuguaagaucaugacuuccaaaaccgacgucucuagcucagugaucacaagucugggggccauuguauccugcuacggaaagacuaaauguaccgcaagcaacaagaauagggguaucauuaagacauuuucuaacggcugcgauuauguuucaaauaaagggguggacaccgucagugugggaaacacucuuuacugugucaacaagcaagagggcaaaagccuguaugugaagggugaaccuauaaucaauuucuacgacccauugguuuuuccguccgaugaguucgacgcuucuauuucgcagguuaacgagaaaaucaaucagagccucgccuuuauccggaaguccgaugaacuguuacacaacguaaaugucgggaagucaacgacaaacauuaugauaaccacuaucauuaucgugauuaucguuauacugcuacuccugaucgcggugggacuuuucuuguauugcaaagcccgcaguacccccgucacacugucuaaggaccagcucagcggcauuaauaacaucgcauucuccaauugaggacuaguaauaaggaaacuguaugaaugucugugggcaggaagugaagagauccuucuguaaagguuuuuggaauuaugucugcugaauaauaaacuuuuuugaaauaauaaaucugguagaaaaaugagaucuaaaaaaaaaaaaaaaaaaaaaaaaaaaaaaaaaaaaaaaaaaaaaaaaaaaaaaaaaaaaaaaaugcaucccccccccccccccccccccccccccccccaaaggcucuuuucagagccaccagaauu

SEQ ID NO: 16479 - RNA, 2045 nt, Artificial Sequence
  mRNA product Design h-4 comprising derived and/or modified sequence from HRSV(Memphis-37)__AIY60640.1__F_DSCav1_mut4 (opt4)
gggagagggcgcuuggcuugcaaggacccugagcugcggcauugaagcacacccaacccaacucgacugaagucagccucacugaaccggaucugagaaucuucucucucugggcuugccagggcucuccgaaccuagcuagcauccucuucaauuccaacuagaaagcuuaccauggagcugcccauccugaagaccaacgccaucaccaccauccuggccgccgugacccugugcuucgccagcagccagaacaucaccgaggaguucuaccagagcaccugcagcgccgugagcaagggcuaccugagcgcccugagaaccggcugguacaccagcgugaucaccaucgagcugagcaacaucaaggagaacaagugcaacggcaccgacgccaaggugaagcugaucaagcaggagcuggacaaguacaagaacgccgugaccgagcugcagcugcugaugcagagcacccccgccgccggcagcggcagcgccaucugcagcggcaucgccgugugcaaggugcugcaccuggagggcgaggugaacaagaucaagaacgcccugcugagcaccaacaaggccguggugagccugagcaacggcgugagcgugcugaccuucaaggugcuggaccugaagaacuacaucgacaagcagcugcugcccauccugaacaagcagagcugcagcaucagcaacaucgagaccgugaucgaguuccagcagaagaacaacagacugcuggagaucaccagagaguucagcgugaacgccggcgugaccacccccgugagcaccuacaugcugaccaacagcgagcugcugagccugaucaacgacaugcccaucaccaacgaccagaagaagcugaugagcaacaacgugcagaucgugagacagcagagcuacagcaucaugugcaucaucaaggaggaggugcuggccuacguggugcagcugccccuguacggcgugaucgacacccccugcuggaagcugcacaccagcccccugugcaccaccaacaccaaggagggcagcaacaucugccugaccagaaccgacagaggcugguacugcgacaacgccggcagcgugagcuucuucccccaggccgagaccugcaaggugcagagcaacagaguguucugcgacaccaugaacagcagaacccugcccagcgaggugaaccugugcaacaucgacaucuucaaccccaaguacgacugcaagaucaugaccagcaagaccgacgugagcagcagcgugaucaccagccugggcgccaucgugagcugcuacggcaagaccaagugcaccgccagcaacaagaacagaggcaucaucaagaccuucagcaacggcugcgacuacgugagcaacaagggcguggacaccgugagcgugggcaacacccuguacugcgugaacaagcaggagggcaagagccuguacgugaagggcgagcccaucaucaacuucuacgacccccugguguuccccagcgacgaguucgacgccagcaucagccaggugaacgagaagaucaaccagagccuggccuucaucagaaagagcgacgagcugcugcacaacgugaacgugggcaagagcaccaccaacaucaugaucaccaccaucaucaucgugaucaucgugauccugcugcugcugaucgccgugggccuguuccuguacugcaaggccagaagcacccccgugacccugagcaaggaccagcugagcggcaucaacaacaucgccuucagcaacugaggacuaguaauaaggaaacuguaugaaugucugugggcaggaagugaagagauccuucuguaaagguuuuuggaauuaugucugcugaauaauaaacuuuuuugaaauaauaaaucugguagaaaaaugagaucuaaaaaaaaaaaaaaaaaaaaaaaaaaaaaaaaaaaaaaaaaaaaaaaaaaaaaaaaaaaaaaaaugcaucccccccccccccccccccccccccccccccaaaggcucuuuucagagccaccagaauu

SEQ ID NO: 16480 - RNA, 2045 nt, Artificial Sequence
  mRNA product Design h-4 comprising derived and/or modified sequence from HRSV(Memphis-37)__AIY60640.1__F_DSCav1_mut4 (opt5)
gggagagggcgcuuggcuugcaaggacccugagcugcggcauugaagcacacccaacccaacucgacugaagucagccucacugaaccggaucugagaaucuucucucucugggcuugccagggcucuccgaaccuagcuagcauccucuucaauuccaacuagaaagcuuaccauggagcugcccauccucaagaccaacgccauuacaacgauccuggcugccgugacccuuugcuucgcgagcucccagaauauuacagaagaguuuuaccaaucuaccuguagcgcugucuccaaaggcuaucugucugcccucagaacagggugguacaccagcguuaucacaauugaacuguccaacaucaaggagaauaaaugcaacggaaccgacgccaaggugaaacuuaucaagcaggaacuggauaaguauaaaaaugcugugacggagcuccagcugcugaugcagucuaccccugccgcuggcagcggguccgccauuuguagcggaaucgcggucugcaaggugcuccaccuggagggcgaaguuaacaaaauuaagaaugcccuucugucuacaaacaaagcuguggucucccucagcaauggggugucuguucugaccuucaaggugcuugaccugaagaacuacaucgauaaacaacuccugccgauucugaauaagcaguccuguagcaucucuaacauugagacagucaucgaauuucagcagaaaaauaaccggcuccuggagaucacccgcgaguucuccgugaaugccggagugacgacacccgucagcaccuauaugcuuacaaacuccgaacugcucucucugauuaacgacaugccuaucaccaaugaucaaaagaaacuuaugagcaacaauguucagauugugagacagcaguccuacagcaucaugugcauuaucaaggaggaagugcuggcuuaugucgugcaacucccccuguacggcguuaucgacaccccuuguuggaaacugcauacaucuccccucugcacgaccaacacaaaggagggcuccaauauuugucugacccggacagaucgcgggugguacugcgacaacgccggaagcgugagcuuuuucccucaggcggaaaccuguaagguccagucuaauagaguguuuugcgauacgaugaacuccagaacacugccgucugagguuaaucucugcaacaucgacauuuucaaucccaaauaugauuguaagaucaugaccagcaaaaccgacguguccagcucugucauuacaucccugggcgccaucgugagcugcuacgggaagaccaaauguacagcuucuaacaagaaucggggaaucauuaagacguuuuccaacggcugcgauuaugucagcaauaaagggguggacaccguuuccgugggaaacacacuuuacugugucaacaagcaagagggcaaaucucuguaugugaagggcgaaccuaucauuaauuucuacgacccccucguuuuuccuagcgaugaguucgacgccuccaucucucaggugaacgaaaagauuaaucagagccuggcuuuuauccgcaaguccgaugagcugcuccacaacgucaauguggggaaaagcaccacaaacauuaugaucaccacgaucauuaucgugauuaucguuauucugcuucugcucaucgccgucggacuguuccuguauugcaaagccagaucuacccccgugacacuuuccaaggaccagcucagcggcaucaauaacauugcuuucucuaauugaggacuaguaauaaggaaacuguaugaaugucugugggcaggaagugaagagauccuucuguaaagguuuuuggaauuaugucugcugaauaauaaacuuuuuugaaauaauaaaucugguagaaaaaugagaucuaaaaaaaaaaaaaaaaaaaaaaaaaaaaaaaaaaaaaaaaaaaaaaaaaaaaaaaaaaaaaaaaugcaucccccccccccccccccccccccccccccccaaaggcucuuuucagagccaccagaauu

SEQ ID NO: 16481 - RNA, 2045 nt, Artificial Sequence
  mRNA product Design h-4 comprising derived and/or modified sequence from HRSV(Memphis-37)__AIY60640.1__F_DSCav1_mut4 (opt6)
gggagagggcgcuuggcuugcaaggacccugagcugcggcauugaagcacacccaacccaacucgacugaagucagccucacugaaccggaucugagaaucuucucucucugggcuugccagggcucuccgaaccuagcuagcauccucuucaauuccaacuagaaagcuuaccauggaacucccaauccuaaaaacaaacgcaauaacaacaauauuagcagccguaacacucuguuucgccucaucccaaaacauaacagaagaauuuuaucaaucuacauguuccgccgucaguaaaggauaucuaucagccuuaagaacaggcugguacacaucaguaaucaccauagaauuauccaacauaaaagaaaacaaaugcaauggcacagaugccaaaguaaaacuaaucaaacaagaacuugauaaauauaaaaacgcaguaacagaauuacaauuauuaaugcaaagcacaccagccgcaggaucaggaucagcaauauguucaggaauagcagucuguaaaguacuacacuuagaaggagaaguaaacaaaauuaaaaacgcauuacuaagcaccaauaaagcaguaguaucacuaucaaacggcguauccguauuaacguucaaaguccucgaccugaaaaacuacauagauaaacaacuacuaccaauacuaaauaaacaaucaugcucaauaucaaacauagaaacuguuaucgaauuucaacagaaaaauaaccgacuacuagaaaucaccagagaauuuucaguaaacgcaggcgucacuacaccaguauccacauacaugcuaaccaacucggaauuacuuucccucauaaacgacaugccaauaacaaacgaccaaaagaaacuuaugucaaacaacguucaaauaguccgccaacaaucauacucaauaauguguaucauaaaagaagaaguccuagcauaugucguacaacuaccauuauacggaguaauugacacaccuugcuggaaacuacacacauccccacuauguacaacaaacacuaaagaaggaucaaacaucugccuaaccagaacagacagaggcugguauugcgacaacgcaggaucaguaucauucuucccacaagcagaaacaugcaaaguacaaucaaacagagucuucugcgacaccaugaacagcagaacccucccauccgaaguaaacuuaugcaacaucgauaucuucaacccaaaauacgacuguaaaauaaugacaucaaaaacagacguuucauccucaguaauaacaucauuaggugccauaguuucauguuacggaaaaaccaaauguaccgcaucaaacaaaaacagaggcauuauuaaaacauucucuaacggaugcgacuaugucaguaacaaaggaguagacacaguaucagucggaaacacauuauauugcguaaauaaacaagaaggaaaaagucuauacguaaaaggagaaccaauaauaaacuuuuacgacccucucguauucccaucagacgaauuugaugcauccauaucacaagucaacgaaaagauaaaccaaucccuagcauucauaagaaaaucagacgaacuacuccauaacguaaacguaggaaaaagcacaaccaauauaaugauaaccacaauaaucauaguaauaauagucauauuauuacuuuuaauugcaguaggacucuuucuauacugcaaagcaagaagcacaccaguaacacuaagcaaagaccaacuaucaggcaucaacaauaucgccuuuucaaauuaaggacuaguaauaaggaaacuguaugaaugucugugggcaggaagugaagagauccuucuguaaagguuuuuggaauuaugucugcugaauaauaaacuuuuuugaaauaauaaaucugguagaaaaaugagaucuaaaaaaaaaaaaaaaaaaaaaaaaaaaaaaaaaaaaaaaaaaaaaaaaaaaaaaaaaaaaaaaaugcaucccccccccccccccccccccccccccccccaaaggcucuuuucagagccaccagaauu

SEQ ID NO: 16482 - RNA, 2045 nt, Artificial Sequence
  mRNA product Design h-4 comprising derived and/or modified sequence from HRSV(Memphis-37)__AIY60640.1__F_DSCav1_mut4 (opt11)
gggagagggcgcuuggcuugcaaggacccugagcugcggcauugaagcacacccaacccaacucgacugaagucagccucacugaaccggaucugagaaucuucucucucugggcuugccagggcucuccgaaccuagcuagcauccucuucaauuccaacuagaaagcuuaccauggagcugcccauccucaagaccaacgccaucaccacgauccuggccgcggugacccugugcuucgcgagcucccagaacaucaccgaggaguucuaccagagcacgugcuccgccgucagcaagggcuaccucuccgcccugcgcaccgggugguacaccagcgugaucaccaucgagcuguccaacaucaaggagaacaagugcaacggcaccgacgccaaggugaaacucaucaagcaggagcuggacaaguacaagaacgccgucaccgagcugcagcuccugaugcagagcaccccggccgccggguccggcagcgcuaucugcuccgggaucgcggugugcaaggugcugcaccucgagggcgaggucaacaagaucaagaaugcccugcugagcaccaacaaggccguggugucccucagcaacggagucagcgugcuuaccuucaaggugcuggaccucaagaacuacaucgacaagcagcugcugccuauccucaacaagcagagcugcuccaucagcaacaucgagacggucaucgaguuccagcagaagaacaaccggcugcuggagaucacccgcgaguucuccgugaacgccggggugaccacccccgucagcacguacaugcucaccaacagcgaacugcugucccucaucaacgacaugcccaucaccaacgaccagaagaagcugaugagcaacaacgugcagaucgugcggcagcaguccuacagcaucaugugcaucaucaaggaggaaguccuggccuacguggugcagcucccucuguacggcgucaucgacacccccugcuggaagcugcacacgagcccccucugcaccaccaacaccaaggagggguccaacaucugccugacgcgcaccgaccggggcugguacugcgacaacgcgggguccgugagcuucuucccccaggccgagaccugcaaggugcagagcaaccgcgucuucugcgacacuaugaacagcagaacgcucccguccgaggugaaccugugcaacauagacauauucaaccccaaguacgacugcaagaucaugaccagcaagaccgacgucuccagcuccgugauuaccagccugggcgcaaucguguccugcuacggcaagacgaagugcaccgccagcaacaagaaccgggggaucaucaagaccuucuccaacggcugcgacuaugucagcaacaaggggguggacaccgugagcgucggaaacacgcucuacugcgugaacaagcaagagggcaaguccuuauacgugaagggggagcccaucaucaacuucuacgacccccuggucuucccgagcgacgaguucgacgccagcauaagccaggugaacgagaagaucaaccagucccucgcguucauccgcaagagcgacgagcugcugcacaacgugaacgucggcaaguccaccaccaacaucaugaucaccaccaucaucaucgugaucaucgugauccuccugcugcucaucgccgucgggcuguuccuguacugcaaggcccggagcacgcccgugaccuuguccaaggaccagcucagcggcaucaacaacaucgccuucuccaacugaggacuaguaauaaggaaacuguaugaaugucugugggcaggaagugaagagauccuucuguaaagguuuuuggaauuaugucugcugaauaauaaacuuuuuugaaauaauaaaucugguagaaaaaugagaucuaaaaaaaaaaaaaaaaaaaaaaaaaaaaaaaaaaaaaaaaaaaaaaaaaaaaaaaaaaaaaaaaugcaucccccccccccccccccccccccccccccccaaaggcucuuuucagagccaccagaauu

SEQ ID NO: 16483 - RNA, 2061 nt, Artificial Sequence
  mRNA product Design h-5 comprising derived and/or modified sequence from HRSV(Memphis-37)__AIY60640.1__F_DSCav1_mut4 (opt1)
gggagagggcgcuuggcuugcaaggacccugagcugcggcauugaagcacacccaacccaacucgacugaagucagccucacugaaccggaucugagaaucuucucucucugggcuugccagggcucuccgaaccuagcuagcauccucuucaauuccaacuagaaagcuuaccauggagcugcccauccucaagaccaacgccaucaccacgauccuggccgcggugacccugugcuucgccagcucccagaacaucaccgaggaguucuaccagagcacgugcuccgccgucagcaagggcuaccucuccgcccugcgcaccgggugguacaccagcgugaucaccaucgagcuguccaacaucaaggagaacaagugcaacggcaccgacgccaaggugaagcucaucaagcaggagcuggacaaguacaagaacgcggucacggagcugcagcuccugaugcagagcaccccggccgccggcuccgggagcgcgaucugcuccggcaucgccgucugcaaggugcugcaccucgagggcgaggugaacaagaucaagaacgcccugcuguccaccaacaaggccgucgugagccucuccaacggggugagcguccugaccuucaaggugcuggaccucaagaacuacaucgacaagcagcugcugcccauccugaacaagcagagcugcuccaucagcaacaucgagaccgucaucgaguuccagcagaagaacaaccgccuccuggagaucacgcgggaguucagcgugaacgcgggcgugaccacccccgucuccaccuacaugcugacgaacagcgagcuccugucccugaucaacgacaugccgaucaccaacgaccagaagaagcucaugagcaacaacgugcagaucgugcgccagcaguccuacagcaucaugugcaucaucaaggaggagguccuggccuacguggugcagcugccccucuacggggucaucgacacccccugcuggaagcugcacaccagcccccugugcacgaccaacaccaaggagggcuccaacaucugccucacccggacggaccgcgggugguacugcgacaacgccggcagcguguccuucuucccgcaggccgagaccugcaagguccagagcaaccggguguucugcgacaccaugaacucccggacccugcccagcgaggugaaccucugcaacaucgacaucuucaaccccaaguacgacugcaagaucaugacguccaagaccgacgucagcuccagcgugaucaccucccugggcgccaucgugagcugcuacgggaagaccaagugcacggcgagcaacaagaaccgcggcaucaucaagaccuucuccaacgggugcgacuacgucagcaacaagggcguggacaccguguccgucggcaacacccuguacugcgugaacaagcaggagggcaagagccucuacgugaagggggagcccaucaucaacuucuacgacccgcuggucuuccccuccgacgaguucgacgccagcaucucccaggugaacgagaagaucaaccagagccuggccuucauccggaaguccgacgagcuccugcacaacgugaacgucggcaagagcaccacgaacaucaugaucaccaccaucaucaucgugaucaucgugauccugcugcuccugaucgccgucgggcuguuccucuacugcaaggcccgcuccacccccgugacgcugagcaaggaccagcuguccgggaucaacaacaucgcguucagcaacugaggacuaguacuggcugcaucucccuuuccucuguccuccauccuucucccaggauggugaagggggaccugguacccagugauccccaccccaggauccuaaaucaugacuuaccugcuaauaaaaacucauuggaaaagugagaagaucuaaaaaaaaaaaaaaaaaaaaaaaaaaaaaaaaaaaaaaaaaaaaaaaaaaaaaaaaaaaaaaaaugcaucccccccccccccccccccccccccccccccaaaggcucuuuucagagccaccagaauu

SEQ ID NO: 16484 - RNA, 2061 nt, Artificial Sequence
  mRNA product Design h-5 comprising derived and/or modified sequence from HRSV(Memphis-37)__AIY60640.1__F_DSCav1_mut4 (opt1)
gggagagggcgcuuggcuugcaaggacccugagcugcggcauugaagcacacccaacccaacucgacugaagucagccucacugaaccggaucugagaaucuucucucucugggcuugccagggcucuccgaaccuagcuagcauccucuucaauuccaacuagaaagcuuaccauggagcugcccauccucaagaccaacgccaucaccacgauccuggccgcggugacccugugcuucgccagcucccagaacaucaccgaggaguucuaccagagcacgugcuccgccgucagcaagggcuaccucuccgcccugcgcaccgggugguacaccagcgugaucaccaucgagcuguccaacaucaaggagaacaagugcaacggcaccgacgccaaggugaagcucaucaagcaggagcuggacaaguacaagaacgcggucacggagcugcagcuccugaugcagagcaccccggccgccggguccggcagcgccaucugcuccgggaucgcggugugcaaggugcugcaccucgagggcgaggucaacaagaucaagaacgcccugcugagcaccaacaaggccguggugucccucagcaacggcgucuccgugcugaccuucaaggugcuggaccucaagaacuacaucgacaagcagcugcugcccauccucaacaagcagagcugcuccaucagcaacaucgagacggucaucgaguuccagcagaagaacaaccggcugcuggagaucacccgcgaguucuccgugaacgccggggugaccacccccgucagcacguacaugcucaccaacagcgagcugcugucccucaucaacgacaugcccaucaccaacgaccagaagaagcugaugagcaacaacgugcagaucgugcggcagcaguccuacagcaucaugugcaucaucaaggaggagguccuggccuacguggugcagcucccgcuguacggcgucaucgacacccccugcuggaagcugcacacgagcccccucugcaccaccaacaccaaggagggguccaacaucugccugacgcgcaccgaccggggcugguacugcgacaacgcgggguccgugagcuucuucccccaggccgagaccugcaaggugcaguccaaccgcgucuucugcgacaccaugaacagccggacgcucccguccgaggugaaccugugcaacaucgacaucuucaaccccaaguacgacugcaagaucaugaccagcaagaccgacgucuccagcuccgugaucaccagccugggcgccaucguguccugcuacggcaagacgaagugcaccgccagcaacaagaaccgggggaucaucaagaccuucuccaacggcugcgacuacgucagcaacaaggggguggacaccgugagcgucggcaacacgcucuacugcgugaacaagcaggagggcaagucccuguacgugaagggggagcccaucaucaacuucuacgacccccuggucuucccgagcgacgaguucgacgccuccaucagccaggugaacgagaagaucaaccagucccucgcguucauccgcaagagcgacgagcugcugcacaacgugaacgucggcaaguccaccaccaacaucaugaucaccaccaucaucaucgugaucaucgugauccuccugcugcucaucgccgucgggcuguuccuguacugcaaggcccggagcacgcccgugacccuguccaaggaccagcucagcggcaucaacaacaucgccuucuccaacugaggacuaguacuggcugcaucucccuuuccucuguccuccauccuucucccaggauggugaagggggaccugguacccagugauccccaccccaggauccuaaaucaugacuuaccugcuaauaaaaacucauuggaaaagugagaagaucuaaaaaaaaaaaaaaaaaaaaaaaaaaaaaaaaaaaaaaaaaaaaaaaaaaaaaaaaaaaaaaaaugcaucccccccccccccccccccccccccccccccaaaggcucuuuucagagccaccagaauu

SEQ ID NO: 16485 - RNA, 2061 nt, Artificial Sequence
  mRNA product Design h-5 comprising derived and/or modified sequence from HRSV(Memphis-37)__AIY60640.1__F_DSCav1_mut4 (opt2)
gggagagggcgcuuggcuugcaaggacccugagcugcggcauugaagcacacccaacccaacucgacugaagucagccucacugaaccggaucugagaaucuucucucucugggcuugccagggcucuccgaaccuagcuagcauccucuucaauuccaacuagaaagcuuaccauggagcuccccauccucaagaccaacgccaucaccaccauccucgccgccgucacccucugcuucgccuccucccagaacaucaccgaggaguucuaccaguccaccugcuccgccgucuccaagggcuaccucuccgcccuccgcaccggcugguacaccuccgucaucaccaucgagcucuccaacaucaaggagaacaagugcaacggcaccgacgccaaggucaagcucaucaagcaggagcucgacaaguacaagaacgccgucaccgagcuccagcuccucaugcaguccacccccgccgccggcuccggcuccgccaucugcuccggcaucgccgucugcaagguccuccaccucgagggcgaggucaacaagaucaagaacgcccuccucuccaccaacaaggccgucgucucccucuccaacggcgucuccguccucaccuucaagguccucgaccucaagaacuacaucgacaagcagcuccuccccauccucaacaagcaguccugcuccaucuccaacaucgagaccgucaucgaguuccagcagaagaacaaccgccuccucgagaucacccgcgaguucuccgucaacgccggcgucaccacccccgucuccaccuacaugcucaccaacuccgagcuccucucccucaucaacgacaugcccaucaccaacgaccagaagaagcucauguccaacaacguccagaucguccgccagcaguccuacuccaucaugugcaucaucaaggaggagguccucgccuacgucguccagcucccccucuacggcgucaucgacacccccugcuggaagcuccacaccuccccccucugcaccaccaacaccaaggagggcuccaacaucugccucacccgcaccgaccgcggcugguacugcgacaacgccggcuccgucuccuucuucccccaggccgagaccugcaagguccaguccaaccgcgucuucugcgacaccaugaacucccgcacccuccccuccgaggucaaccucugcaacaucgacaucuucaaccccaaguacgacugcaagaucaugaccuccaagaccgacgucuccuccuccgucaucaccucccucggcgccaucgucuccugcuacggcaagaccaagugcaccgccuccaacaagaaccgcggcaucaucaagaccuucuccaacggcugcgacuacgucuccaacaagggcgucgacaccgucuccgucggcaacacccucuacugcgucaacaagcaggagggcaagucccucuacgucaagggcgagcccaucaucaacuucuacgacccccucgucuuccccuccgacgaguucgacgccuccaucucccaggucaacgagaagaucaaccagucccucgccuucauccgcaaguccgacgagcuccuccacaacgucaacgucggcaaguccaccaccaacaucaugaucaccaccaucaucaucgucaucaucgucauccuccuccuccucaucgccgucggccucuuccucuacugcaaggcccgcuccacccccgucacccucuccaaggaccagcucuccggcaucaacaacaucgccuucuccaacugaggacuaguacuggcugcaucucccuuuccucuguccuccauccuucucccaggauggugaagggggaccugguacccagugauccccaccccaggauccuaaaucaugacuuaccugcuaauaaaaacucauuggaaaagugagaagaucuaaaaaaaaaaaaaaaaaaaaaaaaaaaaaaaaaaaaaaaaaaaaaaaaaaaaaaaaaaaaaaaaugcaucccccccccccccccccccccccccccccccaaaggcucuuuucagagccaccagaauu

SEQ ID NO: 16486 - RNA, 2061 nt, Artificial Sequence
  mRNA product Design h-5 comprising derived and/or modified sequence from HRSV(Memphis-37)__AIY60640.1__F_DSCav1_mut4 (opt3)
gggagagggcgcuuggcuugcaaggacccugagcugcggcauugaagcacacccaacccaacucgacugaagucagccucacugaaccggaucugagaaucuucucucucugggcuugccagggcucuccgaaccuagcuagcauccucuucaauuccaacuagaaagcuuaccauggagcugcccauccucaagaccaacgccauuacaacuauacuugcugcagugacgcugugcuucgccagcucccagaauaucaccgaagaguuuuaccaaucuacauguucagcggucaguaaaggcuauuugagcgcuuuaagaacugggugguacaccuccguuauuacaaucgaacugucuaacauuaaggagaauaaaugcaacggaaccgacgccaaggugaaacuaaucaagcaggaacucgauaaguauaaaaaugcaguaacugagcugcagcuucugaugcagucgaccccugccgcugguucaggcagcgcaauauguagugggaucgccgugugcaaggucuugcaccucgagggagaagugaacaaaauuaagaaugcucugcuguccacaaacaaagccguugugucucucagcaauggcgucuccguguuaacguucaagguacuggaccuuaagaacuacaucgauaaacaauugcugccaauucuaaauaagcagucauguaguaucagcaacauagagacuguuauugaauuucagcagaaaaauaacaggcuccuggagaucacccgggaguucucugugaaugcgggugucacaacuccgguguccaccuauaugcuuacaaacucagaacuguugagccucauuaacgacaugcccaucaccaaugaucaaaagaaacugaugaguaacaaugugcagaucguccgccagcagucuuacuccauuaugugcauaaucaaggaggaaguuuuagcauaugugguacaacugccucucuacggggugauugacacgccauguuggaaacuucauacuagcccccugugcacaaccaacacuaaggagggaucgaauaucuguuugacacgaaccgaucguggcugguacugcgacaacgccggcucugucuccuuuuucccucaggcugaaacguguaaggugcagucaaauagaguguuuugcgauaccaugaacaguagaacacugccaagcgaggugaaucucugcaacauagacauuuucaaucccaaauaugauuguaagaucaugacuuccaaaaccgacgucucuagcucagugaucacaagucugggggccauuguauccugcuacggaaagacuaaauguaccgcaagcaacaagaauagggguaucauuaagacauuuucuaacggcugcgauuauguuucaaauaaagggguggacaccgucagugugggaaacacucuuuacugugucaacaagcaagagggcaaaagccuguaugugaagggugaaccuauaaucaauuucuacgacccauugguuuuuccguccgaugaguucgacgcuucuauuucgcagguuaacgagaaaaucaaucagagccucgccuuuauccggaaguccgaugaacuguuacacaacguaaaugucgggaagucaacgacaaacauuaugauaaccacuaucauuaucgugauuaucguuauacugcuacuccugaucgcggugggacuuuucuuguauugcaaagcccgcaguacccccgucacacugucuaaggaccagcucagcggcauuaauaacaucgcauucuccaauugaggacuaguacuggcugcaucucccuuuccucuguccuccauccuucucccaggauggugaagggggaccugguacccagugauccccaccccaggauccuaaaucaugacuuaccugcuaauaaaaacucauuggaaaagugagaagaucuaaaaaaaaaaaaaaaaaaaaaaaaaaaaaaaaaaaaaaaaaaaaaaaaaaaaaaaaaaaaaaaaugcaucccccccccccccccccccccccccccccccaaaggcucuuuucagagccaccagaauu

SEQ ID NO: 16487 - RNA, 2061 nt, Artificial Sequence
  mRNA product Design h-5 comprising derived and/or modified sequence from HRSV(Memphis-37)__AIY60640.1__F_DSCav1_mut4 (opt4)
gggagagggcgcuuggcuugcaaggacccugagcugcggcauugaagcacacccaacccaacucgacugaagucagccucacugaaccggaucugagaaucuucucucucugggcuugccagggcucuccgaaccuagcuagcauccucuucaauuccaacuagaaagcuuaccauggagcugcccauccugaagaccaacgccaucaccaccauccuggccgccgugacccugugcuucgccagcagccagaacaucaccgaggaguucuaccagagcaccugcagcgccgugagcaagggcuaccugagcgcccugagaaccggcugguacaccagcgugaucaccaucgagcugagcaacaucaaggagaacaagugcaacggcaccgacgccaaggugaagcugaucaagcaggagcuggacaaguacaagaacgccgugaccgagcugcagcugcugaugcagagcacccccgccgccggcagcggcagcgccaucugcagcggcaucgccgugugcaaggugcugcaccuggagggcgaggugaacaagaucaagaacgcccugcugagcaccaacaaggccguggugagccugagcaacggcgugagcgugcugaccuucaaggugcuggaccugaagaacuacaucgacaagcagcugcugcccauccugaacaagcagagcugcagcaucagcaacaucgagaccgugaucgaguuccagcagaagaacaacagacugcuggagaucaccagagaguucagcgugaacgccggcgugaccacccccgugagcaccuacaugcugaccaacagcgagcugcugagccugaucaacgacaugcccaucaccaacgaccagaagaagcugaugagcaacaacgugcagaucgugagacagcagagcuacagcaucaugugcaucaucaaggaggaggugcuggccuacguggugcagcugccccuguacggcgugaucgacacccccugcuggaagcugcacaccagcccccugugcaccaccaacaccaaggagggcagcaacaucugccugaccagaaccgacagaggcugguacugcgacaacgccggcagcgugagcuucuucccccaggccgagaccugcaaggugcagagcaacagaguguucugcgacaccaugaacagcagaacccugcccagcgaggugaaccugugcaacaucgacaucuucaaccccaaguacgacugcaagaucaugaccagcaagaccgacgugagcagcagcgugaucaccagccugggcgccaucgugagcugcuacggcaagaccaagugcaccgccagcaacaagaacagaggcaucaucaagaccuucagcaacggcugcgacuacgugagcaacaagggcguggacaccgugagcgugggcaacacccuguacugcgugaacaagcaggagggcaagagccuguacgugaagggcgagcccaucaucaacuucuacgacccccugguguuccccagcgacgaguucgacgccagcaucagccaggugaacgagaagaucaaccagagccuggccuucaucagaaagagcgacgagcugcugcacaacgugaacgugggcaagagcaccaccaacaucaugaucaccaccaucaucaucgugaucaucgugauccugcugcugcugaucgccgugggccuguuccuguacugcaaggccagaagcacccccgugacccugagcaaggaccagcugagcggcaucaacaacaucgccuucagcaacugaggacuaguacuggcugcaucucccuuuccucuguccuccauccuucucccaggauggugaagggggaccugguacccagugauccccaccccaggauccuaaaucaugacuuaccugcuaauaaaaacucauuggaaaagugagaagaucuaaaaaaaaaaaaaaaaaaaaaaaaaaaaaaaaaaaaaaaaaaaaaaaaaaaaaaaaaaaaaaaaugcaucccccccccccccccccccccccccccccccaaaggcucuuuucagagccaccagaauu

SEQ ID NO: 16488 - RNA, 2061 nt, Artificial Sequence
  mRNA product Design h-5 comprising derived and/or modified sequence from HRSV(Memphis-37)__AIY60640.1__F_DSCav1_mut4 (opt5)
gggagagggcgcuuggcuugcaaggacccugagcugcggcauugaagcacacccaacccaacucgacugaagucagccucacugaaccggaucugagaaucuucucucucugggcuugccagggcucuccgaaccuagcuagcauccucuucaauuccaacuagaaagcuuaccauggagcugcccauccucaagaccaacgccauuacaacgauccuggcugccgugacccuuugcuucgcgagcucccagaauauuacagaagaguuuuaccaaucuaccuguagcgcugucuccaaaggcuaucugucugcccucagaacagggugguacaccagcguuaucacaauugaacuguccaacaucaaggagaauaaaugcaacggaaccgacgccaaggugaaacuuaucaagcaggaacuggauaaguauaaaaaugcugugacggagcuccagcugcugaugcagucuaccccugccgcuggcagcggguccgccauuuguagcggaaucgcggucugcaaggugcuccaccuggagggcgaaguuaacaaaauuaagaaugcccuucugucuacaaacaaagcuguggucucccucagcaauggggugucuguucugaccuucaaggugcuugaccugaagaacuacaucgauaaacaacuccugccgauucugaauaagcaguccuguagcaucucuaacauugagacagucaucgaauuucagcagaaaaauaaccggcuccuggagaucacccgcgaguucuccgugaaugccggagugacgacacccgucagcaccuauaugcuuacaaacuccgaacugcucucucugauuaacgacaugccuaucaccaaugaucaaaagaaacuuaugagcaacaauguucagauugugagacagcaguccuacagcaucaugugcauuaucaaggaggaagugcuggcuuaugucgugcaacucccccuguacggcguuaucgacaccccuuguuggaaacugcauacaucuccccucugcacgaccaacacaaaggagggcuccaauauuugucugacccggacagaucgcgggugguacugcgacaacgccggaagcgugagcuuuuucccucaggcggaaaccuguaagguccagucuaauagaguguuuugcgauacgaugaacuccagaacacugccgucugagguuaaucucugcaacaucgacauuuucaaucccaaauaugauuguaagaucaugaccagcaaaaccgacguguccagcucugucauuacaucccugggcgccaucgugagcugcuacgggaagaccaaauguacagcuucuaacaagaaucggggaaucauuaagacguuuuccaacggcugcgauuaugucagcaauaaagggguggacaccguuuccgugggaaacacacuuuacugugucaacaagcaagagggcaaaucucuguaugugaagggcgaaccuaucauuaauuucuacgacccccucguuuuuccuagcgaugaguucgacgccuccaucucucaggugaacgaaaagauuaaucagagccuggcuuuuauccgcaaguccgaugagcugcuccacaacgucaauguggggaaaagcaccacaaacauuaugaucaccacgaucauuaucgugauuaucguuauucugcuucugcucaucgccgucggacuguuccuguauugcaaagccagaucuacccccgugacacuuuccaaggaccagcucagcggcaucaauaacauugcuuucucuaauugaggacuaguacuggcugcaucucccuuuccucuguccuccauccuucucccaggauggugaagggggaccugguacccagugauccccaccccaggauccuaaaucaugacuuaccugcuaauaaaaacucauuggaaaagugagaagaucuaaaaaaaaaaaaaaaaaaaaaaaaaaaaaaaaaaaaaaaaaaaaaaaaaaaaaaaaaaaaaaaaugcaucccccccccccccccccccccccccccccccaaaggcucuuuucagagccaccagaauu

SEQ ID NO: 16489 - RNA, 2061 nt, Artificial Sequence
  mRNA product Design h-5 comprising derived and/or modified sequence from HRSV(Memphis-37)__AIY60640.1__F_DSCav1_mut4 (opt6)
gggagagggcgcuuggcuugcaaggacccugagcugcggcauugaagcacacccaacccaacucgacugaagucagccucacugaaccggaucugagaaucuucucucucugggcuugccagggcucuccgaaccuagcuagcauccucuucaauuccaacuagaaagcuuaccauggaacucccaauccuaaaaacaaacgcaauaacaacaauauuagcagccguaacacucuguuucgccucaucccaaaacauaacagaagaauuuuaucaaucuacauguuccgccgucaguaaaggauaucuaucagccuuaagaacaggcugguacacaucaguaaucaccauagaauuauccaacauaaaagaaaacaaaugcaauggcacagaugccaaaguaaaacuaaucaaacaagaacuugauaaauauaaaaacgcaguaacagaauuacaauuauuaaugcaaagcacaccagccgcaggaucaggaucagcaauauguucaggaauagcagucuguaaaguacuacacuuagaaggagaaguaaacaaaauuaaaaacgcauuacuaagcaccaauaaagcaguaguaucacuaucaaacggcguauccguauuaacguucaaaguccucgaccugaaaaacuacauagauaaacaacuacuaccaauacuaaauaaacaaucaugcucaauaucaaacauagaaacuguuaucgaauuucaacagaaaaauaaccgacuacuagaaaucaccagagaauuuucaguaaacgcaggcgucacuacaccaguauccacauacaugcuaaccaacucggaauuacuuucccucauaaacgacaugccaauaacaaacgaccaaaagaaacuuaugucaaacaacguucaaauaguccgccaacaaucauacucaauaauguguaucauaaaagaagaaguccuagcauaugucguacaacuaccauuauacggaguaauugacacaccuugcuggaaacuacacacauccccacuauguacaacaaacacuaaagaaggaucaaacaucugccuaaccagaacagacagaggcugguauugcgacaacgcaggaucaguaucauucuucccacaagcagaaacaugcaaaguacaaucaaacagagucuucugcgacaccaugaacagcagaacccucccauccgaaguaaacuuaugcaacaucgauaucuucaacccaaaauacgacuguaaaauaaugacaucaaaaacagacguuucauccucaguaauaacaucauuaggugccauaguuucauguuacggaaaaaccaaauguaccgcaucaaacaaaaacagaggcauuauuaaaacauucucuaacggaugcgacuaugucaguaacaaaggaguagacacaguaucagucggaaacacauuauauugcguaaauaaacaagaaggaaaaagucuauacguaaaaggagaaccaauaauaaacuuuuacgacccucucguauucccaucagacgaauuugaugcauccauaucacaagucaacgaaaagauaaaccaaucccuagcauucauaagaaaaucagacgaacuacuccauaacguaaacguaggaaaaagcacaaccaauauaaugauaaccacaauaaucauaguaauaauagucauauuauuacuuuuaauugcaguaggacucuuucuauacugcaaagcaagaagcacaccaguaacacuaagcaaagaccaacuaucaggcaucaacaauaucgccuuuucaaauuaaggacuaguacuggcugcaucucccuuuccucuguccuccauccuucucccaggauggugaagggggaccugguacccagugauccccaccccaggauccuaaaucaugacuuaccugcuaauaaaaacucauuggaaaagugagaagaucuaaaaaaaaaaaaaaaaaaaaaaaaaaaaaaaaaaaaaaaaaaaaaaaaaaaaaaaaaaaaaaaaugcaucccccccccccccccccccccccccccccccaaaggcucuuuucagagccaccagaauu

SEQ ID NO: 16490 - RNA, 2061 nt, Artificial Sequence
  mRNA product Design h-5 comprising derived and/or modified sequence from HRSV(Memphis-37)__AIY60640.1__F_DSCav1_mut4 (opt11)
gggagagggcgcuuggcuugcaaggacccugagcugcggcauugaagcacacccaacccaacucgacugaagucagccucacugaaccggaucugagaaucuucucucucugggcuugccagggcucuccgaaccuagcuagcauccucuucaauuccaacuagaaagcuuaccauggagcugcccauccucaagaccaacgccaucaccacgauccuggccgcggugacccugugcuucgcgagcucccagaacaucaccgaggaguucuaccagagcacgugcuccgccgucagcaagggcuaccucuccgcccugcgcaccgggugguacaccagcgugaucaccaucgagcuguccaacaucaaggagaacaagugcaacggcaccgacgccaaggugaaacucaucaagcaggagcuggacaaguacaagaacgccgucaccgagcugcagcuccugaugcagagcaccccggccgccggguccggcagcgcuaucugcuccgggaucgcggugugcaaggugcugcaccucgagggcgaggucaacaagaucaagaaugcccugcugagcaccaacaaggccguggugucccucagcaacggagucagcgugcuuaccuucaaggugcuggaccucaagaacuacaucgacaagcagcugcugccuauccucaacaagcagagcugcuccaucagcaacaucgagacggucaucgaguuccagcagaagaacaaccggcugcuggagaucacccgcgaguucuccgugaacgccggggugaccacccccgucagcacguacaugcucaccaacagcgaacugcugucccucaucaacgacaugcccaucaccaacgaccagaagaagcugaugagcaacaacgugcagaucgugcggcagcaguccuacagcaucaugugcaucaucaaggaggaaguccuggccuacguggugcagcucccucuguacggcgucaucgacacccccugcuggaagcugcacacgagcccccucugcaccaccaacaccaaggagggguccaacaucugccugacgcgcaccgaccggggcugguacugcgacaacgcgggguccgugagcuucuucccccaggccgagaccugcaaggugcagagcaaccgcgucuucugcgacacuaugaacagcagaacgcucccguccgaggugaaccugugcaacauagacauauucaaccccaaguacgacugcaagaucaugaccagcaagaccgacgucuccagcuccgugauuaccagccugggcgcaaucguguccugcuacggcaagacgaagugcaccgccagcaacaagaaccgggggaucaucaagaccuucuccaacggcugcgacuaugucagcaacaaggggguggacaccgugagcgucggaaacacgcucuacugcgugaacaagcaagagggcaaguccuuauacgugaagggggagcccaucaucaacuucuacgacccccuggucuucccgagcgacgaguucgacgccagcauaagccaggugaacgagaagaucaaccagucccucgcguucauccgcaagagcgacgagcugcugcacaacgugaacgucggcaaguccaccaccaacaucaugaucaccaccaucaucaucgugaucaucgugauccuccugcugcucaucgccgucgggcuguuccuguacugcaaggcccggagcacgcccgugaccuuguccaaggaccagcucagcggcaucaacaacaucgccuucuccaacugaggacuaguacuggcugcaucucccuuuccucuguccuccauccuucucccaggauggugaagggggaccugguacccagugauccccaccccaggauccuaaaucaugacuuaccugcuaauaaaaacucauuggaaaagugagaagaucuaaaaaaaaaaaaaaaaaaaaaaaaaaaaaaaaaaaaaaaaaaaaaaaaaaaaaaaaaaaaaaaaugcaucccccccccccccccccccccccccccccccaaaggcucuuuucagagccaccagaauu

SEQ ID NO: 16491 - RNA, 1994 nt, Artificial Sequence
  mRNA product Design i-1 comprising derived and/or modified sequence from HRSV(Memphis-37)__AIY60640.1__F_DSCav1_mut4 (opt1)
gggagagggcgcuuggcuugcaaggacccugagcugcggcauugaagcacacccaacccaacucgacugaagucagccucacugaaccggaucugagaaucuucucucucugggcuugccagggcucuccgaaccuagcuagcauccucuucaauuccaacuagaaagcuuaccauggagcugcccauccucaagaccaacgccaucaccacgauccuggccgcggugacccugugcuucgccagcucccagaacaucaccgaggaguucuaccagagcacgugcuccgccgucagcaagggcuaccucuccgcccugcgcaccgggugguacaccagcgugaucaccaucgagcuguccaacaucaaggagaacaagugcaacggcaccgacgccaaggugaagcucaucaagcaggagcuggacaaguacaagaacgcggucacggagcugcagcuccugaugcagagcaccccggccgccggcuccgggagcgcgaucugcuccggcaucgccgucugcaaggugcugcaccucgagggcgaggugaacaagaucaagaacgcccugcuguccaccaacaaggccgucgugagccucuccaacggggugagcguccugaccuucaaggugcuggaccucaagaacuacaucgacaagcagcugcugcccauccugaacaagcagagcugcuccaucagcaacaucgagaccgucaucgaguuccagcagaagaacaaccgccuccuggagaucacgcgggaguucagcgugaacgcgggcgugaccacccccgucuccaccuacaugcugacgaacagcgagcuccugucccugaucaacgacaugccgaucaccaacgaccagaagaagcucaugagcaacaacgugcagaucgugcgccagcaguccuacagcaucaugugcaucaucaaggaggagguccuggccuacguggugcagcugccccucuacggggucaucgacacccccugcuggaagcugcacaccagcccccugugcacgaccaacaccaaggagggcuccaacaucugccucacccggacggaccgcgggugguacugcgacaacgccggcagcguguccuucuucccgcaggccgagaccugcaagguccagagcaaccggguguucugcgacaccaugaacucccggacccugcccagcgaggugaaccucugcaacaucgacaucuucaaccccaaguacgacugcaagaucaugacguccaagaccgacgucagcuccagcgugaucaccucccugggcgccaucgugagcugcuacgggaagaccaagugcacggcgagcaacaagaaccgcggcaucaucaagaccuucuccaacgggugcgacuacgucagcaacaagggcguggacaccguguccgucggcaacacccuguacugcgugaacaagcaggagggcaagagccucuacgugaagggggagcccaucaucaacuucuacgacccgcuggucuuccccuccgacgaguucgacgccagcaucucccaggugaacgagaagaucaaccagagccuggccuucauccggaaguccgacgagcuccugcacaacgugaacgucggcaagagcaccacgaacaucaugaucaccaccaucaucaucgugaucaucgugauccugcugcuccugaucgccgucgggcuguuccucuacugcaaggcccgcuccacccccgugacgcugagcaaggaccagcuguccgggaucaacaacaucgcguucagcaacugaggacuaguguccaccugucccuccugggcugcuggauugucucguuuuccugccaaauaaacaggaucagcgcuuuacagaucuaaaaaaaaaaaaaaaaaaaaaaaaaaaaaaaaaaaaaaaaaaaaaaaaaaaaaaaaaaaaaaaaugcaucccccccccccccccccccccccccccccccaaaggcucuuuucagagccaccagaauu

SEQ ID NO: 16492 - RNA, 1994 nt, Artificial Sequence
  mRNA product Design i-1 comprising derived and/or modified sequence from HRSV(Memphis-37)__AIY60640.1__F_DSCav1_mut4 (opt1)
gggagagggcgcuuggcuugcaaggacccugagcugcggcauugaagcacacccaacccaacucgacugaagucagccucacugaaccggaucugagaaucuucucucucugggcuugccagggcucuccgaaccuagcuagcauccucuucaauuccaacuagaaagcuuaccauggagcugcccauccucaagaccaacgccaucaccacgauccuggccgcggugacccugugcuucgccagcucccagaacaucaccgaggaguucuaccagagcacgugcuccgccgucagcaagggcuaccucuccgcccugcgcaccgggugguacaccagcgugaucaccaucgagcuguccaacaucaaggagaacaagugcaacggcaccgacgccaaggugaagcucaucaagcaggagcuggacaaguacaagaacgcggucacggagcugcagcuccugaugcagagcaccccggccgccggguccggcagcgccaucugcuccgggaucgcggugugcaaggugcugcaccucgagggcgaggucaacaagaucaagaacgcccugcugagcaccaacaaggccguggugucccucagcaacggcgucuccgugcugaccuucaaggugcuggaccucaagaacuacaucgacaagcagcugcugcccauccucaacaagcagagcugcuccaucagcaacaucgagacggucaucgaguuccagcagaagaacaaccggcugcuggagaucacccgcgaguucuccgugaacgccggggugaccacccccgucagcacguacaugcucaccaacagcgagcugcugucccucaucaacgacaugcccaucaccaacgaccagaagaagcugaugagcaacaacgugcagaucgugcggcagcaguccuacagcaucaugugcaucaucaaggaggagguccuggccuacguggugcagcucccgcuguacggcgucaucgacacccccugcuggaagcugcacacgagcccccucugcaccaccaacaccaaggagggguccaacaucugccugacgcgcaccgaccggggcugguacugcgacaacgcgggguccgugagcuucuucccccaggccgagaccugcaaggugcaguccaaccgcgucuucugcgacaccaugaacagccggacgcucccguccgaggugaaccugugcaacaucgacaucuucaaccccaaguacgacugcaagaucaugaccagcaagaccgacgucuccagcuccgugaucaccagccugggcgccaucguguccugcuacggcaagacgaagugcaccgccagcaacaagaaccgggggaucaucaagaccuucuccaacggcugcgacuacgucagcaacaaggggguggacaccgugagcgucggcaacacgcucuacugcgugaacaagcaggagggcaagucccuguacgugaagggggagcccaucaucaacuucuacgacccccuggucuucccgagcgacgaguucgacgccuccaucagccaggugaacgagaagaucaaccagucccucgcguucauccgcaagagcgacgagcugcugcacaacgugaacgucggcaaguccaccaccaacaucaugaucaccaccaucaucaucgugaucaucgugauccuccugcugcucaucgccgucgggcuguuccuguacugcaaggcccggagcacgcccgugacccuguccaaggaccagcucagcggcaucaacaacaucgccuucuccaacugaggacuaguguccaccugucccuccugggcugcuggauugucucguuuuccugccaaauaaacaggaucagcgcuuuacagaucuaaaaaaaaaaaaaaaaaaaaaaaaaaaaaaaaaaaaaaaaaaaaaaaaaaaaaaaaaaaaaaaaugcaucccccccccccccccccccccccccccccccaaaggcucuuuucagagccaccagaauu

SEQ ID NO: 16493 - RNA, 1994 nt, Artificial Sequence
  mRNA product Design i-1 comprising derived and/or modified sequence from HRSV(Memphis-37)__AIY60640.1__F_DSCav1_mut4 (opt2)
gggagagggcgcuuggcuugcaaggacccugagcugcggcauugaagcacacccaacccaacucgacugaagucagccucacugaaccggaucugagaaucuucucucucugggcuugccagggcucuccgaaccuagcuagcauccucuucaauuccaacuagaaagcuuaccauggagcuccccauccucaagaccaacgccaucaccaccauccucgccgccgucacccucugcuucgccuccucccagaacaucaccgaggaguucuaccaguccaccugcuccgccgucuccaagggcuaccucuccgcccuccgcaccggcugguacaccuccgucaucaccaucgagcucuccaacaucaaggagaacaagugcaacggcaccgacgccaaggucaagcucaucaagcaggagcucgacaaguacaagaacgccgucaccgagcuccagcuccucaugcaguccacccccgccgccggcuccggcuccgccaucugcuccggcaucgccgucugcaagguccuccaccucgagggcgaggucaacaagaucaagaacgcccuccucuccaccaacaaggccgucgucucccucuccaacggcgucuccguccucaccuucaagguccucgaccucaagaacuacaucgacaagcagcuccuccccauccucaacaagcaguccugcuccaucuccaacaucgagaccgucaucgaguuccagcagaagaacaaccgccuccucgagaucacccgcgaguucuccgucaacgccggcgucaccacccccgucuccaccuacaugcucaccaacuccgagcuccucucccucaucaacgacaugcccaucaccaacgaccagaagaagcucauguccaacaacguccagaucguccgccagcaguccuacuccaucaugugcaucaucaaggaggagguccucgccuacgucguccagcucccccucuacggcgucaucgacacccccugcuggaagcuccacaccuccccccucugcaccaccaacaccaaggagggcuccaacaucugccucacccgcaccgaccgcggcugguacugcgacaacgccggcuccgucuccuucuucccccaggccgagaccugcaagguccaguccaaccgcgucuucugcgacaccaugaacucccgcacccuccccuccgaggucaaccucugcaacaucgacaucuucaaccccaaguacgacugcaagaucaugaccuccaagaccgacgucuccuccuccgucaucaccucccucggcgccaucgucuccugcuacggcaagaccaagugcaccgccuccaacaagaaccgcggcaucaucaagaccuucuccaacggcugcgacuacgucuccaacaagggcgucgacaccgucuccgucggcaacacccucuacugcgucaacaagcaggagggcaagucccucuacgucaagggcgagcccaucaucaacuucuacgacccccucgucuuccccuccgacgaguucgacgccuccaucucccaggucaacgagaagaucaaccagucccucgccuucauccgcaaguccgacgagcuccuccacaacgucaacgucggcaaguccaccaccaacaucaugaucaccaccaucaucaucgucaucaucgucauccuccuccuccucaucgccgucggccucuuccucuacugcaaggcccgcuccacccccgucacccucuccaaggaccagcucuccggcaucaacaacaucgccuucuccaacugaggacuaguguccaccugucccuccugggcugcuggauugucucguuuuccugccaaauaaacaggaucagcgcuuuacagaucuaaaaaaaaaaaaaaaaaaaaaaaaaaaaaaaaaaaaaaaaaaaaaaaaaaaaaaaaaaaaaaaaugcaucccccccccccccccccccccccccccccccaaaggcucuuuucagagccaccagaauu

SEQ ID NO: 16494 - RNA, 1994 nt, Artificial Sequence
  mRNA product Design i-1 comprising derived and/or modified sequence from HRSV(Memphis-37)__AIY60640.1__F_DSCav1_mut4 (opt3)
gggagagggcgcuuggcuugcaaggacccugagcugcggcauugaagcacacccaacccaacucgacugaagucagccucacugaaccggaucugagaaucuucucucucugggcuugccagggcucuccgaaccuagcuagcauccucuucaauuccaacuagaaagcuuaccauggagcugcccauccucaagaccaacgccauuacaacuauacuugcugcagugacgcugugcuucgccagcucccagaauaucaccgaagaguuuuaccaaucuacauguucagcggucaguaaaggcuauuugagcgcuuuaagaacugggugguacaccuccguuauuacaaucgaacugucuaacauuaaggagaauaaaugcaacggaaccgacgccaaggugaaacuaaucaagcaggaacucgauaaguauaaaaaugcaguaacugagcugcagcuucugaugcagucgaccccugccgcugguucaggcagcgcaauauguagugggaucgccgugugcaaggucuugcaccucgagggagaagugaacaaaauuaagaaugcucugcuguccacaaacaaagccguugugucucucagcaauggcgucuccguguuaacguucaagguacuggaccuuaagaacuacaucgauaaacaauugcugccaauucuaaauaagcagucauguaguaucagcaacauagagacuguuauugaauuucagcagaaaaauaacaggcuccuggagaucacccgggaguucucugugaaugcgggugucacaacuccgguguccaccuauaugcuuacaaacucagaacuguugagccucauuaacgacaugcccaucaccaaugaucaaaagaaacugaugaguaacaaugugcagaucguccgccagcagucuuacuccauuaugugcauaaucaaggaggaaguuuuagcauaugugguacaacugccucucuacggggugauugacacgccauguuggaaacuucauacuagcccccugugcacaaccaacacuaaggagggaucgaauaucuguuugacacgaaccgaucguggcugguacugcgacaacgccggcucugucuccuuuuucccucaggcugaaacguguaaggugcagucaaauagaguguuuugcgauaccaugaacaguagaacacugccaagcgaggugaaucucugcaacauagacauuuucaaucccaaauaugauuguaagaucaugacuuccaaaaccgacgucucuagcucagugaucacaagucugggggccauuguauccugcuacggaaagacuaaauguaccgcaagcaacaagaauagggguaucauuaagacauuuucuaacggcugcgauuauguuucaaauaaagggguggacaccgucagugugggaaacacucuuuacugugucaacaagcaagagggcaaaagccuguaugugaagggugaaccuauaaucaauuucuacgacccauugguuuuuccguccgaugaguucgacgcuucuauuucgcagguuaacgagaaaaucaaucagagccucgccuuuauccggaaguccgaugaacuguuacacaacguaaaugucgggaagucaacgacaaacauuaugauaaccacuaucauuaucgugauuaucguuauacugcuacuccugaucgcggugggacuuuucuuguauugcaaagcccgcaguacccccgucacacugucuaaggaccagcucagcggcauuaauaacaucgcauucuccaauugaggacuaguguccaccugucccuccugggcugcuggauugucucguuuuccugccaaauaaacaggaucagcgcuuuacagaucuaaaaaaaaaaaaaaaaaaaaaaaaaaaaaaaaaaaaaaaaaaaaaaaaaaaaaaaaaaaaaaaaugcaucccccccccccccccccccccccccccccccaaaggcucuuuucagagccaccagaauu

SEQ ID NO: 16495 - RNA, 1994 nt, Artificial Sequence
  mRNA product Design i-1 comprising derived and/or modified sequence from HRSV(Memphis-37)__AIY60640.1__F_DSCav1_mut4 (opt4)
gggagagggcgcuuggcuugcaaggacccugagcugcggcauugaagcacacccaacccaacucgacugaagucagccucacugaaccggaucugagaaucuucucucucugggcuugccagggcucuccgaaccuagcuagcauccucuucaauuccaacuagaaagcuuaccauggagcugcccauccugaagaccaacgccaucaccaccauccuggccgccgugacccugugcuucgccagcagccagaacaucaccgaggaguucuaccagagcaccugcagcgccgugagcaagggcuaccugagcgcccugagaaccggcugguacaccagcgugaucaccaucgagcugagcaacaucaaggagaacaagugcaacggcaccgacgccaaggugaagcugaucaagcaggagcuggacaaguacaagaacgccgugaccgagcugcagcugcugaugcagagcacccccgccgccggcagcggcagcgccaucugcagcggcaucgccgugugcaaggugcugcaccuggagggcgaggugaacaagaucaagaacgcccugcugagcaccaacaaggccguggugagccugagcaacggcgugagcgugcugaccuucaaggugcuggaccugaagaacuacaucgacaagcagcugcugcccauccugaacaagcagagcugcagcaucagcaacaucgagaccgugaucgaguuccagcagaagaacaacagacugcuggagaucaccagagaguucagcgugaacgccggcgugaccacccccgugagcaccuacaugcugaccaacagcgagcugcugagccugaucaacgacaugcccaucaccaacgaccagaagaagcugaugagcaacaacgugcagaucgugagacagcagagcuacagcaucaugugcaucaucaaggaggaggugcuggccuacguggugcagcugccccuguacggcgugaucgacacccccugcuggaagcugcacaccagcccccugugcaccaccaacaccaaggagggcagcaacaucugccugaccagaaccgacagaggcugguacugcgacaacgccggcagcgugagcuucuucccccaggccgagaccugcaaggugcagagcaacagaguguucugcgacaccaugaacagcagaacccugcccagcgaggugaaccugugcaacaucgacaucuucaaccccaaguacgacugcaagaucaugaccagcaagaccgacgugagcagcagcgugaucaccagccugggcgccaucgugagcugcuacggcaagaccaagugcaccgccagcaacaagaacagaggcaucaucaagaccuucagcaacggcugcgacuacgugagcaacaagggcguggacaccgugagcgugggcaacacccuguacugcgugaacaagcaggagggcaagagccuguacgugaagggcgagcccaucaucaacuucuacgacccccugguguuccccagcgacgaguucgacgccagcaucagccaggugaacgagaagaucaaccagagccuggccuucaucagaaagagcgacgagcugcugcacaacgugaacgugggcaagagcaccaccaacaucaugaucaccaccaucaucaucgugaucaucgugauccugcugcugcugaucgccgugggccuguuccuguacugcaaggccagaagcacccccgugacccugagcaaggaccagcugagcggcaucaacaacaucgccuucagcaacugaggacuaguguccaccugucccuccugggcugcuggauugucucguuuuccugccaaauaaacaggaucagcgcuuuacagaucuaaaaaaaaaaaaaaaaaaaaaaaaaaaaaaaaaaaaaaaaaaaaaaaaaaaaaaaaaaaaaaaaugcaucccccccccccccccccccccccccccccccaaaggcucuuuucagagccaccagaauu

SEQ ID NO: 16496 - RNA, 1994 nt, Artificial Sequence
  mRNA product Design i-1 comprising derived and/or modified sequence from HRSV(Memphis-37)__AIY60640.1__F_DSCav1_mut4 (opt5)
gggagagggcgcuuggcuugcaaggacccugagcugcggcauugaagcacacccaacccaacucgacugaagucagccucacugaaccggaucugagaaucuucucucucugggcuugccagggcucuccgaaccuagcuagcauccucuucaauuccaacuagaaagcuuaccauggagcugcccauccucaagaccaacgccauuacaacgauccuggcugccgugacccuuugcuucgcgagcucccagaauauuacagaagaguuuuaccaaucuaccuguagcgcugucuccaaaggcuaucugucugcccucagaacagggugguacaccagcguuaucacaauugaacuguccaacaucaaggagaauaaaugcaacggaaccgacgccaaggugaaacuuaucaagcaggaacuggauaaguauaaaaaugcugugacggagcuccagcugcugaugcagucuaccccugccgcuggcagcggguccgccauuuguagcggaaucgcggucugcaaggugcuccaccuggagggcgaaguuaacaaaauuaagaaugcccuucugucuacaaacaaagcuguggucucccucagcaauggggugucuguucugaccuucaaggugcuugaccugaagaacuacaucgauaaacaacuccugccgauucugaauaagcaguccuguagcaucucuaacauugagacagucaucgaauuucagcagaaaaauaaccggcuccuggagaucacccgcgaguucuccgugaaugccggagugacgacacccgucagcaccuauaugcuuacaaacuccgaacugcucucucugauuaacgacaugccuaucaccaaugaucaaaagaaacuuaugagcaacaauguucagauugugagacagcaguccuacagcaucaugugcauuaucaaggaggaagugcuggcuuaugucgugcaacucccccuguacggcguuaucgacaccccuuguuggaaacugcauacaucuccccucugcacgaccaacacaaaggagggcuccaauauuugucugacccggacagaucgcgggugguacugcgacaacgccggaagcgugagcuuuuucccucaggcggaaaccuguaagguccagucuaauagaguguuuugcgauacgaugaacuccagaacacugccgucugagguuaaucucugcaacaucgacauuuucaaucccaaauaugauuguaagaucaugaccagcaaaaccgacguguccagcucugucauuacaucccugggcgccaucgugagcugcuacgggaagaccaaauguacagcuucuaacaagaaucggggaaucauuaagacguuuuccaacggcugcgauuaugucagcaauaaagggguggacaccguuuccgugggaaacacacuuuacugugucaacaagcaagagggcaaaucucuguaugugaagggcgaaccuaucauuaauuucuacgacccccucguuuuuccuagcgaugaguucgacgccuccaucucucaggugaacgaaaagauuaaucagagccuggcuuuuauccgcaaguccgaugagcugcuccacaacgucaauguggggaaaagcaccacaaacauuaugaucaccacgaucauuaucgugauuaucguuauucugcuucugcucaucgccgucggacuguuccuguauugcaaagccagaucuacccccgugacacuuuccaaggaccagcucagcggcaucaauaacauugcuuucucuaauugaggacuaguguccaccugucccuccugggcugcuggauugucucguuuuccugccaaauaaacaggaucagcgcuuuacagaucuaaaaaaaaaaaaaaaaaaaaaaaaaaaaaaaaaaaaaaaaaaaaaaaaaaaaaaaaaaaaaaaaugcaucccccccccccccccccccccccccccccccaaaggcucuuuucagagccaccagaauu

SEQ ID NO: 16497 - RNA, 1994 nt, Artificial Sequence
  mRNA product Design i-1 comprising derived and/or modified sequence from HRSV(Memphis-37)__AIY60640.1__F_DSCav1_mut4 (opt6)
gggagagggcgcuuggcuugcaaggacccugagcugcggcauugaagcacacccaacccaacucgacugaagucagccucacugaaccggaucugagaaucuucucucucugggcuugccagggcucuccgaaccuagcuagcauccucuucaauuccaacuagaaagcuuaccauggaacucccaauccuaaaaacaaacgcaauaacaacaauauuagcagccguaacacucuguuucgccucaucccaaaacauaacagaagaauuuuaucaaucuacauguuccgccgucaguaaaggauaucuaucagccuuaagaacaggcugguacacaucaguaaucaccauagaauuauccaacauaaaagaaaacaaaugcaauggcacagaugccaaaguaaaacuaaucaaacaagaacuugauaaauauaaaaacgcaguaacagaauuacaauuauuaaugcaaagcacaccagccgcaggaucaggaucagcaauauguucaggaauagcagucuguaaaguacuacacuuagaaggagaaguaaacaaaauuaaaaacgcauuacuaagcaccaauaaagcaguaguaucacuaucaaacggcguauccguauuaacguucaaaguccucgaccugaaaaacuacauagauaaacaacuacuaccaauacuaaauaaacaaucaugcucaauaucaaacauagaaacuguuaucgaauuucaacagaaaaauaaccgacuacuagaaaucaccagagaauuuucaguaaacgcaggcgucacuacaccaguauccacauacaugcuaaccaacucggaauuacuuucccucauaaacgacaugccaauaacaaacgaccaaaagaaacuuaugucaaacaacguucaaauaguccgccaacaaucauacucaauaauguguaucauaaaagaagaaguccuagcauaugucguacaacuaccauuauacggaguaauugacacaccuugcuggaaacuacacacauccccacuauguacaacaaacacuaaagaaggaucaaacaucugccuaaccagaacagacagaggcugguauugcgacaacgcaggaucaguaucauucuucccacaagcagaaacaugcaaaguacaaucaaacagagucuucugcgacaccaugaacagcagaacccucccauccgaaguaaacuuaugcaacaucgauaucuucaacccaaaauacgacuguaaaauaaugacaucaaaaacagacguuucauccucaguaauaacaucauuaggugccauaguuucauguuacggaaaaaccaaauguaccgcaucaaacaaaaacagaggcauuauuaaaacauucucuaacggaugcgacuaugucaguaacaaaggaguagacacaguaucagucggaaacacauuauauugcguaaauaaacaagaaggaaaaagucuauacguaaaaggagaaccaauaauaaacuuuuacgacccucucguauucccaucagacgaauuugaugcauccauaucacaagucaacgaaaagauaaaccaaucccuagcauucauaagaaaaucagacgaacuacuccauaacguaaacguaggaaaaagcacaaccaauauaaugauaaccacaauaaucauaguaauaauagucauauuauuacuuuuaauugcaguaggacucuuucuauacugcaaagcaagaagcacaccaguaacacuaagcaaagaccaacuaucaggcaucaacaauaucgccuuuucaaauuaaggacuaguguccaccugucccuccugggcugcuggauugucucguuuuccugccaaauaaacaggaucagcgcuuuacagaucuaaaaaaaaaaaaaaaaaaaaaaaaaaaaaaaaaaaaaaaaaaaaaaaaaaaaaaaaaaaaaaaaugcaucccccccccccccccccccccccccccccccaaaggcucuuuucagagccaccagaauu

SEQ ID NO: 16498 - RNA, 1994 nt, Artificial Sequence
  mRNA product Design i-1 comprising derived and/or modified sequence from HRSV(Memphis-37)__AIY60640.1__F_DSCav1_mut4 (opt11)
gggagagggcgcuuggcuugcaaggacccugagcugcggcauugaagcacacccaacccaacucgacugaagucagccucacugaaccggaucugagaaucuucucucucugggcuugccagggcucuccgaaccuagcuagcauccucuucaauuccaacuagaaagcuuaccauggagcugcccauccucaagaccaacgccaucaccacgauccuggccgcggugacccugugcuucgcgagcucccagaacaucaccgaggaguucuaccagagcacgugcuccgccgucagcaagggcuaccucuccgcccugcgcaccgggugguacaccagcgugaucaccaucgagcuguccaacaucaaggagaacaagugcaacggcaccgacgccaaggugaaacucaucaagcaggagcuggacaaguacaagaacgccgucaccgagcugcagcuccugaugcagagcaccccggccgccggguccggcagcgcuaucugcuccgggaucgcggugugcaaggugcugcaccucgagggcgaggucaacaagaucaagaaugcccugcugagcaccaacaaggccguggugucccucagcaacggagucagcgugcuuaccuucaaggugcuggaccucaagaacuacaucgacaagcagcugcugccuauccucaacaagcagagcugcuccaucagcaacaucgagacggucaucgaguuccagcagaagaacaaccggcugcuggagaucacccgcgaguucuccgugaacgccggggugaccacccccgucagcacguacaugcucaccaacagcgaacugcugucccucaucaacgacaugcccaucaccaacgaccagaagaagcugaugagcaacaacgugcagaucgugcggcagcaguccuacagcaucaugugcaucaucaaggaggaaguccuggccuacguggugcagcucccucuguacggcgucaucgacacccccugcuggaagcugcacacgagcccccucugcaccaccaacaccaaggagggguccaacaucugccugacgcgcaccgaccggggcugguacugcgacaacgcgggguccgugagcuucuucccccaggccgagaccugcaaggugcagagcaaccgcgucuucugcgacacuaugaacagcagaacgcucccguccgaggugaaccugugcaacauagacauauucaaccccaaguacgacugcaagaucaugaccagcaagaccgacgucuccagcuccgugauuaccagccugggcgcaaucguguccugcuacggcaagacgaagugcaccgccagcaacaagaaccgggggaucaucaagaccuucuccaacggcugcgacuaugucagcaacaaggggguggacaccgugagcgucggaaacacgcucuacugcgugaacaagcaagagggcaaguccuuauacgugaagggggagcccaucaucaacuucuacgacccccuggucuucccgagcgacgaguucgacgccagcauaagccaggugaacgagaagaucaaccagucccucgcguucauccgcaagagcgacgagcugcugcacaacgugaacgucggcaaguccaccaccaacaucaugaucaccaccaucaucaucgugaucaucgugauccuccugcugcucaucgccgucgggcuguuccuguacugcaaggcccggagcacgcccgugaccuuguccaaggaccagcucagcggcaucaacaacaucgccuucuccaacugaggacuaguguccaccugucccuccugggcugcuggauugucucguuuuccugccaaauaaacaggaucagcgcuuuacagaucuaaaaaaaaaaaaaaaaaaaaaaaaaaaaaaaaaaaaaaaaaaaaaaaaaaaaaaaaaaaaaaaaugcaucccccccccccccccccccccccccccccccaaaggcucuuuucagagccaccagaauu

SEQ ID NO: 16499 - RNA, 1994 nt, Artificial Sequence
  mRNA product Design i-2 comprising derived and/or modified sequence from HRSV(Memphis-37)__AIY60640.1__F_DSCav1_mut4 (opt1)
gggagaggcgcugccuacggagguggcagccaucuccuucucggcaucaagcuuaccauggagcugcccauccucaagaccaacgccaucaccacgauccuggccgcggugacccugugcuucgccagcucccagaacaucaccgaggaguucuaccagagcacgugcuccgccgucagcaagggcuaccucuccgcccugcgcaccgggugguacaccagcgugaucaccaucgagcuguccaacaucaaggagaacaagugcaacggcaccgacgccaaggugaagcucaucaagcaggagcuggacaaguacaagaacgcggucacggagcugcagcuccugaugcagagcaccccggccgccggcuccgggagcgcgaucugcuccggcaucgccgucugcaaggugcugcaccucgagggcgaggugaacaagaucaagaacgcccugcuguccaccaacaaggccgucgugagccucuccaacggggugagcguccugaccuucaaggugcuggaccucaagaacuacaucgacaagcagcugcugcccauccugaacaagcagagcugcuccaucagcaacaucgagaccgucaucgaguuccagcagaagaacaaccgccuccuggagaucacgcgggaguucagcgugaacgcgggcgugaccacccccgucuccaccuacaugcugacgaacagcgagcuccugucccugaucaacgacaugccgaucaccaacgaccagaagaagcucaugagcaacaacgugcagaucgugcgccagcaguccuacagcaucaugugcaucaucaaggaggagguccuggccuacguggugcagcugccccucuacggggucaucgacacccccugcuggaagcugcacaccagcccccugugcacgaccaacaccaaggagggcuccaacaucugccucacccggacggaccgcgggugguacugcgacaacgccggcagcguguccuucuucccgcaggccgagaccugcaagguccagagcaaccggguguucugcgacaccaugaacucccggacccugcccagcgaggugaaccucugcaacaucgacaucuucaaccccaaguacgacugcaagaucaugacguccaagaccgacgucagcuccagcgugaucaccucccugggcgccaucgugagcugcuacgggaagaccaagugcacggcgagcaacaagaaccgcggcaucaucaagaccuucuccaacgggugcgacuacgucagcaacaagggcguggacaccguguccgucggcaacacccuguacugcgugaacaagcaggagggcaagagccucuacgugaagggggagcccaucaucaacuucuacgacccgcuggucuuccccuccgacgaguucgacgccagcaucucccaggugaacgagaagaucaaccagagccuggccuucauccggaaguccgacgagcuccugcacaacgugaacgucggcaagagcaccacgaacaucaugaucaccaccaucaucaucgugaucaucgugauccugcugcuccugaucgccgucgggcuguuccucuacugcaaggcccgcuccacccccgugacgcugagcaaggaccagcuguccgggaucaacaacaucgcguucagcaacugaggacuagugcaucacauuuaaaagcaucucagccuaccaugagaauaagagaaagaaaaugaagaucaauagcuuauucaucucuuuuucuuuuucguugguguaaagccaacacccugucuaaaaaacauaaauuucuuuaaucauuuugccucuuuucucugugcuucaauuaauaaaaaauggaaagaaccuagaucuaaaaaaaaaaaaaaaaaaaaaaaaaaaaaaaaaaaaaaaaaaaaaaaaaaaaaaaaaaaaaaaaugcaucccccccccccccccccccccccccccccccaaaggcucuuuucagagccaccagaauu

SEQ ID NO: 16500 - RNA, 1994 nt, Artificial Sequence
  mRNA product Design i-2 comprising derived and/or modified sequence from HRSV(Memphis-37)__AIY60640.1__F_DSCav1_mut4 (opt1)
gggagaggcgcugccuacggagguggcagccaucuccuucucggcaucaagcuuaccauggagcugcccauccucaagaccaacgccaucaccacgauccuggccgcggugacccugugcuucgccagcucccagaacaucaccgaggaguucuaccagagcacgugcuccgccgucagcaagggcuaccucuccgcccugcgcaccgggugguacaccagcgugaucaccaucgagcuguccaacaucaaggagaacaagugcaacggcaccgacgccaaggugaagcucaucaagcaggagcuggacaaguacaagaacgcggucacggagcugcagcuccugaugcagagcaccccggccgccggguccggcagcgccaucugcuccgggaucgcggugugcaaggugcugcaccucgagggcgaggucaacaagaucaagaacgcccugcugagcaccaacaaggccguggugucccucagcaacggcgucuccgugcugaccuucaaggugcuggaccucaagaacuacaucgacaagcagcugcugcccauccucaacaagcagagcugcuccaucagcaacaucgagacggucaucgaguuccagcagaagaacaaccggcugcuggagaucacccgcgaguucuccgugaacgccggggugaccacccccgucagcacguacaugcucaccaacagcgagcugcugucccucaucaacgacaugcccaucaccaacgaccagaagaagcugaugagcaacaacgugcagaucgugcggcagcaguccuacagcaucaugugcaucaucaaggaggagguccuggccuacguggugcagcucccgcuguacggcgucaucgacacccccugcuggaagcugcacacgagcccccucugcaccaccaacaccaaggagggguccaacaucugccugacgcgcaccgaccggggcugguacugcgacaacgcgggguccgugagcuucuucccccaggccgagaccugcaaggugcaguccaaccgcgucuucugcgacaccaugaacagccggacgcucccguccgaggugaaccugugcaacaucgacaucuucaaccccaaguacgacugcaagaucaugaccagcaagaccgacgucuccagcuccgugaucaccagccugggcgccaucguguccugcuacggcaagacgaagugcaccgccagcaacaagaaccgggggaucaucaagaccuucuccaacggcugcgacuacgucagcaacaaggggguggacaccgugagcgucggcaacacgcucuacugcgugaacaagcaggagggcaagucccuguacgugaagggggagcccaucaucaacuucuacgacccccuggucuucccgagcgacgaguucgacgccuccaucagccaggugaacgagaagaucaaccagucccucgcguucauccgcaagagcgacgagcugcugcacaacgugaacgucggcaaguccaccaccaacaucaugaucaccaccaucaucaucgugaucaucgugauccuccugcugcucaucgccgucgggcuguuccuguacugcaaggcccggagcacgcccgugacccuguccaaggaccagcucagcggcaucaacaacaucgccuucuccaacugaggacuagugcaucacauuuaaaagcaucucagccuaccaugagaauaagagaaagaaaaugaagaucaauagcuuauucaucucuuuuucuuuuucguugguguaaagccaacacccugucuaaaaaacauaaauuucuuuaaucauuuugccucuuuucucugugcuucaauuaauaaaaaauggaaagaaccuagaucuaaaaaaaaaaaaaaaaaaaaaaaaaaaaaaaaaaaaaaaaaaaaaaaaaaaaaaaaaaaaaaaaugcaucccccccccccccccccccccccccccccccaaaggcucuuuucagagccaccagaauu

SEQ ID NO: 16501 - RNA, 1994 nt, Artificial Sequence
  mRNA product Design i-2 comprising derived and/or modified sequence from HRSV(Memphis-37)__AIY60640.1__F_DSCav1_mut4 (opt2)
gggagaggcgcugccuacggagguggcagccaucuccuucucggcaucaagcuuaccauggagcuccccauccucaagaccaacgccaucaccaccauccucgccgccgucacccucugcuucgccuccucccagaacaucaccgaggaguucuaccaguccaccugcuccgccgucuccaagggcuaccucuccgcccuccgcaccggcugguacaccuccgucaucaccaucgagcucuccaacaucaaggagaacaagugcaacggcaccgacgccaaggucaagcucaucaagcaggagcucgacaaguacaagaacgccgucaccgagcuccagcuccucaugcaguccacccccgccgccggcuccggcuccgccaucugcuccggcaucgccgucugcaagguccuccaccucgagggcgaggucaacaagaucaagaacgcccuccucuccaccaacaaggccgucgucucccucuccaacggcgucuccguccucaccuucaagguccucgaccucaagaacuacaucgacaagcagcuccuccccauccucaacaagcaguccugcuccaucuccaacaucgagaccgucaucgaguuccagcagaagaacaaccgccuccucgagaucacccgcgaguucuccgucaacgccggcgucaccacccccgucuccaccuacaugcucaccaacuccgagcuccucucccucaucaacgacaugcccaucaccaacgaccagaagaagcucauguccaacaacguccagaucguccgccagcaguccuacuccaucaugugcaucaucaaggaggagguccucgccuacgucguccagcucccccucuacggcgucaucgacacccccugcuggaagcuccacaccuccccccucugcaccaccaacaccaaggagggcuccaacaucugccucacccgcaccgaccgcggcugguacugcgacaacgccggcuccgucuccuucuucccccaggccgagaccugcaagguccaguccaaccgcgucuucugcgacaccaugaacucccgcacccuccccuccgaggucaaccucugcaacaucgacaucuucaaccccaaguacgacugcaagaucaugaccuccaagaccgacgucuccuccuccgucaucaccucccucggcgccaucgucuccugcuacggcaagaccaagugcaccgccuccaacaagaaccgcggcaucaucaagaccuucuccaacggcugcgacuacgucuccaacaagggcgucgacaccgucuccgucggcaacacccucuacugcgucaacaagcaggagggcaagucccucuacgucaagggcgagcccaucaucaacuucuacgacccccucgucuuccccuccgacgaguucgacgccuccaucucccaggucaacgagaagaucaaccagucccucgccuucauccgcaaguccgacgagcuccuccacaacgucaacgucggcaaguccaccaccaacaucaugaucaccaccaucaucaucgucaucaucgucauccuccuccuccucaucgccgucggccucuuccucuacugcaaggcccgcuccacccccgucacccucuccaaggaccagcucuccggcaucaacaacaucgccuucuccaacugaggacuagugcaucacauuuaaaagcaucucagccuaccaugagaauaagagaaagaaaaugaagaucaauagcuuauucaucucuuuuucuuuuucguugguguaaagccaacacccugucuaaaaaacauaaauuucuuuaaucauuuugccucuuuucucugugcuucaauuaauaaaaaauggaaagaaccuagaucuaaaaaaaaaaaaaaaaaaaaaaaaaaaaaaaaaaaaaaaaaaaaaaaaaaaaaaaaaaaaaaaaugcaucccccccccccccccccccccccccccccccaaaggcucuuuucagagccaccagaauu

SEQ ID NO: 16502 - RNA, 1994 nt, Artificial Sequence
  mRNA product Design i-2 comprising derived and/or modified sequence from HRSV(Memphis-37)__AIY60640.1__F_DSCav1_mut4 (opt3)
gggagaggcgcugccuacggagguggcagccaucuccuucucggcaucaagcuuaccauggagcugcccauccucaagaccaacgccauuacaacuauacuugcugcagugacgcugugcuucgccagcucccagaauaucaccgaagaguuuuaccaaucuacauguucagcggucaguaaaggcuauuugagcgcuuuaagaacugggugguacaccuccguuauuacaaucgaacugucuaacauuaaggagaauaaaugcaacggaaccgacgccaaggugaaacuaaucaagcaggaacucgauaaguauaaaaaugcaguaacugagcugcagcuucugaugcagucgaccccugccgcugguucaggcagcgcaauauguagugggaucgccgugugcaaggucuugcaccucgagggagaagugaacaaaauuaagaaugcucugcuguccacaaacaaagccguugugucucucagcaauggcgucuccguguuaacguucaagguacuggaccuuaagaacuacaucgauaaacaauugcugccaauucuaaauaagcagucauguaguaucagcaacauagagacuguuauugaauuucagcagaaaaauaacaggcuccuggagaucacccgggaguucucugugaaugcgggugucacaacuccgguguccaccuauaugcuuacaaacucagaacuguugagccucauuaacgacaugcccaucaccaaugaucaaaagaaacugaugaguaacaaugugcagaucguccgccagcagucuuacuccauuaugugcauaaucaaggaggaaguuuuagcauaugugguacaacugccucucuacggggugauugacacgccauguuggaaacuucauacuagcccccugugcacaaccaacacuaaggagggaucgaauaucuguuugacacgaaccgaucguggcugguacugcgacaacgccggcucugucuccuuuuucccucaggcugaaacguguaaggugcagucaaauagaguguuuugcgauaccaugaacaguagaacacugccaagcgaggugaaucucugcaacauagacauuuucaaucccaaauaugauuguaagaucaugacuuccaaaaccgacgucucuagcucagugaucacaagucugggggccauuguauccugcuacggaaagacuaaauguaccgcaagcaacaagaauagggguaucauuaagacauuuucuaacggcugcgauuauguuucaaauaaagggguggacaccgucagugugggaaacacucuuuacugugucaacaagcaagagggcaaaagccuguaugugaagggugaaccuauaaucaauuucuacgacccauugguuuuuccguccgaugaguucgacgcuucuauuucgcagguuaacgagaaaaucaaucagagccucgccuuuauccggaaguccgaugaacuguuacacaacguaaaugucgggaagucaacgacaaacauuaugauaaccacuaucauuaucgugauuaucguuauacugcuacuccugaucgcggugggacuuuucuuguauugcaaagcccgcaguacccccgucacacugucuaaggaccagcucagcggcauuaauaacaucgcauucuccaauugaggacuagugcaucacauuuaaaagcaucucagccuaccaugagaauaagagaaagaaaaugaagaucaauagcuuauucaucucuuuuucuuuuucguugguguaaagccaacacccugucuaaaaaacauaaauuucuuuaaucauuuugccucuuuucucugugcuucaauuaauaaaaaauggaaagaaccuagaucuaaaaaaaaaaaaaaaaaaaaaaaaaaaaaaaaaaaaaaaaaaaaaaaaaaaaaaaaaaaaaaaaugcaucccccccccccccccccccccccccccccccaaaggcucuuuucagagccaccagaauu

SEQ ID NO: 16503 - RNA, 1994 nt, Artificial Sequence
  mRNA product Design i-2 comprising derived and/or modified sequence from HRSV(Memphis-37)__AIY60640.1__F_DSCav1_mut4 (opt4)
gggagaggcgcugccuacggagguggcagccaucuccuucucggcaucaagcuuaccauggagcugcccauccugaagaccaacgccaucaccaccauccuggccgccgugacccugugcuucgccagcagccagaacaucaccgaggaguucuaccagagcaccugcagcgccgugagcaagggcuaccugagcgcccugagaaccggcugguacaccagcgugaucaccaucgagcugagcaacaucaaggagaacaagugcaacggcaccgacgccaaggugaagcugaucaagcaggagcuggacaaguacaagaacgccgugaccgagcugcagcugcugaugcagagcacccccgccgccggcagcggcagcgccaucugcagcggcaucgccgugugcaaggugcugcaccuggagggcgaggugaacaagaucaagaacgcccugcugagcaccaacaaggccguggugagccugagcaacggcgugagcgugcugaccuucaaggugcuggaccugaagaacuacaucgacaagcagcugcugcccauccugaacaagcagagcugcagcaucagcaacaucgagaccgugaucgaguuccagcagaagaacaacagacugcuggagaucaccagagaguucagcgugaacgccggcgugaccacccccgugagcaccuacaugcugaccaacagcgagcugcugagccugaucaacgacaugcccaucaccaacgaccagaagaagcugaugagcaacaacgugcagaucgugagacagcagagcuacagcaucaugugcaucaucaaggaggaggugcuggccuacguggugcagcugccccuguacggcgugaucgacacccccugcuggaagcugcacaccagcccccugugcaccaccaacaccaaggagggcagcaacaucugccugaccagaaccgacagaggcugguacugcgacaacgccggcagcgugagcuucuucccccaggccgagaccugcaaggugcagagcaacagaguguucugcgacaccaugaacagcagaacccugcccagcgaggugaaccugugcaacaucgacaucuucaaccccaaguacgacugcaagaucaugaccagcaagaccgacgugagcagcagcgugaucaccagccugggcgccaucgugagcugcuacggcaagaccaagugcaccgccagcaacaagaacagaggcaucaucaagaccuucagcaacggcugcgacuacgugagcaacaagggcguggacaccgugagcgugggcaacacccuguacugcgugaacaagcaggagggcaagagccuguacgugaagggcgagcccaucaucaacuucuacgacccccugguguuccccagcgacgaguucgacgccagcaucagccaggugaacgagaagaucaaccagagccuggccuucaucagaaagagcgacgagcugcugcacaacgugaacgugggcaagagcaccaccaacaucaugaucaccaccaucaucaucgugaucaucgugauccugcugcugcugaucgccgugggccuguuccuguacugcaaggccagaagcacccccgugacccugagcaaggaccagcugagcggcaucaacaacaucgccuucagcaacugaggacuagugcaucacauuuaaaagcaucucagccuaccaugagaauaagagaaagaaaaugaagaucaauagcuuauucaucucuuuuucuuuuucguugguguaaagccaacacccugucuaaaaaacauaaauuucuuuaaucauuuugccucuuuucucugugcuucaauuaauaaaaaauggaaagaaccuagaucuaaaaaaaaaaaaaaaaaaaaaaaaaaaaaaaaaaaaaaaaaaaaaaaaaaaaaaaaaaaaaaaaugcaucccccccccccccccccccccccccccccccaaaggcucuuuucagagccaccagaauu

SEQ ID NO: 16504 - RNA, 1994 nt, Artificial Sequence
  mRNA product Design i-2 comprising derived and/or modified sequence from HRSV(Memphis-37)__AIY60640.1__F_DSCav1_mut4 (opt5)
gggagaggcgcugccuacggagguggcagccaucuccuucucggcaucaagcuuaccauggagcugcccauccucaagaccaacgccauuacaacgauccuggcugccgugacccuuugcuucgcgagcucccagaauauuacagaagaguuuuaccaaucuaccuguagcgcugucuccaaaggcuaucugucugcccucagaacagggugguacaccagcguuaucacaauugaacuguccaacaucaaggagaauaaaugcaacggaaccgacgccaaggugaaacuuaucaagcaggaacuggauaaguauaaaaaugcugugacggagcuccagcugcugaugcagucuaccccugccgcuggcagcggguccgccauuuguagcggaaucgcggucugcaaggugcuccaccuggagggcgaaguuaacaaaauuaagaaugcccuucugucuacaaacaaagcuguggucucccucagcaauggggugucuguucugaccuucaaggugcuugaccugaagaacuacaucgauaaacaacuccugccgauucugaauaagcaguccuguagcaucucuaacauugagacagucaucgaauuucagcagaaaaauaaccggcuccuggagaucacccgcgaguucuccgugaaugccggagugacgacacccgucagcaccuauaugcuuacaaacuccgaacugcucucucugauuaacgacaugccuaucaccaaugaucaaaagaaacuuaugagcaacaauguucagauugugagacagcaguccuacagcaucaugugcauuaucaaggaggaagugcuggcuuaugucgugcaacucccccuguacggcguuaucgacaccccuuguuggaaacugcauacaucuccccucugcacgaccaacacaaaggagggcuccaauauuugucugacccggacagaucgcgggugguacugcgacaacgccggaagcgugagcuuuuucccucaggcggaaaccuguaagguccagucuaauagaguguuuugcgauacgaugaacuccagaacacugccgucugagguuaaucucugcaacaucgacauuuucaaucccaaauaugauuguaagaucaugaccagcaaaaccgacguguccagcucugucauuacaucccugggcgccaucgugagcugcuacgggaagaccaaauguacagcuucuaacaagaaucggggaaucauuaagacguuuuccaacggcugcgauuaugucagcaauaaagggguggacaccguuuccgugggaaacacacuuuacugugucaacaagcaagagggcaaaucucuguaugugaagggcgaaccuaucauuaauuucuacgacccccucguuuuuccuagcgaugaguucgacgccuccaucucucaggugaacgaaaagauuaaucagagccuggcuuuuauccgcaaguccgaugagcugcuccacaacgucaauguggggaaaagcaccacaaacauuaugaucaccacgaucauuaucgugauuaucguuauucugcuucugcucaucgccgucggacuguuccuguauugcaaagccagaucuacccccgugacacuuuccaaggaccagcucagcggcaucaauaacauugcuuucucuaauugaggacuagugcaucacauuuaaaagcaucucagccuaccaugagaauaagagaaagaaaaugaagaucaauagcuuauucaucucuuuuucuuuuucguugguguaaagccaacacccugucuaaaaaacauaaauuucuuuaaucauuuugccucuuuucucugugcuucaauuaauaaaaaauggaaagaaccuagaucuaaaaaaaaaaaaaaaaaaaaaaaaaaaaaaaaaaaaaaaaaaaaaaaaaaaaaaaaaaaaaaaaugcaucccccccccccccccccccccccccccccccaaaggcucuuuucagagccaccagaauu

SEQ ID NO: 16505 - RNA, 1994 nt, Artificial Sequence
  mRNA product Design i-2 comprising derived and/or modified sequence from HRSV(Memphis-37)__AIY60640.1__F_DSCav1_mut4 (opt6)
gggagaggcgcugccuacggagguggcagccaucuccuucucggcaucaagcuuaccauggaacucccaauccuaaaaacaaacgcaauaacaacaauauuagcagccguaacacucuguuucgccucaucccaaaacauaacagaagaauuuuaucaaucuacauguuccgccgucaguaaaggauaucuaucagccuuaagaacaggcugguacacaucaguaaucaccauagaauuauccaacauaaaagaaaacaaaugcaauggcacagaugccaaaguaaaacuaaucaaacaagaacuugauaaauauaaaaacgcaguaacagaauuacaauuauuaaugcaaagcacaccagccgcaggaucaggaucagcaauauguucaggaauagcagucuguaaaguacuacacuuagaaggagaaguaaacaaaauuaaaaacgcauuacuaagcaccaauaaagcaguaguaucacuaucaaacggcguauccguauuaacguucaaaguccucgaccugaaaaacuacauagauaaacaacuacuaccaauacuaaauaaacaaucaugcucaauaucaaacauagaaacuguuaucgaauuucaacagaaaaauaaccgacuacuagaaaucaccagagaauuuucaguaaacgcaggcgucacuacaccaguauccacauacaugcuaaccaacucggaauuacuuucccucauaaacgacaugccaauaacaaacgaccaaaagaaacuuaugucaaacaacguucaaauaguccgccaacaaucauacucaauaauguguaucauaaaagaagaaguccuagcauaugucguacaacuaccauuauacggaguaauugacacaccuugcuggaaacuacacacauccccacuauguacaacaaacacuaaagaaggaucaaacaucugccuaaccagaacagacagaggcugguauugcgacaacgcaggaucaguaucauucuucccacaagcagaaacaugcaaaguacaaucaaacagagucuucugcgacaccaugaacagcagaacccucccauccgaaguaaacuuaugcaacaucgauaucuucaacccaaaauacgacuguaaaauaaugacaucaaaaacagacguuucauccucaguaauaacaucauuaggugccauaguuucauguuacggaaaaaccaaauguaccgcaucaaacaaaaacagaggcauuauuaaaacauucucuaacggaugcgacuaugucaguaacaaaggaguagacacaguaucagucggaaacacauuauauugcguaaauaaacaagaaggaaaaagucuauacguaaaaggagaaccaauaauaaacuuuuacgacccucucguauucccaucagacgaauuugaugcauccauaucacaagucaacgaaaagauaaaccaaucccuagcauucauaagaaaaucagacgaacuacuccauaacguaaacguaggaaaaagcacaaccaauauaaugauaaccacaauaaucauaguaauaauagucauauuauuacuuuuaauugcaguaggacucuuucuauacugcaaagcaagaagcacaccaguaacacuaagcaaagaccaacuaucaggcaucaacaauaucgccuuuucaaauuaaggacuagugcaucacauuuaaaagcaucucagccuaccaugagaauaagagaaagaaaaugaagaucaauagcuuauucaucucuuuuucuuuuucguugguguaaagccaacacccugucuaaaaaacauaaauuucuuuaaucauuuugccucuuuucucugugcuucaauuaauaaaaaauggaaagaaccuagaucuaaaaaaaaaaaaaaaaaaaaaaaaaaaaaaaaaaaaaaaaaaaaaaaaaaaaaaaaaaaaaaaaugcaucccccccccccccccccccccccccccccccaaaggcucuuuucagagccaccagaauu

SEQ ID NO: 16506 - RNA, 1994 nt, Artificial Sequence
  mRNA product Design i-2 comprising derived and/or modified sequence from HRSV(Memphis-37)__AIY60640.1__F_DSCav1_mut4 (opt11)
gggagaggcgcugccuacggagguggcagccaucuccuucucggcaucaagcuuaccauggagcugcccauccucaagaccaacgccaucaccacgauccuggccgcggugacccugugcuucgcgagcucccagaacaucaccgaggaguucuaccagagcacgugcuccgccgucagcaagggcuaccucuccgcccugcgcaccgggugguacaccagcgugaucaccaucgagcuguccaacaucaaggagaacaagugcaacggcaccgacgccaaggugaaacucaucaagcaggagcuggacaaguacaagaacgccgucaccgagcugcagcuccugaugcagagcaccccggccgccggguccggcagcgcuaucugcuccgggaucgcggugugcaaggugcugcaccucgagggcgaggucaacaagaucaagaaugcccugcugagcaccaacaaggccguggugucccucagcaacggagucagcgugcuuaccuucaaggugcuggaccucaagaacuacaucgacaagcagcugcugccuauccucaacaagcagagcugcuccaucagcaacaucgagacggucaucgaguuccagcagaagaacaaccggcugcuggagaucacccgcgaguucuccgugaacgccggggugaccacccccgucagcacguacaugcucaccaacagcgaacugcugucccucaucaacgacaugcccaucaccaacgaccagaagaagcugaugagcaacaacgugcagaucgugcggcagcaguccuacagcaucaugugcaucaucaaggaggaaguccuggccuacguggugcagcucccucuguacggcgucaucgacacccccugcuggaagcugcacacgagcccccucugcaccaccaacaccaaggagggguccaacaucugccugacgcgcaccgaccggggcugguacugcgacaacgcgggguccgugagcuucuucccccaggccgagaccugcaaggugcagagcaaccgcgucuucugcgacacuaugaacagcagaacgcucccguccgaggugaaccugugcaacauagacauauucaaccccaaguacgacugcaagaucaugaccagcaagaccgacgucuccagcuccgugauuaccagccugggcgcaaucguguccugcuacggcaagacgaagugcaccgccagcaacaagaaccgggggaucaucaagaccuucuccaacggcugcgacuaugucagcaacaaggggguggacaccgugagcgucggaaacacgcucuacugcgugaacaagcaagagggcaaguccuuauacgugaagggggagcccaucaucaacuucuacgacccccuggucuucccgagcgacgaguucgacgccagcauaagccaggugaacgagaagaucaaccagucccucgcguucauccgcaagagcgacgagcugcugcacaacgugaacgucggcaaguccaccaccaacaucaugaucaccaccaucaucaucgugaucaucgugauccuccugcugcucaucgccgucgggcuguuccuguacugcaaggcccggagcacgcccgugaccuuguccaaggaccagcucagcggcaucaacaacaucgccuucuccaacugaggacuagugcaucacauuuaaaagcaucucagccuaccaugagaauaagagaaagaaaaugaagaucaauagcuuauucaucucuuuuucuuuuucguugguguaaagccaacacccugucuaaaaaacauaaauuucuuuaaucauuuugccucuuuucucugugcuucaauuaauaaaaaauggaaagaaccuagaucuaaaaaaaaaaaaaaaaaaaaaaaaaaaaaaaaaaaaaaaaaaaaaaaaaaaaaaaaaaaaaaaaugcaucccccccccccccccccccccccccccccccaaaggcucuuuucagagccaccagaauu

SEQ ID NO: 16507 - RNA, 1990 nt, Artificial Sequence
  mRNA product Design i-2 comprising derived and/or modified sequence from HRSV(Memphis-37)__AIY60640.1__F_DSCav1_mut4 (opt1)
ggggcgcugccuacggagguggcagccaucuccuucucggcaucaagcuuaccauggagcugcccauccucaagaccaacgccaucaccacgauccuggccgcggugacccugugcuucgccagcucccagaacaucaccgaggaguucuaccagagcacgugcuccgccgucagcaagggcuaccucuccgcccugcgcaccgggugguacaccagcgugaucaccaucgagcuguccaacaucaaggagaacaagugcaacggcaccgacgccaaggugaagcucaucaagcaggagcuggacaaguacaagaacgcggucacggagcugcagcuccugaugcagagcaccccggccgccggcuccgggagcgcgaucugcuccggcaucgccgucugcaaggugcugcaccucgagggcgaggugaacaagaucaagaacgcccugcuguccaccaacaaggccgucgugagccucuccaacggggugagcguccugaccuucaaggugcuggaccucaagaacuacaucgacaagcagcugcugcccauccugaacaagcagagcugcuccaucagcaacaucgagaccgucaucgaguuccagcagaagaacaaccgccuccuggagaucacgcgggaguucagcgugaacgcgggcgugaccacccccgucuccaccuacaugcugacgaacagcgagcuccugucccugaucaacgacaugccgaucaccaacgaccagaagaagcucaugagcaacaacgugcagaucgugcgccagcaguccuacagcaucaugugcaucaucaaggaggagguccuggccuacguggugcagcugccccucuacggggucaucgacacccccugcuggaagcugcacaccagcccccugugcacgaccaacaccaaggagggcuccaacaucugccucacccggacggaccgcgggugguacugcgacaacgccggcagcguguccuucuucccgcaggccgagaccugcaagguccagagcaaccggguguucugcgacaccaugaacucccggacccugcccagcgaggugaaccucugcaacaucgacaucuucaaccccaaguacgacugcaagaucaugacguccaagaccgacgucagcuccagcgugaucaccucccugggcgccaucgugagcugcuacgggaagaccaagugcacggcgagcaacaagaaccgcggcaucaucaagaccuucuccaacgggugcgacuacgucagcaacaagggcguggacaccguguccgucggcaacacccuguacugcgugaacaagcaggagggcaagagccucuacgugaagggggagcccaucaucaacuucuacgacccgcuggucuuccccuccgacgaguucgacgccagcaucucccaggugaacgagaagaucaaccagagccuggccuucauccggaaguccgacgagcuccugcacaacgugaacgucggcaagagcaccacgaacaucaugaucaccaccaucaucaucgugaucaucgugauccugcugcuccugaucgccgucgggcuguuccucuacugcaaggcccgcuccacccccgugacgcugagcaaggaccagcuguccgggaucaacaacaucgcguucagcaacugaggacuagugcaucacauuuaaaagcaucucagccuaccaugagaauaagagaaagaaaaugaagaucaauagcuuauucaucucuuuuucuuuuucguugguguaaagccaacacccugucuaaaaaacauaaauuucuuuaaucauuuugccucuuuucucugugcuucaauuaauaaaaaauggaaagaaccuagaucuaaaaaaaaaaaaaaaaaaaaaaaaaaaaaaaaaaaaaaaaaaaaaaaaaaaaaaaaaaaaaaaaugcaucccccccccccccccccccccccccccccccaaaggcucuuuucagagccaccagaauu

SEQ ID NO: 16508 - RNA, 1990 nt, Artificial Sequence
  mRNA product Design i-2 comprising derived and/or modified sequence from HRSV(Memphis-37)__AIY60640.1__F_DSCav1_mut4 (opt1)
ggggcgcugccuacggagguggcagccaucuccuucucggcaucaagcuuaccauggagcugcccauccucaagaccaacgccaucaccacgauccuggccgcggugacccugugcuucgccagcucccagaacaucaccgaggaguucuaccagagcacgugcuccgccgucagcaagggcuaccucuccgcccugcgcaccgggugguacaccagcgugaucaccaucgagcuguccaacaucaaggagaacaagugcaacggcaccgacgccaaggugaagcucaucaagcaggagcuggacaaguacaagaacgcggucacggagcugcagcuccugaugcagagcaccccggccgccggguccggcagcgccaucugcuccgggaucgcggugugcaaggugcugcaccucgagggcgaggucaacaagaucaagaacgcccugcugagcaccaacaaggccguggugucccucagcaacggcgucuccgugcugaccuucaaggugcuggaccucaagaacuacaucgacaagcagcugcugcccauccucaacaagcagagcugcuccaucagcaacaucgagacggucaucgaguuccagcagaagaacaaccggcugcuggagaucacccgcgaguucuccgugaacgccggggugaccacccccgucagcacguacaugcucaccaacagcgagcugcugucccucaucaacgacaugcccaucaccaacgaccagaagaagcugaugagcaacaacgugcagaucgugcggcagcaguccuacagcaucaugugcaucaucaaggaggagguccuggccuacguggugcagcucccgcuguacggcgucaucgacacccccugcuggaagcugcacacgagcccccucugcaccaccaacaccaaggagggguccaacaucugccugacgcgcaccgaccggggcugguacugcgacaacgcgggguccgugagcuucuucccccaggccgagaccugcaaggugcaguccaaccgcgucuucugcgacaccaugaacagccggacgcucccguccgaggugaaccugugcaacaucgacaucuucaaccccaaguacgacugcaagaucaugaccagcaagaccgacgucuccagcuccgugaucaccagccugggcgccaucguguccugcuacggcaagacgaagugcaccgccagcaacaagaaccgggggaucaucaagaccuucuccaacggcugcgacuacgucagcaacaaggggguggacaccgugagcgucggcaacacgcucuacugcgugaacaagcaggagggcaagucccuguacgugaagggggagcccaucaucaacuucuacgacccccuggucuucccgagcgacgaguucgacgccuccaucagccaggugaacgagaagaucaaccagucccucgcguucauccgcaagagcgacgagcugcugcacaacgugaacgucggcaaguccaccaccaacaucaugaucaccaccaucaucaucgugaucaucgugauccuccugcugcucaucgccgucgggcuguuccuguacugcaaggcccggagcacgcccgugacccuguccaaggaccagcucagcggcaucaacaacaucgccuucuccaacugaggacuagugcaucacauuuaaaagcaucucagccuaccaugagaauaagagaaagaaaaugaagaucaauagcuuauucaucucuuuuucuuuuucguugguguaaagccaacacccugucuaaaaaacauaaauuucuuuaaucauuuugccucuuuucucugugcuucaauuaauaaaaaauggaaagaaccuagaucuaaaaaaaaaaaaaaaaaaaaaaaaaaaaaaaaaaaaaaaaaaaaaaaaaaaaaaaaaaaaaaaaugcaucccccccccccccccccccccccccccccccaaaggcucuuuucagagccaccagaauu

SEQ ID NO: 16509 - RNA, 1990 nt, Artificial Sequence
  mRNA product Design i-2 comprising derived and/or modified sequence from HRSV(Memphis-37)__AIY60640.1__F_DSCav1_mut4 (opt2)
ggggcgcugccuacggagguggcagccaucuccuucucggcaucaagcuuaccauggagcuccccauccucaagaccaacgccaucaccaccauccucgccgccgucacccucugcuucgccuccucccagaacaucaccgaggaguucuaccaguccaccugcuccgccgucuccaagggcuaccucuccgcccuccgcaccggcugguacaccuccgucaucaccaucgagcucuccaacaucaaggagaacaagugcaacggcaccgacgccaaggucaagcucaucaagcaggagcucgacaaguacaagaacgccgucaccgagcuccagcuccucaugcaguccacccccgccgccggcuccggcuccgccaucugcuccggcaucgccgucugcaagguccuccaccucgagggcgaggucaacaagaucaagaacgcccuccucuccaccaacaaggccgucgucucccucuccaacggcgucuccguccucaccuucaagguccucgaccucaagaacuacaucgacaagcagcuccuccccauccucaacaagcaguccugcuccaucuccaacaucgagaccgucaucgaguuccagcagaagaacaaccgccuccucgagaucacccgcgaguucuccgucaacgccggcgucaccacccccgucuccaccuacaugcucaccaacuccgagcuccucucccucaucaacgacaugcccaucaccaacgaccagaagaagcucauguccaacaacguccagaucguccgccagcaguccuacuccaucaugugcaucaucaaggaggagguccucgccuacgucguccagcucccccucuacggcgucaucgacacccccugcuggaagcuccacaccuccccccucugcaccaccaacaccaaggagggcuccaacaucugccucacccgcaccgaccgcggcugguacugcgacaacgccggcuccgucuccuucuucccccaggccgagaccugcaagguccaguccaaccgcgucuucugcgacaccaugaacucccgcacccuccccuccgaggucaaccucugcaacaucgacaucuucaaccccaaguacgacugcaagaucaugaccuccaagaccgacgucuccuccuccgucaucaccucccucggcgccaucgucuccugcuacggcaagaccaagugcaccgccuccaacaagaaccgcggcaucaucaagaccuucuccaacggcugcgacuacgucuccaacaagggcgucgacaccgucuccgucggcaacacccucuacugcgucaacaagcaggagggcaagucccucuacgucaagggcgagcccaucaucaacuucuacgacccccucgucuuccccuccgacgaguucgacgccuccaucucccaggucaacgagaagaucaaccagucccucgccuucauccgcaaguccgacgagcuccuccacaacgucaacgucggcaaguccaccaccaacaucaugaucaccaccaucaucaucgucaucaucgucauccuccuccuccucaucgccgucggccucuuccucuacugcaaggcccgcuccacccccgucacccucuccaaggaccagcucuccggcaucaacaacaucgccuucuccaacugaggacuagugcaucacauuuaaaagcaucucagccuaccaugagaauaagagaaagaaaaugaagaucaauagcuuauucaucucuuuuucuuuuucguugguguaaagccaacacccugucuaaaaaacauaaauuucuuuaaucauuuugccucuuuucucugugcuucaauuaauaaaaaauggaaagaaccuagaucuaaaaaaaaaaaaaaaaaaaaaaaaaaaaaaaaaaaaaaaaaaaaaaaaaaaaaaaaaaaaaaaaugcaucccccccccccccccccccccccccccccccaaaggcucuuuucagagccaccagaauu

SEQ ID NO: 16510 - RNA, 1990 nt, Artificial Sequence
  mRNA product Design i-2 comprising derived and/or modified sequence from HRSV(Memphis-37)__AIY60640.1__F_DSCav1_mut4 (opt3)
ggggcgcugccuacggagguggcagccaucuccuucucggcaucaagcuuaccauggagcugcccauccucaagaccaacgccauuacaacuauacuugcugcagugacgcugugcuucgccagcucccagaauaucaccgaagaguuuuaccaaucuacauguucagcggucaguaaaggcuauuugagcgcuuuaagaacugggugguacaccuccguuauuacaaucgaacugucuaacauuaaggagaauaaaugcaacggaaccgacgccaaggugaaacuaaucaagcaggaacucgauaaguauaaaaaugcaguaacugagcugcagcuucugaugcagucgaccccugccgcugguucaggcagcgcaauauguagugggaucgccgugugcaaggucuugcaccucgagggagaagugaacaaaauuaagaaugcucugcuguccacaaacaaagccguugugucucucagcaauggcgucuccguguuaacguucaagguacuggaccuuaagaacuacaucgauaaacaauugcugccaauucuaaauaagcagucauguaguaucagcaacauagagacuguuauugaauuucagcagaaaaauaacaggcuccuggagaucacccgggaguucucugugaaugcgggugucacaacuccgguguccaccuauaugcuuacaaacucagaacuguugagccucauuaacgacaugcccaucaccaaugaucaaaagaaacugaugaguaacaaugugcagaucguccgccagcagucuuacuccauuaugugcauaaucaaggaggaaguuuuagcauaugugguacaacugccucucuacggggugauugacacgccauguuggaaacuucauacuagcccccugugcacaaccaacacuaaggagggaucgaauaucuguuugacacgaaccgaucguggcugguacugcgacaacgccggcucugucuccuuuuucccucaggcugaaacguguaaggugcagucaaauagaguguuuugcgauaccaugaacaguagaacacugccaagcgaggugaaucucugcaacauagacauuuucaaucccaaauaugauuguaagaucaugacuuccaaaaccgacgucucuagcucagugaucacaagucugggggccauuguauccugcuacggaaagacuaaauguaccgcaagcaacaagaauagggguaucauuaagacauuuucuaacggcugcgauuauguuucaaauaaagggguggacaccgucagugugggaaacacucuuuacugugucaacaagcaagagggcaaaagccuguaugugaagggugaaccuauaaucaauuucuacgacccauugguuuuuccguccgaugaguucgacgcuucuauuucgcagguuaacgagaaaaucaaucagagccucgccuuuauccggaaguccgaugaacuguuacacaacguaaaugucgggaagucaacgacaaacauuaugauaaccacuaucauuaucgugauuaucguuauacugcuacuccugaucgcggugggacuuuucuuguauugcaaagcccgcaguacccccgucacacugucuaaggaccagcucagcggcauuaauaacaucgcauucuccaauugaggacuagugcaucacauuuaaaagcaucucagccuaccaugagaauaagagaaagaaaaugaagaucaauagcuuauucaucucuuuuucuuuuucguugguguaaagccaacacccugucuaaaaaacauaaauuucuuuaaucauuuugccucuuuucucugugcuucaauuaauaaaaaauggaaagaaccuagaucuaaaaaaaaaaaaaaaaaaaaaaaaaaaaaaaaaaaaaaaaaaaaaaaaaaaaaaaaaaaaaaaaugcaucccccccccccccccccccccccccccccccaaaggcucuuuucagagccaccagaauu

SEQ ID NO: 16511 - RNA, 1990 nt, Artificial Sequence
  mRNA product Design i-2 comprising derived and/or modified sequence from HRSV(Memphis-37)__AIY60640.1__F_DSCav1_mut4 (opt4)
ggggcgcugccuacggagguggcagccaucuccuucucggcaucaagcuuaccauggagcugcccauccugaagaccaacgccaucaccaccauccuggccgccgugacccugugcuucgccagcagccagaacaucaccgaggaguucuaccagagcaccugcagcgccgugagcaagggcuaccugagcgcccugagaaccggcugguacaccagcgugaucaccaucgagcugagcaacaucaaggagaacaagugcaacggcaccgacgccaaggugaagcugaucaagcaggagcuggacaaguacaagaacgccgugaccgagcugcagcugcugaugcagagcacccccgccgccggcagcggcagcgccaucugcagcggcaucgccgugugcaaggugcugcaccuggagggcgaggugaacaagaucaagaacgcccugcugagcaccaacaaggccguggugagccugagcaacggcgugagcgugcugaccuucaaggugcuggaccugaagaacuacaucgacaagcagcugcugcccauccugaacaagcagagcugcagcaucagcaacaucgagaccgugaucgaguuccagcagaagaacaacagacugcuggagaucaccagagaguucagcgugaacgccggcgugaccacccccgugagcaccuacaugcugaccaacagcgagcugcugagccugaucaacgacaugcccaucaccaacgaccagaagaagcugaugagcaacaacgugcagaucgugagacagcagagcuacagcaucaugugcaucaucaaggaggaggugcuggccuacguggugcagcugccccuguacggcgugaucgacacccccugcuggaagcugcacaccagcccccugugcaccaccaacaccaaggagggcagcaacaucugccugaccagaaccgacagaggcugguacugcgacaacgccggcagcgugagcuucuucccccaggccgagaccugcaaggugcagagcaacagaguguucugcgacaccaugaacagcagaacccugcccagcgaggugaaccugugcaacaucgacaucuucaaccccaaguacgacugcaagaucaugaccagcaagaccgacgugagcagcagcgugaucaccagccugggcgccaucgugagcugcuacggcaagaccaagugcaccgccagcaacaagaacagaggcaucaucaagaccuucagcaacggcugcgacuacgugagcaacaagggcguggacaccgugagcgugggcaacacccuguacugcgugaacaagcaggagggcaagagccuguacgugaagggcgagcccaucaucaacuucuacgacccccugguguuccccagcgacgaguucgacgccagcaucagccaggugaacgagaagaucaaccagagccuggccuucaucagaaagagcgacgagcugcugcacaacgugaacgugggcaagagcaccaccaacaucaugaucaccaccaucaucaucgugaucaucgugauccugcugcugcugaucgccgugggccuguuccuguacugcaaggccagaagcacccccgugacccugagcaaggaccagcugagcggcaucaacaacaucgccuucagcaacugaggacuagugcaucacauuuaaaagcaucucagccuaccaugagaauaagagaaagaaaaugaagaucaauagcuuauucaucucuuuuucuuuuucguugguguaaagccaacacccugucuaaaaaacauaaauuucuuuaaucauuuugccucuuuucucugugcuucaauuaauaaaaaauggaaagaaccuagaucuaaaaaaaaaaaaaaaaaaaaaaaaaaaaaaaaaaaaaaaaaaaaaaaaaaaaaaaaaaaaaaaaugcaucccccccccccccccccccccccccccccccaaaggcucuuuucagagccaccagaauu

SEQ ID NO: 16512 - RNA, 1990 nt, Artificial Sequence
  mRNA product Design i-2 comprising derived and/or modified sequence from HRSV(Memphis-37)__AIY60640.1__F_DSCav1_mut4 (opt5)
ggggcgcugccuacggagguggcagccaucuccuucucggcaucaagcuuaccauggagcugcccauccucaagaccaacgccauuacaacgauccuggcugccgugacccuuugcuucgcgagcucccagaauauuacagaagaguuuuaccaaucuaccuguagcgcugucuccaaaggcuaucugucugcccucagaacagggugguacaccagcguuaucacaauugaacuguccaacaucaaggagaauaaaugcaacggaaccgacgccaaggugaaacuuaucaagcaggaacuggauaaguauaaaaaugcugugacggagcuccagcugcugaugcagucuaccccugccgcuggcagcggguccgccauuuguagcggaaucgcggucugcaaggugcuccaccuggagggcgaaguuaacaaaauuaagaaugcccuucugucuacaaacaaagcuguggucucccucagcaauggggugucuguucugaccuucaaggugcuugaccugaagaacuacaucgauaaacaacuccugccgauucugaauaagcaguccuguagcaucucuaacauugagacagucaucgaauuucagcagaaaaauaaccggcuccuggagaucacccgcgaguucuccgugaaugccggagugacgacacccgucagcaccuauaugcuuacaaacuccgaacugcucucucugauuaacgacaugccuaucaccaaugaucaaaagaaacuuaugagcaacaauguucagauugugagacagcaguccuacagcaucaugugcauuaucaaggaggaagugcuggcuuaugucgugcaacucccccuguacggcguuaucgacaccccuuguuggaaacugcauacaucuccccucugcacgaccaacacaaaggagggcuccaauauuugucugacccggacagaucgcgggugguacugcgacaacgccggaagcgugagcuuuuucccucaggcggaaaccuguaagguccagucuaauagaguguuuugcgauacgaugaacuccagaacacugccgucugagguuaaucucugcaacaucgacauuuucaaucccaaauaugauuguaagaucaugaccagcaaaaccgacguguccagcucugucauuacaucccugggcgccaucgugagcugcuacgggaagaccaaauguacagcuucuaacaagaaucggggaaucauuaagacguuuuccaacggcugcgauuaugucagcaauaaagggguggacaccguuuccgugggaaacacacuuuacugugucaacaagcaagagggcaaaucucuguaugugaagggcgaaccuaucauuaauuucuacgacccccucguuuuuccuagcgaugaguucgacgccuccaucucucaggugaacgaaaagauuaaucagagccuggcuuuuauccgcaaguccgaugagcugcuccacaacgucaauguggggaaaagcaccacaaacauuaugaucaccacgaucauuaucgugauuaucguuauucugcuucugcucaucgccgucggacuguuccuguauugcaaagccagaucuacccccgugacacuuuccaaggaccagcucagcggcaucaauaacauugcuuucucuaauugaggacuagugcaucacauuuaaaagcaucucagccuaccaugagaauaagagaaagaaaaugaagaucaauagcuuauucaucucuuuuucuuuuucguugguguaaagccaacacccugucuaaaaaacauaaauuucuuuaaucauuuugccucuuuucucugugcuucaauuaauaaaaaauggaaagaaccuagaucuaaaaaaaaaaaaaaaaaaaaaaaaaaaaaaaaaaaaaaaaaaaaaaaaaaaaaaaaaaaaaaaaugcaucccccccccccccccccccccccccccccccaaaggcucuuuucagagccaccagaauu

SEQ ID NO: 16513 - RNA, 1990 nt, Artificial Sequence
  mRNA product Design i-2 comprising derived and/or modified sequence from HRSV(Memphis-37)__AIY60640.1__F_DSCav1_mut4 (opt6)
ggggcgcugccuacggagguggcagccaucuccuucucggcaucaagcuuaccauggaacucccaauccuaaaaacaaacgcaauaacaacaauauuagcagccguaacacucuguuucgccucaucccaaaacauaacagaagaauuuuaucaaucuacauguuccgccgucaguaaaggauaucuaucagccuuaagaacaggcugguacacaucaguaaucaccauagaauuauccaacauaaaagaaaacaaaugcaauggcacagaugccaaaguaaaacuaaucaaacaagaacuugauaaauauaaaaacgcaguaacagaauuacaauuauuaaugcaaagcacaccagccgcaggaucaggaucagcaauauguucaggaauagcagucuguaaaguacuacacuuagaaggagaaguaaacaaaauuaaaaacgcauuacuaagcaccaauaaagcaguaguaucacuaucaaacggcguauccguauuaacguucaaaguccucgaccugaaaaacuacauagauaaacaacuacuaccaauacuaaauaaacaaucaugcucaauaucaaacauagaaacuguuaucgaauuucaacagaaaaauaaccgacuacuagaaaucaccagagaauuuucaguaaacgcaggcgucacuacaccaguauccacauacaugcuaaccaacucggaauuacuuucccucauaaacgacaugccaauaacaaacgaccaaaagaaacuuaugucaaacaacguucaaauaguccgccaacaaucauacucaauaauguguaucauaaaagaagaaguccuagcauaugucguacaacuaccauuauacggaguaauugacacaccuugcuggaaacuacacacauccccacuauguacaacaaacacuaaagaaggaucaaacaucugccuaaccagaacagacagaggcugguauugcgacaacgcaggaucaguaucauucuucccacaagcagaaacaugcaaaguacaaucaaacagagucuucugcgacaccaugaacagcagaacccucccauccgaaguaaacuuaugcaacaucgauaucuucaacccaaaauacgacuguaaaauaaugacaucaaaaacagacguuucauccucaguaauaacaucauuaggugccauaguuucauguuacggaaaaaccaaauguaccgcaucaaacaaaaacagaggcauuauuaaaacauucucuaacggaugcgacuaugucaguaacaaaggaguagacacaguaucagucggaaacacauuauauugcguaaauaaacaagaaggaaaaagucuauacguaaaaggagaaccaauaauaaacuuuuacgacccucucguauucccaucagacgaauuugaugcauccauaucacaagucaacgaaaagauaaaccaaucccuagcauucauaagaaaaucagacgaacuacuccauaacguaaacguaggaaaaagcacaaccaauauaaugauaaccacaauaaucauaguaauaauagucauauuauuacuuuuaauugcaguaggacucuuucuauacugcaaagcaagaagcacaccaguaacacuaagcaaagaccaacuaucaggcaucaacaauaucgccuuuucaaauuaaggacuagugcaucacauuuaaaagcaucucagccuaccaugagaauaagagaaagaaaaugaagaucaauagcuuauucaucucuuuuucuuuuucguugguguaaagccaacacccugucuaaaaaacauaaauuucuuuaaucauuuugccucuuuucucugugcuucaauuaauaaaaaauggaaagaaccuagaucuaaaaaaaaaaaaaaaaaaaaaaaaaaaaaaaaaaaaaaaaaaaaaaaaaaaaaaaaaaaaaaaaugcaucccccccccccccccccccccccccccccccaaaggcucuuuucagagccaccagaauu

SEQ ID NO: 16514 - RNA, 1990 nt, Artificial Sequence
  mRNA product Design i-2 comprising derived and/or modified sequence from HRSV(Memphis-37)__AIY60640.1__F_DSCav1_mut4 (opt11)
ggggcgcugccuacggagguggcagccaucuccuucucggcaucaagcuuaccauggagcugcccauccucaagaccaacgccaucaccacgauccuggccgcggugacccugugcuucgcgagcucccagaacaucaccgaggaguucuaccagagcacgugcuccgccgucagcaagggcuaccucuccgcccugcgcaccgggugguacaccagcgugaucaccaucgagcuguccaacaucaaggagaacaagugcaacggcaccgacgccaaggugaaacucaucaagcaggagcuggacaaguacaagaacgccgucaccgagcugcagcuccugaugcagagcaccccggccgccggguccggcagcgcuaucugcuccgggaucgcggugugcaaggugcugcaccucgagggcgaggucaacaagaucaagaaugcccugcugagcaccaacaaggccguggugucccucagcaacggagucagcgugcuuaccuucaaggugcuggaccucaagaacuacaucgacaagcagcugcugccuauccucaacaagcagagcugcuccaucagcaacaucgagacggucaucgaguuccagcagaagaacaaccggcugcuggagaucacccgcgaguucuccgugaacgccggggugaccacccccgucagcacguacaugcucaccaacagcgaacugcugucccucaucaacgacaugcccaucaccaacgaccagaagaagcugaugagcaacaacgugcagaucgugcggcagcaguccuacagcaucaugugcaucaucaaggaggaaguccuggccuacguggugcagcucccucuguacggcgucaucgacacccccugcuggaagcugcacacgagcccccucugcaccaccaacaccaaggagggguccaacaucugccugacgcgcaccgaccggggcugguacugcgacaacgcgggguccgugagcuucuucccccaggccgagaccugcaaggugcagagcaaccgcgucuucugcgacacuaugaacagcagaacgcucccguccgaggugaaccugugcaacauagacauauucaaccccaaguacgacugcaagaucaugaccagcaagaccgacgucuccagcuccgugauuaccagccugggcgcaaucguguccugcuacggcaagacgaagugcaccgccagcaacaagaaccgggggaucaucaagaccuucuccaacggcugcgacuaugucagcaacaaggggguggacaccgugagcgucggaaacacgcucuacugcgugaacaagcaagagggcaaguccuuauacgugaagggggagcccaucaucaacuucuacgacccccuggucuucccgagcgacgaguucgacgccagcauaagccaggugaacgagaagaucaaccagucccucgcguucauccgcaagagcgacgagcugcugcacaacgugaacgucggcaaguccaccaccaacaucaugaucaccaccaucaucaucgugaucaucgugauccuccugcugcucaucgccgucgggcuguuccuguacugcaaggcccggagcacgcccgugaccuuguccaaggaccagcucagcggcaucaacaacaucgccuucuccaacugaggacuagugcaucacauuuaaaagcaucucagccuaccaugagaauaagagaaagaaaaugaagaucaauagcuuauucaucucuuuuucuuuuucguugguguaaagccaacacccugucuaaaaaacauaaauuucuuuaaucauuuugccucuuuucucugugcuucaauuaauaaaaaauggaaagaaccuagaucuaaaaaaaaaaaaaaaaaaaaaaaaaaaaaaaaaaaaaaaaaaaaaaaaaaaaaaaaaaaaaaaaugcaucccccccccccccccccccccccccccccccaaaggcucuuuucagagccaccagaauu

SEQ ID NO: 16515 - RNA, 1825 nt, Artificial Sequence
  mRNA product Design i-3 comprising derived and/or modified sequence from HRSV(Memphis-37)__AIY60640.1__F_DSCav1_mut4 (opt1)
gggagaaagcuuaccauggagcugcccauccucaagaccaacgccaucaccacgauccuggccgcggugacccugugcuucgccagcucccagaacaucaccgaggaguucuaccagagcacgugcuccgccgucagcaagggcuaccucuccgcccugcgcaccgggugguacaccagcgugaucaccaucgagcuguccaacaucaaggagaacaagugcaacggcaccgacgccaaggugaagcucaucaagcaggagcuggacaaguacaagaacgcggucacggagcugcagcuccugaugcagagcaccccggccgccggcuccgggagcgcgaucugcuccggcaucgccgucugcaaggugcugcaccucgagggcgaggugaacaagaucaagaacgcccugcuguccaccaacaaggccgucgugagccucuccaacggggugagcguccugaccuucaaggugcuggaccucaagaacuacaucgacaagcagcugcugcccauccugaacaagcagagcugcuccaucagcaacaucgagaccgucaucgaguuccagcagaagaacaaccgccuccuggagaucacgcgggaguucagcgugaacgcgggcgugaccacccccgucuccaccuacaugcugacgaacagcgagcuccugucccugaucaacgacaugccgaucaccaacgaccagaagaagcucaugagcaacaacgugcagaucgugcgccagcaguccuacagcaucaugugcaucaucaaggaggagguccuggccuacguggugcagcugccccucuacggggucaucgacacccccugcuggaagcugcacaccagcccccugugcacgaccaacaccaaggagggcuccaacaucugccucacccggacggaccgcgggugguacugcgacaacgccggcagcguguccuucuucccgcaggccgagaccugcaagguccagagcaaccggguguucugcgacaccaugaacucccggacccugcccagcgaggugaaccucugcaacaucgacaucuucaaccccaaguacgacugcaagaucaugacguccaagaccgacgucagcuccagcgugaucaccucccugggcgccaucgugagcugcuacgggaagaccaagugcacggcgagcaacaagaaccgcggcaucaucaagaccuucuccaacgggugcgacuacgucagcaacaagggcguggacaccguguccgucggcaacacccuguacugcgugaacaagcaggagggcaagagccucuacgugaagggggagcccaucaucaacuucuacgacccgcuggucuuccccuccgacgaguucgacgccagcaucucccaggugaacgagaagaucaaccagagccuggccuucauccggaaguccgacgagcuccugcacaacgugaacgucggcaagagcaccacgaacaucaugaucaccaccaucaucaucgugaucaucgugauccugcugcuccugaucgccgucgggcuguuccucuacugcaaggcccgcuccacccccgugacgcugagcaaggaccagcuguccgggaucaacaacaucgcguucagcaacugaggacuaguuauaagacugacuagcccgaugggccucccaacgggcccuccuccccuccuugcaccgagauuaauaaaaaaaaaaaaaaaaaaaaaaaaaaaaaaaaaaaaaaaaaaaaaaaaaaaaaaaaaaaaaaaaugcaucccccccccccccccccccccccccccccccaaaggcucuuuucagagccaccagaauu

SEQ ID NO: 16516 - RNA, 1825 nt, Artificial Sequence
  mRNA product Design i-3 comprising derived and/or modified sequence from HRSV(Memphis-37)__AIY60640.1__F_DSCav1_mut4 (opt1)
gggagaaagcuuaccauggagcugcccauccucaagaccaacgccaucaccacgauccuggccgcggugacccugugcuucgccagcucccagaacaucaccgaggaguucuaccagagcacgugcuccgccgucagcaagggcuaccucuccgcccugcgcaccgggugguacaccagcgugaucaccaucgagcuguccaacaucaaggagaacaagugcaacggcaccgacgccaaggugaagcucaucaagcaggagcuggacaaguacaagaacgcggucacggagcugcagcuccugaugcagagcaccccggccgccggguccggcagcgccaucugcuccgggaucgcggugugcaaggugcugcaccucgagggcgaggucaacaagaucaagaacgcccugcugagcaccaacaaggccguggugucccucagcaacggcgucuccgugcugaccuucaaggugcuggaccucaagaacuacaucgacaagcagcugcugcccauccucaacaagcagagcugcuccaucagcaacaucgagacggucaucgaguuccagcagaagaacaaccggcugcuggagaucacccgcgaguucuccgugaacgccggggugaccacccccgucagcacguacaugcucaccaacagcgagcugcugucccucaucaacgacaugcccaucaccaacgaccagaagaagcugaugagcaacaacgugcagaucgugcggcagcaguccuacagcaucaugugcaucaucaaggaggagguccuggccuacguggugcagcucccgcuguacggcgucaucgacacccccugcuggaagcugcacacgagcccccucugcaccaccaacaccaaggagggguccaacaucugccugacgcgcaccgaccggggcugguacugcgacaacgcgggguccgugagcuucuucccccaggccgagaccugcaaggugcaguccaaccgcgucuucugcgacaccaugaacagccggacgcucccguccgaggugaaccugugcaacaucgacaucuucaaccccaaguacgacugcaagaucaugaccagcaagaccgacgucuccagcuccgugaucaccagccugggcgccaucguguccugcuacggcaagacgaagugcaccgccagcaacaagaaccgggggaucaucaagaccuucuccaacggcugcgacuacgucagcaacaaggggguggacaccgugagcgucggcaacacgcucuacugcgugaacaagcaggagggcaagucccuguacgugaagggggagcccaucaucaacuucuacgacccccuggucuucccgagcgacgaguucgacgccuccaucagccaggugaacgagaagaucaaccagucccucgcguucauccgcaagagcgacgagcugcugcacaacgugaacgucggcaaguccaccaccaacaucaugaucaccaccaucaucaucgugaucaucgugauccuccugcugcucaucgccgucgggcuguuccuguacugcaaggcccggagcacgcccgugacccuguccaaggaccagcucagcggcaucaacaacaucgccuucuccaacugaggacuaguuauaagacugacuagcccgaugggccucccaacgggcccuccuccccuccuugcaccgagauuaauaaaaaaaaaaaaaaaaaaaaaaaaaaaaaaaaaaaaaaaaaaaaaaaaaaaaaaaaaaaaaaaaugcaucccccccccccccccccccccccccccccccaaaggcucuuuucagagccaccagaauu

SEQ ID NO: 16517 - RNA, 1825 nt, Artificial Sequence
  mRNA product Design i-3 comprising derived and/or modified sequence from HRSV(Memphis-37)__AIY60640.1__F_DSCav1_mut4 (opt2)
gggagaaagcuuaccauggagcuccccauccucaagaccaacgccaucaccaccauccucgccgccgucacccucugcuucgccuccucccagaacaucaccgaggaguucuaccaguccaccugcuccgccgucuccaagggcuaccucuccgcccuccgcaccggcugguacaccuccgucaucaccaucgagcucuccaacaucaaggagaacaagugcaacggcaccgacgccaaggucaagcucaucaagcaggagcucgacaaguacaagaacgccgucaccgagcuccagcuccucaugcaguccacccccgccgccggcuccggcuccgccaucugcuccggcaucgccgucugcaagguccuccaccucgagggcgaggucaacaagaucaagaacgcccuccucuccaccaacaaggccgucgucucccucuccaacggcgucuccguccucaccuucaagguccucgaccucaagaacuacaucgacaagcagcuccuccccauccucaacaagcaguccugcuccaucuccaacaucgagaccgucaucgaguuccagcagaagaacaaccgccuccucgagaucacccgcgaguucuccgucaacgccggcgucaccacccccgucuccaccuacaugcucaccaacuccgagcuccucucccucaucaacgacaugcccaucaccaacgaccagaagaagcucauguccaacaacguccagaucguccgccagcaguccuacuccaucaugugcaucaucaaggaggagguccucgccuacgucguccagcucccccucuacggcgucaucgacacccccugcuggaagcuccacaccuccccccucugcaccaccaacaccaaggagggcuccaacaucugccucacccgcaccgaccgcggcugguacugcgacaacgccggcuccgucuccuucuucccccaggccgagaccugcaagguccaguccaaccgcgucuucugcgacaccaugaacucccgcacccuccccuccgaggucaaccucugcaacaucgacaucuucaaccccaaguacgacugcaagaucaugaccuccaagaccgacgucuccuccuccgucaucaccucccucggcgccaucgucuccugcuacggcaagaccaagugcaccgccuccaacaagaaccgcggcaucaucaagaccuucuccaacggcugcgacuacgucuccaacaagggcgucgacaccgucuccgucggcaacacccucuacugcgucaacaagcaggagggcaagucccucuacgucaagggcgagcccaucaucaacuucuacgacccccucgucuuccccuccgacgaguucgacgccuccaucucccaggucaacgagaagaucaaccagucccucgccuucauccgcaaguccgacgagcuccuccacaacgucaacgucggcaaguccaccaccaacaucaugaucaccaccaucaucaucgucaucaucgucauccuccuccuccucaucgccgucggccucuuccucuacugcaaggcccgcuccacccccgucacccucuccaaggaccagcucuccggcaucaacaacaucgccuucuccaacugaggacuaguuauaagacugacuagcccgaugggccucccaacgggcccuccuccccuccuugcaccgagauuaauaaaaaaaaaaaaaaaaaaaaaaaaaaaaaaaaaaaaaaaaaaaaaaaaaaaaaaaaaaaaaaaaugcaucccccccccccccccccccccccccccccccaaaggcucuuuucagagccaccagaauu

SEQ ID NO: 16518 - RNA, 1825 nt, Artificial Sequence
  mRNA product Design i-3 comprising derived and/or modified sequence from HRSV(Memphis-37)__AIY60640.1__F_DSCav1_mut4 (opt3)
gggagaaagcuuaccauggagcugcccauccucaagaccaacgccauuacaacuauacuugcugcagugacgcugugcuucgccagcucccagaauaucaccgaagaguuuuaccaaucuacauguucagcggucaguaaaggcuauuugagcgcuuuaagaacugggugguacaccuccguuauuacaaucgaacugucuaacauuaaggagaauaaaugcaacggaaccgacgccaaggugaaacuaaucaagcaggaacucgauaaguauaaaaaugcaguaacugagcugcagcuucugaugcagucgaccccugccgcugguucaggcagcgcaauauguagugggaucgccgugugcaaggucuugcaccucgagggagaagugaacaaaauuaagaaugcucugcuguccacaaacaaagccguugugucucucagcaauggcgucuccguguuaacguucaagguacuggaccuuaagaacuacaucgauaaacaauugcugccaauucuaaauaagcagucauguaguaucagcaacauagagacuguuauugaauuucagcagaaaaauaacaggcuccuggagaucacccgggaguucucugugaaugcgggugucacaacuccgguguccaccuauaugcuuacaaacucagaacuguugagccucauuaacgacaugcccaucaccaaugaucaaaagaaacugaugaguaacaaugugcagaucguccgccagcagucuuacuccauuaugugcauaaucaaggaggaaguuuuagcauaugugguacaacugccucucuacggggugauugacacgccauguuggaaacuucauacuagcccccugugcacaaccaacacuaaggagggaucgaauaucuguuugacacgaaccgaucguggcugguacugcgacaacgccggcucugucuccuuuuucccucaggcugaaacguguaaggugcagucaaauagaguguuuugcgauaccaugaacaguagaacacugccaagcgaggugaaucucugcaacauagacauuuucaaucccaaauaugauuguaagaucaugacuuccaaaaccgacgucucuagcucagugaucacaagucugggggccauuguauccugcuacggaaagacuaaauguaccgcaagcaacaagaauagggguaucauuaagacauuuucuaacggcugcgauuauguuucaaauaaagggguggacaccgucagugugggaaacacucuuuacugugucaacaagcaagagggcaaaagccuguaugugaagggugaaccuauaaucaauuucuacgacccauugguuuuuccguccgaugaguucgacgcuucuauuucgcagguuaacgagaaaaucaaucagagccucgccuuuauccggaaguccgaugaacuguuacacaacguaaaugucgggaagucaacgacaaacauuaugauaaccacuaucauuaucgugauuaucguuauacugcuacuccugaucgcggugggacuuuucuuguauugcaaagcccgcaguacccccgucacacugucuaaggaccagcucagcggcauuaauaacaucgcauucuccaauugaggacuaguuauaagacugacuagcccgaugggccucccaacgggcccuccuccccuccuugcaccgagauuaauaaaaaaaaaaaaaaaaaaaaaaaaaaaaaaaaaaaaaaaaaaaaaaaaaaaaaaaaaaaaaaaaugcaucccccccccccccccccccccccccccccccaaaggcucuuuucagagccaccagaauu

SEQ ID NO: 16519 - RNA, 1825 nt, Artificial Sequence
  mRNA product Design i-3 comprising derived and/or modified sequence from HRSV(Memphis-37)__AIY60640.1__F_DSCav1_mut4 (opt4)
gggagaaagcuuaccauggagcugcccauccugaagaccaacgccaucaccaccauccuggccgccgugacccugugcuucgccagcagccagaacaucaccgaggaguucuaccagagcaccugcagcgccgugagcaagggcuaccugagcgcccugagaaccggcugguacaccagcgugaucaccaucgagcugagcaacaucaaggagaacaagugcaacggcaccgacgccaaggugaagcugaucaagcaggagcuggacaaguacaagaacgccgugaccgagcugcagcugcugaugcagagcacccccgccgccggcagcggcagcgccaucugcagcggcaucgccgugugcaaggugcugcaccuggagggcgaggugaacaagaucaagaacgcccugcugagcaccaacaaggccguggugagccugagcaacggcgugagcgugcugaccuucaaggugcuggaccugaagaacuacaucgacaagcagcugcugcccauccugaacaagcagagcugcagcaucagcaacaucgagaccgugaucgaguuccagcagaagaacaacagacugcuggagaucaccagagaguucagcgugaacgccggcgugaccacccccgugagcaccuacaugcugaccaacagcgagcugcugagccugaucaacgacaugcccaucaccaacgaccagaagaagcugaugagcaacaacgugcagaucgugagacagcagagcuacagcaucaugugcaucaucaaggaggaggugcuggccuacguggugcagcugccccuguacggcgugaucgacacccccugcuggaagcugcacaccagcccccugugcaccaccaacaccaaggagggcagcaacaucugccugaccagaaccgacagaggcugguacugcgacaacgccggcagcgugagcuucuucccccaggccgagaccugcaaggugcagagcaacagaguguucugcgacaccaugaacagcagaacccugcccagcgaggugaaccugugcaacaucgacaucuucaaccccaaguacgacugcaagaucaugaccagcaagaccgacgugagcagcagcgugaucaccagccugggcgccaucgugagcugcuacggcaagaccaagugcaccgccagcaacaagaacagaggcaucaucaagaccuucagcaacggcugcgacuacgugagcaacaagggcguggacaccgugagcgugggcaacacccuguacugcgugaacaagcaggagggcaagagccuguacgugaagggcgagcccaucaucaacuucuacgacccccugguguuccccagcgacgaguucgacgccagcaucagccaggugaacgagaagaucaaccagagccuggccuucaucagaaagagcgacgagcugcugcacaacgugaacgugggcaagagcaccaccaacaucaugaucaccaccaucaucaucgugaucaucgugauccugcugcugcugaucgccgugggccuguuccuguacugcaaggccagaagcacccccgugacccugagcaaggaccagcugagcggcaucaacaacaucgccuucagcaacugaggacuaguuauaagacugacuagcccgaugggccucccaacgggcccuccuccccuccuugcaccgagauuaauaaaaaaaaaaaaaaaaaaaaaaaaaaaaaaaaaaaaaaaaaaaaaaaaaaaaaaaaaaaaaaaaugcaucccccccccccccccccccccccccccccccaaaggcucuuuucagagccaccagaauu

SEQ ID NO: 16520 - RNA, 1825 nt, Artificial Sequence
  mRNA product Design i-3 comprising derived and/or modified sequence from HRSV(Memphis-37)__AIY60640.1__F_DSCav1_mut4 (opt5)
gggagaaagcuuaccauggagcugcccauccucaagaccaacgccauuacaacgauccuggcugccgugacccuuugcuucgcgagcucccagaauauuacagaagaguuuuaccaaucuaccuguagcgcugucuccaaaggcuaucugucugcccucagaacagggugguacaccagcguuaucacaauugaacuguccaacaucaaggagaauaaaugcaacggaaccgacgccaaggugaaacuuaucaagcaggaacuggauaaguauaaaaaugcugugacggagcuccagcugcugaugcagucuaccccugccgcuggcagcggguccgccauuuguagcggaaucgcggucugcaaggugcuccaccuggagggcgaaguuaacaaaauuaagaaugcccuucugucuacaaacaaagcuguggucucccucagcaauggggugucuguucugaccuucaaggugcuugaccugaagaacuacaucgauaaacaacuccugccgauucugaauaagcaguccuguagcaucucuaacauugagacagucaucgaauuucagcagaaaaauaaccggcuccuggagaucacccgcgaguucuccgugaaugccggagugacgacacccgucagcaccuauaugcuuacaaacuccgaacugcucucucugauuaacgacaugccuaucaccaaugaucaaaagaaacuuaugagcaacaauguucagauugugagacagcaguccuacagcaucaugugcauuaucaaggaggaagugcuggcuuaugucgugcaacucccccuguacggcguuaucgacaccccuuguuggaaacugcauacaucuccccucugcacgaccaacacaaaggagggcuccaauauuugucugacccggacagaucgcgggugguacugcgacaacgccggaagcgugagcuuuuucccucaggcggaaaccuguaagguccagucuaauagaguguuuugcgauacgaugaacuccagaacacugccgucugagguuaaucucugcaacaucgacauuuucaaucccaaauaugauuguaagaucaugaccagcaaaaccgacguguccagcucugucauuacaucccugggcgccaucgugagcugcuacgggaagaccaaauguacagcuucuaacaagaaucggggaaucauuaagacguuuuccaacggcugcgauuaugucagcaauaaagggguggacaccguuuccgugggaaacacacuuuacugugucaacaagcaagagggcaaaucucuguaugugaagggcgaaccuaucauuaauuucuacgacccccucguuuuuccuagcgaugaguucgacgccuccaucucucaggugaacgaaaagauuaaucagagccuggcuuuuauccgcaaguccgaugagcugcuccacaacgucaauguggggaaaagcaccacaaacauuaugaucaccacgaucauuaucgugauuaucguuauucugcuucugcucaucgccgucggacuguuccuguauugcaaagccagaucuacccccgugacacuuuccaaggaccagcucagcggcaucaauaacauugcuuucucuaauugaggacuaguuauaagacugacuagcccgaugggccucccaacgggcccuccuccccuccuugcaccgagauuaauaaaaaaaaaaaaaaaaaaaaaaaaaaaaaaaaaaaaaaaaaaaaaaaaaaaaaaaaaaaaaaaaugcaucccccccccccccccccccccccccccccccaaaggcucuuuucagagccaccagaauu

SEQ ID NO: 16521 - RNA, 1825 nt, Artificial Sequence
  mRNA product Design i-3 comprising derived and/or modified sequence from HRSV(Memphis-37)__AIY60640.1__F_DSCav1_mut4 (opt6)
gggagaaagcuuaccauggaacucccaauccuaaaaacaaacgcaauaacaacaauauuagcagccguaacacucuguuucgccucaucccaaaacauaacagaagaauuuuaucaaucuacauguuccgccgucaguaaaggauaucuaucagccuuaagaacaggcugguacacaucaguaaucaccauagaauuauccaacauaaaagaaaacaaaugcaauggcacagaugccaaaguaaaacuaaucaaacaagaacuugauaaauauaaaaacgcaguaacagaauuacaauuauuaaugcaaagcacaccagccgcaggaucaggaucagcaauauguucaggaauagcagucuguaaaguacuacacuuagaaggagaaguaaacaaaauuaaaaacgcauuacuaagcaccaauaaagcaguaguaucacuaucaaacggcguauccguauuaacguucaaaguccucgaccugaaaaacuacauagauaaacaacuacuaccaauacuaaauaaacaaucaugcucaauaucaaacauagaaacuguuaucgaauuucaacagaaaaauaaccgacuacuagaaaucaccagagaauuuucaguaaacgcaggcgucacuacaccaguauccacauacaugcuaaccaacucggaauuacuuucccucauaaacgacaugccaauaacaaacgaccaaaagaaacuuaugucaaacaacguucaaauaguccgccaacaaucauacucaauaauguguaucauaaaagaagaaguccuagcauaugucguacaacuaccauuauacggaguaauugacacaccuugcuggaaacuacacacauccccacuauguacaacaaacacuaaagaaggaucaaacaucugccuaaccagaacagacagaggcugguauugcgacaacgcaggaucaguaucauucuucccacaagcagaaacaugcaaaguacaaucaaacagagucuucugcgacaccaugaacagcagaacccucccauccgaaguaaacuuaugcaacaucgauaucuucaacccaaaauacgacuguaaaauaaugacaucaaaaacagacguuucauccucaguaauaacaucauuaggugccauaguuucauguuacggaaaaaccaaauguaccgcaucaaacaaaaacagaggcauuauuaaaacauucucuaacggaugcgacuaugucaguaacaaaggaguagacacaguaucagucggaaacacauuauauugcguaaauaaacaagaaggaaaaagucuauacguaaaaggagaaccaauaauaaacuuuuacgacccucucguauucccaucagacgaauuugaugcauccauaucacaagucaacgaaaagauaaaccaaucccuagcauucauaagaaaaucagacgaacuacuccauaacguaaacguaggaaaaagcacaaccaauauaaugauaaccacaauaaucauaguaauaauagucauauuauuacuuuuaauugcaguaggacucuuucuauacugcaaagcaagaagcacaccaguaacacuaagcaaagaccaacuaucaggcaucaacaauaucgccuuuucaaauuaaggacuaguuauaagacugacuagcccgaugggccucccaacgggcccuccuccccuccuugcaccgagauuaauaaaaaaaaaaaaaaaaaaaaaaaaaaaaaaaaaaaaaaaaaaaaaaaaaaaaaaaaaaaaaaaaugcaucccccccccccccccccccccccccccccccaaaggcucuuuucagagccaccagaauu

SEQ ID NO: 16522 - RNA, 1825 nt, Artificial Sequence
  mRNA product Design i-3 comprising derived and/or modified sequence from HRSV(Memphis-37)__AIY60640.1__F_DSCav1_mut4 (opt11)
gggagaaagcuuaccauggagcugcccauccucaagaccaacgccaucaccacgauccuggccgcggugacccugugcuucgcgagcucccagaacaucaccgaggaguucuaccagagcacgugcuccgccgucagcaagggcuaccucuccgcccugcgcaccgggugguacaccagcgugaucaccaucgagcuguccaacaucaaggagaacaagugcaacggcaccgacgccaaggugaaacucaucaagcaggagcuggacaaguacaagaacgccgucaccgagcugcagcuccugaugcagagcaccccggccgccggguccggcagcgcuaucugcuccgggaucgcggugugcaaggugcugcaccucgagggcgaggucaacaagaucaagaaugcccugcugagcaccaacaaggccguggugucccucagcaacggagucagcgugcuuaccuucaaggugcuggaccucaagaacuacaucgacaagcagcugcugccuauccucaacaagcagagcugcuccaucagcaacaucgagacggucaucgaguuccagcagaagaacaaccggcugcuggagaucacccgcgaguucuccgugaacgccggggugaccacccccgucagcacguacaugcucaccaacagcgaacugcugucccucaucaacgacaugcccaucaccaacgaccagaagaagcugaugagcaacaacgugcagaucgugcggcagcaguccuacagcaucaugugcaucaucaaggaggaaguccuggccuacguggugcagcucccucuguacggcgucaucgacacccccugcuggaagcugcacacgagcccccucugcaccaccaacaccaaggagggguccaacaucugccugacgcgcaccgaccggggcugguacugcgacaacgcgggguccgugagcuucuucccccaggccgagaccugcaaggugcagagcaaccgcgucuucugcgacacuaugaacagcagaacgcucccguccgaggugaaccugugcaacauagacauauucaaccccaaguacgacugcaagaucaugaccagcaagaccgacgucuccagcuccgugauuaccagccugggcgcaaucguguccugcuacggcaagacgaagugcaccgccagcaacaagaaccgggggaucaucaagaccuucuccaacggcugcgacuaugucagcaacaaggggguggacaccgugagcgucggaaacacgcucuacugcgugaacaagcaagagggcaaguccuuauacgugaagggggagcccaucaucaacuucuacgacccccuggucuucccgagcgacgaguucgacgccagcauaagccaggugaacgagaagaucaaccagucccucgcguucauccgcaagagcgacgagcugcugcacaacgugaacgucggcaaguccaccaccaacaucaugaucaccaccaucaucaucgugaucaucgugauccuccugcugcucaucgccgucgggcuguuccuguacugcaaggcccggagcacgcccgugaccuuguccaaggaccagcucagcggcaucaacaacaucgccuucuccaacugaggacuaguuauaagacugacuagcccgaugggccucccaacgggcccuccuccccuccuugcaccgagauuaauaaaaaaaaaaaaaaaaaaaaaaaaaaaaaaaaaaaaaaaaaaaaaaaaaaaaaaaaaaaaaaaaugcaucccccccccccccccccccccccccccccccaaaggcucuuuucagagccaccagaauu

SEQ ID NO: 16523 - protein, 514 aa, Artificial Sequence
  derived and/or modified protein sequence (artificial) from HRSV(Memphis-37)__AIY60640.1__F-del_DSCav1_mut4
MELPILKTNAITTILAAVTLCFASSQNITEEFYQSTCSAVSKGYLSALRTGWYTSVITIELSNIKENKCNGTDAKVKLIKQELDKYKNAVTELQLLMQSTPAAGSGSAICSGIAVCKVLHLEGEVNKIKNALLSTNKAVVSLSNGVSVLTFKVLDLKNYIDKQLLPILNKQSCSISNIETVIEFQQKNNRLLEITREFSVNAGVTTPVSTYMLTNSELLSLINDMPITNDQKKLMSNNVQIVRQQSYSIMCIIKEEVLAYVVQLPLYGVIDTPCWKLHTSPLCTTNTKEGSNICLTRTDRGWYCDNAGSVSFFPQAETCKVQSNRVFCDTMNSRTLPSEVNLCNIDIFNPKYDCKIMTSKTDVSSSVITSLGAIVSCYGKTKCTASNKNRGIIKTFSNGCDYVSNKGVDTVSVGNTLYCVNKQEGKSLYVKGEPIINFYDPLVFPSDEFDASISQVNEKINQSLAFIRKSDELLHNVNVGKSTTNIMITTIIIVIIVILLLLIAVGLFLYCKAR

SEQ ID NO: 16524 - RNA, 1545 nt, Artificial Sequence
  derived and/or modified CDS sequence (opt1) from HRSV(Memphis-37)__AIY60640.1__F-del_DSCav1_mut4
auggagcugcccauccucaagaccaacgccaucaccacgauccuggccgcggugacccugugcuucgccagcucccagaacaucaccgaggaguucuaccagagcacgugcuccgccgucagcaagggcuaccucuccgcccugcgcaccgggugguacaccagcgugaucaccaucgagcuguccaacaucaaggagaacaagugcaacggcaccgacgccaaggugaagcucaucaagcaggagcuggacaaguacaagaacgcggucacggagcugcagcuccugaugcagagcaccccggccgccggcuccgggagcgcgaucugcuccggcaucgccgucugcaaggugcugcaccucgagggcgaggugaacaagaucaagaacgcccugcuguccaccaacaaggccgucgugagccucuccaacggggugagcguccugaccuucaaggugcuggaccucaagaacuacaucgacaagcagcugcugcccauccugaacaagcagagcugcuccaucagcaacaucgagaccgucaucgaguuccagcagaagaacaaccgccuccuggagaucacgcgggaguucagcgugaacgcgggcgugaccacccccgucuccaccuacaugcugacgaacagcgagcuccugucccugaucaacgacaugccgaucaccaacgaccagaagaagcucaugagcaacaacgugcagaucgugcgccagcaguccuacagcaucaugugcaucaucaaggaggagguccuggccuacguggugcagcugccccucuacggggucaucgacacccccugcuggaagcugcacaccagcccccugugcacgaccaacaccaaggagggcuccaacaucugccucacccggacggaccgcgggugguacugcgacaacgccggcagcguguccuucuucccgcaggccgagaccugcaagguccagagcaaccggguguucugcgacaccaugaacucccggacccugcccagcgaggugaaccucugcaacaucgacaucuucaaccccaaguacgacugcaagaucaugacguccaagaccgacgucagcuccagcgugaucaccucccugggcgccaucgugagcugcuacgggaagaccaagugcacggcgagcaacaagaaccgcggcaucaucaagaccuucuccaacgggugcgacuacgucagcaacaagggcguggacaccguguccgucggcaacacccuguacugcgugaacaagcaggagggcaagagccucuacgugaagggggagcccaucaucaacuucuacgacccgcuggucuuccccuccgacgaguucgacgccagcaucucccaggugaacgagaagaucaaccagagccuggccuucauccggaaguccgacgagcuccugcacaacgugaacgucggcaagagcaccacgaacaucaugaucaccaccaucaucaucgugaucaucgugauccugcugcuccugaucgccgucgggcuguuccucuacugcaaggcccgcuga

SEQ ID NO: 16525 - RNA, 1545 nt, Artificial Sequence
  derived and/or modified CDS sequence (opt1) from HRSV(Memphis-37)__AIY60640.1__F-del_DSCav1_mut4
auggagcugcccauccucaagaccaacgccaucaccacgauccuggccgcggugacccugugcuucgccagcucccagaacaucaccgaggaguucuaccagagcacgugcuccgccgucagcaagggcuaccucuccgcccugcgcaccgggugguacaccagcgugaucaccaucgagcuguccaacaucaaggagaacaagugcaacggcaccgacgccaaggugaagcucaucaagcaggagcuggacaaguacaagaacgcggucacggagcugcagcuccugaugcagagcaccccggccgccggguccggcagcgccaucugcuccgggaucgcggugugcaaggugcugcaccucgagggcgaggucaacaagaucaagaacgcccugcugagcaccaacaaggccguggugucccucagcaacggcgucuccgugcugaccuucaaggugcuggaccucaagaacuacaucgacaagcagcugcugcccauccucaacaagcagagcugcuccaucagcaacaucgagacggucaucgaguuccagcagaagaacaaccggcugcuggagaucacccgcgaguucuccgugaacgccggggugaccacccccgucagcacguacaugcucaccaacagcgagcugcugucccucaucaacgacaugcccaucaccaacgaccagaagaagcugaugagcaacaacgugcagaucgugcggcagcaguccuacagcaucaugugcaucaucaaggaggagguccuggccuacguggugcagcucccgcuguacggcgucaucgacacccccugcuggaagcugcacacgagcccccucugcaccaccaacaccaaggagggguccaacaucugccugacgcgcaccgaccggggcugguacugcgacaacgcgggguccgugagcuucuucccccaggccgagaccugcaaggugcaguccaaccgcgucuucugcgacaccaugaacagccggacgcucccguccgaggugaaccugugcaacaucgacaucuucaaccccaaguacgacugcaagaucaugaccagcaagaccgacgucuccagcuccgugaucaccagccugggcgccaucguguccugcuacggcaagacgaagugcaccgccagcaacaagaaccgggggaucaucaagaccuucuccaacggcugcgacuacgucagcaacaaggggguggacaccgugagcgucggcaacacgcucuacugcgugaacaagcaggagggcaagucccuguacgugaagggggagcccaucaucaacuucuacgacccccuggucuucccgagcgacgaguucgacgccuccaucagccaggugaacgagaagaucaaccagucccucgcguucauccgcaagagcgacgagcugcugcacaacgugaacgucggcaaguccaccaccaacaucaugaucaccaccaucaucaucgugaucaucgugauccuccugcugcucaucgccgucgggcuguuccuguacugcaaggcccgguga

SEQ ID NO: 16526 - RNA, 1545 nt, Artificial Sequence
  derived and/or modified CDS sequence (opt2) from HRSV(Memphis-37)__AIY60640.1__F-del_DSCav1_mut4
auggagcuccccauccucaagaccaacgccaucaccaccauccucgccgccgucacccucugcuucgccuccucccagaacaucaccgaggaguucuaccaguccaccugcuccgccgucuccaagggcuaccucuccgcccuccgcaccggcugguacaccuccgucaucaccaucgagcucuccaacaucaaggagaacaagugcaacggcaccgacgccaaggucaagcucaucaagcaggagcucgacaaguacaagaacgccgucaccgagcuccagcuccucaugcaguccacccccgccgccggcuccggcuccgccaucugcuccggcaucgccgucugcaagguccuccaccucgagggcgaggucaacaagaucaagaacgcccuccucuccaccaacaaggccgucgucucccucuccaacggcgucuccguccucaccuucaagguccucgaccucaagaacuacaucgacaagcagcuccuccccauccucaacaagcaguccugcuccaucuccaacaucgagaccgucaucgaguuccagcagaagaacaaccgccuccucgagaucacccgcgaguucuccgucaacgccggcgucaccacccccgucuccaccuacaugcucaccaacuccgagcuccucucccucaucaacgacaugcccaucaccaacgaccagaagaagcucauguccaacaacguccagaucguccgccagcaguccuacuccaucaugugcaucaucaaggaggagguccucgccuacgucguccagcucccccucuacggcgucaucgacacccccugcuggaagcuccacaccuccccccucugcaccaccaacaccaaggagggcuccaacaucugccucacccgcaccgaccgcggcugguacugcgacaacgccggcuccgucuccuucuucccccaggccgagaccugcaagguccaguccaaccgcgucuucugcgacaccaugaacucccgcacccuccccuccgaggucaaccucugcaacaucgacaucuucaaccccaaguacgacugcaagaucaugaccuccaagaccgacgucuccuccuccgucaucaccucccucggcgccaucgucuccugcuacggcaagaccaagugcaccgccuccaacaagaaccgcggcaucaucaagaccuucuccaacggcugcgacuacgucuccaacaagggcgucgacaccgucuccgucggcaacacccucuacugcgucaacaagcaggagggcaagucccucuacgucaagggcgagcccaucaucaacuucuacgacccccucgucuuccccuccgacgaguucgacgccuccaucucccaggucaacgagaagaucaaccagucccucgccuucauccgcaaguccgacgagcuccuccacaacgucaacgucggcaaguccaccaccaacaucaugaucaccaccaucaucaucgucaucaucgucauccuccuccuccucaucgccgucggccucuuccucuacugcaaggcccgcuga

SEQ ID NO: 16527 - RNA, 1545 nt, Artificial Sequence
  derived and/or modified CDS sequence (opt3) from HRSV(Memphis-37)__AIY60640.1__F-del_DSCav1_mut4
auggagcugcccauccucaagaccaacgccauuacaacuauacuugcugcagugacgcugugcuucgccagcucccagaauaucaccgaagaguuuuaccaaucuacauguucagcggucaguaaaggcuauuugagcgcuuuaagaacugggugguacaccuccguuauuacaaucgaacugucuaacauuaaggagaauaaaugcaacggaaccgacgccaaggugaaacuaaucaagcaggaacucgauaaguauaaaaaugcaguaacugagcugcagcuucugaugcagucgaccccugccgcugguucaggcagcgcaauauguagugggaucgccgugugcaaggucuugcaccucgagggagaagugaacaaaauuaagaaugcucugcuguccacaaacaaagccguugugucucucagcaauggcgucuccguguuaacguucaagguacuggaccuuaagaacuacaucgauaaacaauugcugccaauucuaaauaagcagucauguaguaucagcaacauagagacuguuauugaauuucagcagaaaaauaacaggcuccuggagaucacccgggaguucucugugaaugcgggugucacaacuccgguguccaccuauaugcuuacaaacucagaacuguugagccucauuaacgacaugcccaucaccaaugaucaaaagaaacugaugaguaacaaugugcagaucguccgccagcagucuuacuccauuaugugcauaaucaaggaggaaguuuuagcauaugugguacaacugccucucuacggggugauugacacgccauguuggaaacuucauacuagcccccugugcacaaccaacacuaaggagggaucgaauaucuguuugacacgaaccgaucguggcugguacugcgacaacgccggcucugucuccuuuuucccucaggcugaaacguguaaggugcagucaaauagaguguuuugcgauaccaugaacaguagaacacugccaagcgaggugaaucucugcaacauagacauuuucaaucccaaauaugauuguaagaucaugacuuccaaaaccgacgucucuagcucagugaucacaagucugggggccauuguauccugcuacggaaagacuaaauguaccgcaagcaacaagaauagggguaucauuaagacauuuucuaacggcugcgauuauguuucaaauaaagggguggacaccgucagugugggaaacacucuuuacugugucaacaagcaagagggcaaaagccuguaugugaagggugaaccuauaaucaauuucuacgacccauugguuuuuccguccgaugaguucgacgcuucuauuucgcagguuaacgagaaaaucaaucagagccucgccuuuauccggaaguccgaugaacuguuacacaacguaaaugucgggaagucaacgacaaacauuaugauaaccacuaucauuaucgugauuaucguuauacugcuacuccugaucgcggugggacuuuucuuguauugcaaagcccgcuga

SEQ ID NO: 16528 - RNA, 1545 nt, Artificial Sequence
  derived and/or modified CDS sequence (opt4) from HRSV(Memphis-37)__AIY60640.1__F-del_DSCav1_mut4
auggagcugcccauccugaagaccaacgccaucaccaccauccuggccgccgugacccugugcuucgccagcagccagaacaucaccgaggaguucuaccagagcaccugcagcgccgugagcaagggcuaccugagcgcccugagaaccggcugguacaccagcgugaucaccaucgagcugagcaacaucaaggagaacaagugcaacggcaccgacgccaaggugaagcugaucaagcaggagcuggacaaguacaagaacgccgugaccgagcugcagcugcugaugcagagcacccccgccgccggcagcggcagcgccaucugcagcggcaucgccgugugcaaggugcugcaccuggagggcgaggugaacaagaucaagaacgcccugcugagcaccaacaaggccguggugagccugagcaacggcgugagcgugcugaccuucaaggugcuggaccugaagaacuacaucgacaagcagcugcugcccauccugaacaagcagagcugcagcaucagcaacaucgagaccgugaucgaguuccagcagaagaacaacagacugcuggagaucaccagagaguucagcgugaacgccggcgugaccacccccgugagcaccuacaugcugaccaacagcgagcugcugagccugaucaacgacaugcccaucaccaacgaccagaagaagcugaugagcaacaacgugcagaucgugagacagcagagcuacagcaucaugugcaucaucaaggaggaggugcuggccuacguggugcagcugccccuguacggcgugaucgacacccccugcuggaagcugcacaccagcccccugugcaccaccaacaccaaggagggcagcaacaucugccugaccagaaccgacagaggcugguacugcgacaacgccggcagcgugagcuucuucccccaggccgagaccugcaaggugcagagcaacagaguguucugcgacaccaugaacagcagaacccugcccagcgaggugaaccugugcaacaucgacaucuucaaccccaaguacgacugcaagaucaugaccagcaagaccgacgugagcagcagcgugaucaccagccugggcgccaucgugagcugcuacggcaagaccaagugcaccgccagcaacaagaacagaggcaucaucaagaccuucagcaacggcugcgacuacgugagcaacaagggcguggacaccgugagcgugggcaacacccuguacugcgugaacaagcaggagggcaagagccuguacgugaagggcgagcccaucaucaacuucuacgacccccugguguuccccagcgacgaguucgacgccagcaucagccaggugaacgagaagaucaaccagagccuggccuucaucagaaagagcgacgagcugcugcacaacgugaacgugggcaagagcaccaccaacaucaugaucaccaccaucaucaucgugaucaucgugauccugcugcugcugaucgccgugggccuguuccuguacugcaaggccagauga

SEQ ID NO: 16529 - RNA, 1545 nt, Artificial Sequence
  derived and/or modified CDS sequence (opt5) from HRSV(Memphis-37)__AIY60640.1__F-del_DSCav1_mut4
auggagcugcccauccucaagaccaacgccauuacaacgauccuggcugccgugacccuuugcuucgcgagcucccagaauauuacagaagaguuuuaccaaucuaccuguagcgcugucuccaaaggcuaucugucugcccucagaacagggugguacaccagcguuaucacaauugaacuguccaacaucaaggagaauaaaugcaacggaaccgacgccaaggugaaacuuaucaagcaggaacuggauaaguauaaaaaugcugugacggagcuccagcugcugaugcagucuaccccugccgcuggcagcggguccgccauuuguagcggaaucgcggucugcaaggugcuccaccuggagggcgaaguuaacaaaauuaagaaugcccuucugucuacaaacaaagcuguggucucccucagcaauggggugucuguucugaccuucaaggugcuugaccugaagaacuacaucgauaaacaacuccugccgauucugaauaagcaguccuguagcaucucuaacauugagacagucaucgaauuucagcagaaaaauaaccggcuccuggagaucacccgcgaguucuccgugaaugccggagugacgacacccgucagcaccuauaugcuuacaaacuccgaacugcucucucugauuaacgacaugccuaucaccaaugaucaaaagaaacuuaugagcaacaauguucagauugugagacagcaguccuacagcaucaugugcauuaucaaggaggaagugcuggcuuaugucgugcaacucccccuguacggcguuaucgacaccccuuguuggaaacugcauacaucuccccucugcacgaccaacacaaaggagggcuccaauauuugucugacccggacagaucgcgggugguacugcgacaacgccggaagcgugagcuuuuucccucaggcggaaaccuguaagguccagucuaauagaguguuuugcgauacgaugaacuccagaacacugccgucugagguuaaucucugcaacaucgacauuuucaaucccaaauaugauuguaagaucaugaccagcaaaaccgacguguccagcucugucauuacaucccugggcgccaucgugagcugcuacgggaagaccaaauguacagcuucuaacaagaaucggggaaucauuaagacguuuuccaacggcugcgauuaugucagcaauaaagggguggacaccguuuccgugggaaacacacuuuacugugucaacaagcaagagggcaaaucucuguaugugaagggcgaaccuaucauuaauuucuacgacccccucguuuuuccuagcgaugaguucgacgccuccaucucucaggugaacgaaaagauuaaucagagccuggcuuuuauccgcaaguccgaugagcugcuccacaacgucaauguggggaaaagcaccacaaacauuaugaucaccacgaucauuaucgugauuaucguuauucugcuucugcucaucgccgucggacuguuccuguauugcaaagccagauga

SEQ ID NO: 16530 - RNA, 1545 nt, Artificial Sequence
  derived and/or modified CDS sequence (opt6) from HRSV(Memphis-37)__AIY60640.1__F-del_DSCav1_mut4
auggaacuaccaauacucaaaacaaacgcaauaacaacuauacuagccgcaguuacacucugcuucgcuucaucacaaaauaucacagaagaauuuuaccaaucuacauguucagcuguauccaaagguuaccuuucagcacuacgaacaggaugguauaccucaguaaucaccaucgaacucucgaacauaaaagaaaacaaauguaacggaaccgaugcuaaagucaagcucauaaaacaagaacuagacaaauacaaaaacgcaguaaccgaacuacaacuacuuaugcaaucaacaccagcugcaggcucaggcucagcaaucugcucaggcauagcuguaugcaaaguacuacaucuagaaggagaaguaaacaaaauaaaaaacgcauuauuaucaacaaauaaagcaguaguaucacuaucaaauggaguaucaguacucacauucaaaguacuagaucuaaaaaacuacauugacaaacaauuacuaccaauccucaacaaacaaucaugcucaauauccaacauagaaacaguaauagaauuucaacaaaaaaacaaucgacuacuagaaauaacaagagaauuuucagucaaugccggaguuacaacacccguaagcacuuacaugcuaaccaacucagaacuacuaucacuaauaaacgacaugccaauuacaaacgaccaaaaaaaacuaaugucaaauaacguacaaauaguacgucaacaaucauacucaauaaugugcauaauaaaagaagaaguccuagcauacguaguacaauuacccuuauauggcguaauagacacaccaugcuggaaacuacacacauccccacucugcaccaccaacaccaaagaaggcuccaacauaugucuaacccgaaccgacagagguugguauugugauaacgcuggcuccguaucauucuucccacaagcagaaacauguaaaguacaaucaaacagaguauucugcgauacaaugaauagcagaacacuaccaucagaaguaaacuuaugcaacaucgacaucuucaaucccaaauacgacugcaaaauaaugacauccaaaacugacguuucuucaagcguaauaacaucuuuaggagcaauaguauccugcuacggaaaaacuaaaugcacagcauccaauaaaaaccguggaauaauaaaaacauucucaaauggcugcgacuacgucucaaacaaaggcguagacaccguuagugucggaaacacacuauauugcguaaauaaacaagaaggaaaauccuuauacguaaaaggcgaaccaauaauuaacuucuaugacccccucguauuuccauccgaugaauuugacgcaucaaucucgcaaguaaacgaaaaaauaaaccaaagccuagcauucauaagaaaauccgacgaacuacuccacaauguaaauguaggaaaaucaacuaccaacauaaugauuacuacuauaauaauaguaauuauagucaucuuacuacuauuaauagcagucggauuauuccuauacugcaaagcaagauag

SEQ ID NO: 16531 - RNA, 1545 nt, Artificial Sequence
  derived and/or modified CDS sequence (opt11) from HRSV(Memphis-37)__AIY60640.1__F-del_DSCav1_mut4
auggagcuccccauccuaaaaaccaacgccaucaccaccauccucgccgccgucacccuaugcuucgcuucaucacaaaacaucaccgaagaauuuuaccaaucuaccugcuccgccgucuccaaaggauaucucagcgcccuacggaccggcugguacaccuccgucauaaccaucgaacucaguaacaucaaagaaaacaaaugcaacggcaccgacgccaaagucaaacuaaucaaacaagaacuagauaaauacaaaaacgcggucaccgaacuacaacuccuaaugcaaagcacccccgccgccggauccggcuccgccauaugcuccggcauugcugucugcaaaguacuacaccucgagggcgaggucaacaaaaucaaaaacgcacuacucagcacuaauaaagccguaguaucccuaucaaacggugucucagucuuaacauucaaaguacucgaccuaaagaacuacaucgacaaacaacuccuacccauccucaacaagcaguccuguucuaucucaaacaucgaaaccgucaucgaauuucaacaaaagaacaaccgccuccucgaaaucacacgcgaguucuccgucaacgcaggaguaaccacccccgucuccaccuacaugcucacaaacucggaacuccucucacuaaucaacgacaugcccaucaccaacgaccaaaagaaacucaugagcaacaacguucaaaucguccgccaacaaucauacuccaucaugugcauaaucaaagaagaaguccuagcuuacgucguccagcugccccucuacggagucaucgacacgcccugcuggaaacuacacacaagcccccucugcaccaccaacaccaaagaaggcuccaacauaugccucacacggaccgaccgcgguugguacugcgacaacgccggcuccgucuccuucuucccccaagcagaaacuugcaaaguccaauccaaccgcguauucugcgacacaaugaacagcagaacacucccuagcgaagucaaccucugcaacaucgacauauucaaccccaaauacgacugcaaaaucaugacgucaaaaaccgacgucuccagcuccguuaucaccucacucggcgccaucgucagcugcuacggcaaaacuaaaugcaccgccuccaacaaaaaccgcggcaucauuaaaaccuucagcaacggcugcgacuacgucuccaacaaaggugucgauacgguauccgucggaaacacccuauacugcgucaacaaacaagaaggcaaaucucucuacgucaaaggcgaacccauaaucaauuucuacgacccccuagucuuccccuccgaugaauuugacgccuccaucagccaagucaacgagaaaaucaaccaaucacuagccuucauccggaaauccgacgaacuccuacacaacguaaacgucggcaaauccaccaccaauauaaugaucacaaccaucaucaucguaaucaucgucauccuccuccuacucaucgccgucggauuauucuuauacugcaaagcccgcuaa

SEQ ID NO: 16532 - RNA, 1821 nt, Artificial Sequence
  mRNA product Design a-1 comprising derived and/or modified sequence from HRSV(Memphis-37)__AIY60640.1__F-del_DSCav1_mut4 (opt1)
gggagagucccgcagucggcguccagcggcucugcuuguucgugugugugucguugcaggccuuauucaagcuuaccauggagcugcccauccucaagaccaacgccaucaccacgauccuggccgcggugacccugugcuucgccagcucccagaacaucaccgaggaguucuaccagagcacgugcuccgccgucagcaagggcuaccucuccgcccugcgcaccgggugguacaccagcgugaucaccaucgagcuguccaacaucaaggagaacaagugcaacggcaccgacgccaaggugaagcucaucaagcaggagcuggacaaguacaagaacgcggucacggagcugcagcuccugaugcagagcaccccggccgccggcuccgggagcgcgaucugcuccggcaucgccgucugcaaggugcugcaccucgagggcgaggugaacaagaucaagaacgcccugcuguccaccaacaaggccgucgugagccucuccaacggggugagcguccugaccuucaaggugcuggaccucaagaacuacaucgacaagcagcugcugcccauccugaacaagcagagcugcuccaucagcaacaucgagaccgucaucgaguuccagcagaagaacaaccgccuccuggagaucacgcgggaguucagcgugaacgcgggcgugaccacccccgucuccaccuacaugcugacgaacagcgagcuccugucccugaucaacgacaugccgaucaccaacgaccagaagaagcucaugagcaacaacgugcagaucgugcgccagcaguccuacagcaucaugugcaucaucaaggaggagguccuggccuacguggugcagcugccccucuacggggucaucgacacccccugcuggaagcugcacaccagcccccugugcacgaccaacaccaaggagggcuccaacaucugccucacccggacggaccgcgggugguacugcgacaacgccggcagcguguccuucuucccgcaggccgagaccugcaagguccagagcaaccggguguucugcgacaccaugaacucccggacccugcccagcgaggugaaccucugcaacaucgacaucuucaaccccaaguacgacugcaagaucaugacguccaagaccgacgucagcuccagcgugaucaccucccugggcgccaucgugagcugcuacgggaagaccaagugcacggcgagcaacaagaaccgcggcaucaucaagaccuucuccaacgggugcgacuacgucagcaacaagggcguggacaccguguccgucggcaacacccuguacugcgugaacaagcaggagggcaagagccucuacgugaagggggagcccaucaucaacuucuacgacccgcuggucuuccccuccgacgaguucgacgccagcaucucccaggugaacgagaagaucaaccagagccuggccuucauccggaaguccgacgagcuccugcacaacgugaacgucggcaagagcaccacgaacaucaugaucaccaccaucaucaucgugaucaucgugauccugcugcuccugaucgccgucgggcuguuccucuacugcaaggcccgcugaggacuagucccuguucccagagcccacuuuuuuuucuuuuuuugaaauaaaauagccugucuuucagaucuaaaaaaaaaaaaaaaaaaaaaaaaaaaaaaaaaaaaaaaaaaaaaaaaaaaaaaaaaaaaaaaaugcaucccccccccccccccccccccccccccccccaaaggcucuuuucagagccaccagaauu

SEQ ID NO: 16533 - RNA, 1821 nt, Artificial Sequence
  mRNA product Design a-1 comprising derived and/or modified sequence from HRSV(Memphis-37)__AIY60640.1__F-del_DSCav1_mut4 (opt1)
gggagagucccgcagucggcguccagcggcucugcuuguucgugugugugucguugcaggccuuauucaagcuuaccauggagcugcccauccucaagaccaacgccaucaccacgauccuggccgcggugacccugugcuucgccagcucccagaacaucaccgaggaguucuaccagagcacgugcuccgccgucagcaagggcuaccucuccgcccugcgcaccgggugguacaccagcgugaucaccaucgagcuguccaacaucaaggagaacaagugcaacggcaccgacgccaaggugaagcucaucaagcaggagcuggacaaguacaagaacgcggucacggagcugcagcuccugaugcagagcaccccggccgccggguccggcagcgccaucugcuccgggaucgcggugugcaaggugcugcaccucgagggcgaggucaacaagaucaagaacgcccugcugagcaccaacaaggccguggugucccucagcaacggcgucuccgugcugaccuucaaggugcuggaccucaagaacuacaucgacaagcagcugcugcccauccucaacaagcagagcugcuccaucagcaacaucgagacggucaucgaguuccagcagaagaacaaccggcugcuggagaucacccgcgaguucuccgugaacgccggggugaccacccccgucagcacguacaugcucaccaacagcgagcugcugucccucaucaacgacaugcccaucaccaacgaccagaagaagcugaugagcaacaacgugcagaucgugcggcagcaguccuacagcaucaugugcaucaucaaggaggagguccuggccuacguggugcagcucccgcuguacggcgucaucgacacccccugcuggaagcugcacacgagcccccucugcaccaccaacaccaaggagggguccaacaucugccugacgcgcaccgaccggggcugguacugcgacaacgcgggguccgugagcuucuucccccaggccgagaccugcaaggugcaguccaaccgcgucuucugcgacaccaugaacagccggacgcucccguccgaggugaaccugugcaacaucgacaucuucaaccccaaguacgacugcaagaucaugaccagcaagaccgacgucuccagcuccgugaucaccagccugggcgccaucguguccugcuacggcaagacgaagugcaccgccagcaacaagaaccgggggaucaucaagaccuucuccaacggcugcgacuacgucagcaacaaggggguggacaccgugagcgucggcaacacgcucuacugcgugaacaagcaggagggcaagucccuguacgugaagggggagcccaucaucaacuucuacgacccccuggucuucccgagcgacgaguucgacgccuccaucagccaggugaacgagaagaucaaccagucccucgcguucauccgcaagagcgacgagcugcugcacaacgugaacgucggcaaguccaccaccaacaucaugaucaccaccaucaucaucgugaucaucgugauccuccugcugcucaucgccgucgggcuguuccuguacugcaaggcccggugaggacuagucccuguucccagagcccacuuuuuuuucuuuuuuugaaauaaaauagccugucuuucagaucuaaaaaaaaaaaaaaaaaaaaaaaaaaaaaaaaaaaaaaaaaaaaaaaaaaaaaaaaaaaaaaaaugcaucccccccccccccccccccccccccccccccaaaggcucuuuucagagccaccagaauu

SEQ ID NO: 16534 - RNA, 1821 nt, Artificial Sequence
  mRNA product Design a-1 comprising derived and/or modified sequence from HRSV(Memphis-37)__AIY60640.1__F-del_DSCav1_mut4 (opt2)
gggagagucccgcagucggcguccagcggcucugcuuguucgugugugugucguugcaggccuuauucaagcuuaccauggagcuccccauccucaagaccaacgccaucaccaccauccucgccgccgucacccucugcuucgccuccucccagaacaucaccgaggaguucuaccaguccaccugcuccgccgucuccaagggcuaccucuccgcccuccgcaccggcugguacaccuccgucaucaccaucgagcucuccaacaucaaggagaacaagugcaacggcaccgacgccaaggucaagcucaucaagcaggagcucgacaaguacaagaacgccgucaccgagcuccagcuccucaugcaguccacccccgccgccggcuccggcuccgccaucugcuccggcaucgccgucugcaagguccuccaccucgagggcgaggucaacaagaucaagaacgcccuccucuccaccaacaaggccgucgucucccucuccaacggcgucuccguccucaccuucaagguccucgaccucaagaacuacaucgacaagcagcuccuccccauccucaacaagcaguccugcuccaucuccaacaucgagaccgucaucgaguuccagcagaagaacaaccgccuccucgagaucacccgcgaguucuccgucaacgccggcgucaccacccccgucuccaccuacaugcucaccaacuccgagcuccucucccucaucaacgacaugcccaucaccaacgaccagaagaagcucauguccaacaacguccagaucguccgccagcaguccuacuccaucaugugcaucaucaaggaggagguccucgccuacgucguccagcucccccucuacggcgucaucgacacccccugcuggaagcuccacaccuccccccucugcaccaccaacaccaaggagggcuccaacaucugccucacccgcaccgaccgcggcugguacugcgacaacgccggcuccgucuccuucuucccccaggccgagaccugcaagguccaguccaaccgcgucuucugcgacaccaugaacucccgcacccuccccuccgaggucaaccucugcaacaucgacaucuucaaccccaaguacgacugcaagaucaugaccuccaagaccgacgucuccuccuccgucaucaccucccucggcgccaucgucuccugcuacggcaagaccaagugcaccgccuccaacaagaaccgcggcaucaucaagaccuucuccaacggcugcgacuacgucuccaacaagggcgucgacaccgucuccgucggcaacacccucuacugcgucaacaagcaggagggcaagucccucuacgucaagggcgagcccaucaucaacuucuacgacccccucgucuuccccuccgacgaguucgacgccuccaucucccaggucaacgagaagaucaaccagucccucgccuucauccgcaaguccgacgagcuccuccacaacgucaacgucggcaaguccaccaccaacaucaugaucaccaccaucaucaucgucaucaucgucauccuccuccuccucaucgccgucggccucuuccucuacugcaaggcccgcugaggacuagucccuguucccagagcccacuuuuuuuucuuuuuuugaaauaaaauagccugucuuucagaucuaaaaaaaaaaaaaaaaaaaaaaaaaaaaaaaaaaaaaaaaaaaaaaaaaaaaaaaaaaaaaaaaugcaucccccccccccccccccccccccccccccccaaaggcucuuuucagagccaccagaauu

SEQ ID NO: 16535 - RNA, 1821 nt, Artificial Sequence
  mRNA product Design a-1 comprising derived and/or modified sequence from HRSV(Memphis-37)__AIY60640.1__F-del_DSCav1_mut4 (opt3)
gggagagucccgcagucggcguccagcggcucugcuuguucgugugugugucguugcaggccuuauucaagcuuaccauggagcugcccauccucaagaccaacgccauuacaacuauacuugcugcagugacgcugugcuucgccagcucccagaauaucaccgaagaguuuuaccaaucuacauguucagcggucaguaaaggcuauuugagcgcuuuaagaacugggugguacaccuccguuauuacaaucgaacugucuaacauuaaggagaauaaaugcaacggaaccgacgccaaggugaaacuaaucaagcaggaacucgauaaguauaaaaaugcaguaacugagcugcagcuucugaugcagucgaccccugccgcugguucaggcagcgcaauauguagugggaucgccgugugcaaggucuugcaccucgagggagaagugaacaaaauuaagaaugcucugcuguccacaaacaaagccguugugucucucagcaauggcgucuccguguuaacguucaagguacuggaccuuaagaacuacaucgauaaacaauugcugccaauucuaaauaagcagucauguaguaucagcaacauagagacuguuauugaauuucagcagaaaaauaacaggcuccuggagaucacccgggaguucucugugaaugcgggugucacaacuccgguguccaccuauaugcuuacaaacucagaacuguugagccucauuaacgacaugcccaucaccaaugaucaaaagaaacugaugaguaacaaugugcagaucguccgccagcagucuuacuccauuaugugcauaaucaaggaggaaguuuuagcauaugugguacaacugccucucuacggggugauugacacgccauguuggaaacuucauacuagcccccugugcacaaccaacacuaaggagggaucgaauaucuguuugacacgaaccgaucguggcugguacugcgacaacgccggcucugucuccuuuuucccucaggcugaaacguguaaggugcagucaaauagaguguuuugcgauaccaugaacaguagaacacugccaagcgaggugaaucucugcaacauagacauuuucaaucccaaauaugauuguaagaucaugacuuccaaaaccgacgucucuagcucagugaucacaagucugggggccauuguauccugcuacggaaagacuaaauguaccgcaagcaacaagaauagggguaucauuaagacauuuucuaacggcugcgauuauguuucaaauaaagggguggacaccgucagugugggaaacacucuuuacugugucaacaagcaagagggcaaaagccuguaugugaagggugaaccuauaaucaauuucuacgacccauugguuuuuccguccgaugaguucgacgcuucuauuucgcagguuaacgagaaaaucaaucagagccucgccuuuauccggaaguccgaugaacuguuacacaacguaaaugucgggaagucaacgacaaacauuaugauaaccacuaucauuaucgugauuaucguuauacugcuacuccugaucgcggugggacuuuucuuguauugcaaagcccgcugaggacuagucccuguucccagagcccacuuuuuuuucuuuuuuugaaauaaaauagccugucuuucagaucuaaaaaaaaaaaaaaaaaaaaaaaaaaaaaaaaaaaaaaaaaaaaaaaaaaaaaaaaaaaaaaaaugcaucccccccccccccccccccccccccccccccaaaggcucuuuucagagccaccagaauu

SEQ ID NO: 16536 - RNA, 1821 nt, Artificial Sequence
  mRNA product Design a-1 comprising derived and/or modified sequence from HRSV(Memphis-37)__AIY60640.1__F-del_DSCav1_mut4 (opt4)
gggagagucccgcagucggcguccagcggcucugcuuguucgugugugugucguugcaggccuuauucaagcuuaccauggagcugcccauccugaagaccaacgccaucaccaccauccuggccgccgugacccugugcuucgccagcagccagaacaucaccgaggaguucuaccagagcaccugcagcgccgugagcaagggcuaccugagcgcccugagaaccggcugguacaccagcgugaucaccaucgagcugagcaacaucaaggagaacaagugcaacggcaccgacgccaaggugaagcugaucaagcaggagcuggacaaguacaagaacgccgugaccgagcugcagcugcugaugcagagcacccccgccgccggcagcggcagcgccaucugcagcggcaucgccgugugcaaggugcugcaccuggagggcgaggugaacaagaucaagaacgcccugcugagcaccaacaaggccguggugagccugagcaacggcgugagcgugcugaccuucaaggugcuggaccugaagaacuacaucgacaagcagcugcugcccauccugaacaagcagagcugcagcaucagcaacaucgagaccgugaucgaguuccagcagaagaacaacagacugcuggagaucaccagagaguucagcgugaacgccggcgugaccacccccgugagcaccuacaugcugaccaacagcgagcugcugagccugaucaacgacaugcccaucaccaacgaccagaagaagcugaugagcaacaacgugcagaucgugagacagcagagcuacagcaucaugugcaucaucaaggaggaggugcuggccuacguggugcagcugccccuguacggcgugaucgacacccccugcuggaagcugcacaccagcccccugugcaccaccaacaccaaggagggcagcaacaucugccugaccagaaccgacagaggcugguacugcgacaacgccggcagcgugagcuucuucccccaggccgagaccugcaaggugcagagcaacagaguguucugcgacaccaugaacagcagaacccugcccagcgaggugaaccugugcaacaucgacaucuucaaccccaaguacgacugcaagaucaugaccagcaagaccgacgugagcagcagcgugaucaccagccugggcgccaucgugagcugcuacggcaagaccaagugcaccgccagcaacaagaacagaggcaucaucaagaccuucagcaacggcugcgacuacgugagcaacaagggcguggacaccgugagcgugggcaacacccuguacugcgugaacaagcaggagggcaagagccuguacgugaagggcgagcccaucaucaacuucuacgacccccugguguuccccagcgacgaguucgacgccagcaucagccaggugaacgagaagaucaaccagagccuggccuucaucagaaagagcgacgagcugcugcacaacgugaacgugggcaagagcaccaccaacaucaugaucaccaccaucaucaucgugaucaucgugauccugcugcugcugaucgccgugggccuguuccuguacugcaaggccagaugaggacuagucccuguucccagagcccacuuuuuuuucuuuuuuugaaauaaaauagccugucuuucagaucuaaaaaaaaaaaaaaaaaaaaaaaaaaaaaaaaaaaaaaaaaaaaaaaaaaaaaaaaaaaaaaaaugcaucccccccccccccccccccccccccccccccaaaggcucuuuucagagccaccagaauu

SEQ ID NO: 16537 - RNA, 1821 nt, Artificial Sequence
  mRNA product Design a-1 comprising derived and/or modified sequence from HRSV(Memphis-37)__AIY60640.1__F-del_DSCav1_mut4 (opt5)
gggagagucccgcagucggcguccagcggcucugcuuguucgugugugugucguugcaggccuuauucaagcuuaccauggagcugcccauccucaagaccaacgccauuacaacgauccuggcugccgugacccuuugcuucgcgagcucccagaauauuacagaagaguuuuaccaaucuaccuguagcgcugucuccaaaggcuaucugucugcccucagaacagggugguacaccagcguuaucacaauugaacuguccaacaucaaggagaauaaaugcaacggaaccgacgccaaggugaaacuuaucaagcaggaacuggauaaguauaaaaaugcugugacggagcuccagcugcugaugcagucuaccccugccgcuggcagcggguccgccauuuguagcggaaucgcggucugcaaggugcuccaccuggagggcgaaguuaacaaaauuaagaaugcccuucugucuacaaacaaagcuguggucucccucagcaauggggugucuguucugaccuucaaggugcuugaccugaagaacuacaucgauaaacaacuccugccgauucugaauaagcaguccuguagcaucucuaacauugagacagucaucgaauuucagcagaaaaauaaccggcuccuggagaucacccgcgaguucuccgugaaugccggagugacgacacccgucagcaccuauaugcuuacaaacuccgaacugcucucucugauuaacgacaugccuaucaccaaugaucaaaagaaacuuaugagcaacaauguucagauugugagacagcaguccuacagcaucaugugcauuaucaaggaggaagugcuggcuuaugucgugcaacucccccuguacggcguuaucgacaccccuuguuggaaacugcauacaucuccccucugcacgaccaacacaaaggagggcuccaauauuugucugacccggacagaucgcgggugguacugcgacaacgccggaagcgugagcuuuuucccucaggcggaaaccuguaagguccagucuaauagaguguuuugcgauacgaugaacuccagaacacugccgucugagguuaaucucugcaacaucgacauuuucaaucccaaauaugauuguaagaucaugaccagcaaaaccgacguguccagcucugucauuacaucccugggcgccaucgugagcugcuacgggaagaccaaauguacagcuucuaacaagaaucggggaaucauuaagacguuuuccaacggcugcgauuaugucagcaauaaagggguggacaccguuuccgugggaaacacacuuuacugugucaacaagcaagagggcaaaucucuguaugugaagggcgaaccuaucauuaauuucuacgacccccucguuuuuccuagcgaugaguucgacgccuccaucucucaggugaacgaaaagauuaaucagagccuggcuuuuauccgcaaguccgaugagcugcuccacaacgucaauguggggaaaagcaccacaaacauuaugaucaccacgaucauuaucgugauuaucguuauucugcuucugcucaucgccgucggacuguuccuguauugcaaagccagaugaggacuagucccuguucccagagcccacuuuuuuuucuuuuuuugaaauaaaauagccugucuuucagaucuaaaaaaaaaaaaaaaaaaaaaaaaaaaaaaaaaaaaaaaaaaaaaaaaaaaaaaaaaaaaaaaaugcaucccccccccccccccccccccccccccccccaaaggcucuuuucagagccaccagaauu

SEQ ID NO: 16538 - RNA, 1821 nt, Artificial Sequence
  mRNA product Design a-1 comprising derived and/or modified sequence from HRSV(Memphis-37)__AIY60640.1__F-del_DSCav1_mut4 (opt6)
gggagagucccgcagucggcguccagcggcucugcuuguucgugugugugucguugcaggccuuauucaagcuuaccauggaacuaccaauacucaaaacaaacgcaauaacaacuauacuagccgcaguuacacucugcuucgcuucaucacaaaauaucacagaagaauuuuaccaaucuacauguucagcuguauccaaagguuaccuuucagcacuacgaacaggaugguauaccucaguaaucaccaucgaacucucgaacauaaaagaaaacaaauguaacggaaccgaugcuaaagucaagcucauaaaacaagaacuagacaaauacaaaaacgcaguaaccgaacuacaacuacuuaugcaaucaacaccagcugcaggcucaggcucagcaaucugcucaggcauagcuguaugcaaaguacuacaucuagaaggagaaguaaacaaaauaaaaaacgcauuauuaucaacaaauaaagcaguaguaucacuaucaaauggaguaucaguacucacauucaaaguacuagaucuaaaaaacuacauugacaaacaauuacuaccaauccucaacaaacaaucaugcucaauauccaacauagaaacaguaauagaauuucaacaaaaaaacaaucgacuacuagaaauaacaagagaauuuucagucaaugccggaguuacaacacccguaagcacuuacaugcuaaccaacucagaacuacuaucacuaauaaacgacaugccaauuacaaacgaccaaaaaaaacuaaugucaaauaacguacaaauaguacgucaacaaucauacucaauaaugugcauaauaaaagaagaaguccuagcauacguaguacaauuacccuuauauggcguaauagacacaccaugcuggaaacuacacacauccccacucugcaccaccaacaccaaagaaggcuccaacauaugucuaacccgaaccgacagagguugguauugugauaacgcuggcuccguaucauucuucccacaagcagaaacauguaaaguacaaucaaacagaguauucugcgauacaaugaauagcagaacacuaccaucagaaguaaacuuaugcaacaucgacaucuucaaucccaaauacgacugcaaaauaaugacauccaaaacugacguuucuucaagcguaauaacaucuuuaggagcaauaguauccugcuacggaaaaacuaaaugcacagcauccaauaaaaaccguggaauaauaaaaacauucucaaauggcugcgacuacgucucaaacaaaggcguagacaccguuagugucggaaacacacuauauugcguaaauaaacaagaaggaaaauccuuauacguaaaaggcgaaccaauaauuaacuucuaugacccccucguauuuccauccgaugaauuugacgcaucaaucucgcaaguaaacgaaaaaauaaaccaaagccuagcauucauaagaaaauccgacgaacuacuccacaauguaaauguaggaaaaucaacuaccaacauaaugauuacuacuauaauaauaguaauuauagucaucuuacuacuauuaauagcagucggauuauuccuauacugcaaagcaagauagggacuagucccuguucccagagcccacuuuuuuuucuuuuuuugaaauaaaauagccugucuuucagaucuaaaaaaaaaaaaaaaaaaaaaaaaaaaaaaaaaaaaaaaaaaaaaaaaaaaaaaaaaaaaaaaaugcaucccccccccccccccccccccccccccccccaaaggcucuuuucagagccaccagaauu

SEQ ID NO: 16539 - RNA, 1821 nt, Artificial Sequence
  mRNA product Design a-1 comprising derived and/or modified sequence from HRSV(Memphis-37)__AIY60640.1__F-del_DSCav1_mut4 (opt11)
gggagagucccgcagucggcguccagcggcucugcuuguucgugugugugucguugcaggccuuauucaagcuuaccauggagcuccccauccuaaaaaccaacgccaucaccaccauccucgccgccgucacccuaugcuucgcuucaucacaaaacaucaccgaagaauuuuaccaaucuaccugcuccgccgucuccaaaggauaucucagcgcccuacggaccggcugguacaccuccgucauaaccaucgaacucaguaacaucaaagaaaacaaaugcaacggcaccgacgccaaagucaaacuaaucaaacaagaacuagauaaauacaaaaacgcggucaccgaacuacaacuccuaaugcaaagcacccccgccgccggauccggcuccgccauaugcuccggcauugcugucugcaaaguacuacaccucgagggcgaggucaacaaaaucaaaaacgcacuacucagcacuaauaaagccguaguaucccuaucaaacggugucucagucuuaacauucaaaguacucgaccuaaagaacuacaucgacaaacaacuccuacccauccucaacaagcaguccuguucuaucucaaacaucgaaaccgucaucgaauuucaacaaaagaacaaccgccuccucgaaaucacacgcgaguucuccgucaacgcaggaguaaccacccccgucuccaccuacaugcucacaaacucggaacuccucucacuaaucaacgacaugcccaucaccaacgaccaaaagaaacucaugagcaacaacguucaaaucguccgccaacaaucauacuccaucaugugcauaaucaaagaagaaguccuagcuuacgucguccagcugccccucuacggagucaucgacacgcccugcuggaaacuacacacaagcccccucugcaccaccaacaccaaagaaggcuccaacauaugccucacacggaccgaccgcgguugguacugcgacaacgccggcuccgucuccuucuucccccaagcagaaacuugcaaaguccaauccaaccgcguauucugcgacacaaugaacagcagaacacucccuagcgaagucaaccucugcaacaucgacauauucaaccccaaauacgacugcaaaaucaugacgucaaaaaccgacgucuccagcuccguuaucaccucacucggcgccaucgucagcugcuacggcaaaacuaaaugcaccgccuccaacaaaaaccgcggcaucauuaaaaccuucagcaacggcugcgacuacgucuccaacaaaggugucgauacgguauccgucggaaacacccuauacugcgucaacaaacaagaaggcaaaucucucuacgucaaaggcgaacccauaaucaauuucuacgacccccuagucuuccccuccgaugaauuugacgccuccaucagccaagucaacgagaaaaucaaccaaucacuagccuucauccggaaauccgacgaacuccuacacaacguaaacgucggcaaauccaccaccaauauaaugaucacaaccaucaucaucguaaucaucgucauccuccuccuacucaucgccgucggauuauucuuauacugcaaagcccgcuaaggacuagucccuguucccagagcccacuuuuuuuucuuuuuuugaaauaaaauagccugucuuucagaucuaaaaaaaaaaaaaaaaaaaaaaaaaaaaaaaaaaaaaaaaaaaaaaaaaaaaaaaaaaaaaaaaugcaucccccccccccccccccccccccccccccccaaaggcucuuuucagagccaccagaauu

SEQ ID NO: 16540 - RNA, 1840 nt, Artificial Sequence
  mRNA product Design a-2 comprising derived and/or modified sequence from HRSV(Memphis-37)__AIY60640.1__F-del_DSCav1_mut4 (opt1)
gggagaguccgcucagccagguugcagaagcggcuuagcguguguccuaaucuucucucugcguguagguaggccugugccgcaaacaagcuuaccauggagcugcccauccucaagaccaacgccaucaccacgauccuggccgcggugacccugugcuucgccagcucccagaacaucaccgaggaguucuaccagagcacgugcuccgccgucagcaagggcuaccucuccgcccugcgcaccgggugguacaccagcgugaucaccaucgagcuguccaacaucaaggagaacaagugcaacggcaccgacgccaaggugaagcucaucaagcaggagcuggacaaguacaagaacgcggucacggagcugcagcuccugaugcagagcaccccggccgccggcuccgggagcgcgaucugcuccggcaucgccgucugcaaggugcugcaccucgagggcgaggugaacaagaucaagaacgcccugcuguccaccaacaaggccgucgugagccucuccaacggggugagcguccugaccuucaaggugcuggaccucaagaacuacaucgacaagcagcugcugcccauccugaacaagcagagcugcuccaucagcaacaucgagaccgucaucgaguuccagcagaagaacaaccgccuccuggagaucacgcgggaguucagcgugaacgcgggcgugaccacccccgucuccaccuacaugcugacgaacagcgagcuccugucccugaucaacgacaugccgaucaccaacgaccagaagaagcucaugagcaacaacgugcagaucgugcgccagcaguccuacagcaucaugugcaucaucaaggaggagguccuggccuacguggugcagcugccccucuacggggucaucgacacccccugcuggaagcugcacaccagcccccugugcacgaccaacaccaaggagggcuccaacaucugccucacccggacggaccgcgggugguacugcgacaacgccggcagcguguccuucuucccgcaggccgagaccugcaagguccagagcaaccggguguucugcgacaccaugaacucccggacccugcccagcgaggugaaccucugcaacaucgacaucuucaaccccaaguacgacugcaagaucaugacguccaagaccgacgucagcuccagcgugaucaccucccugggcgccaucgugagcugcuacgggaagaccaagugcacggcgagcaacaagaaccgcggcaucaucaagaccuucuccaacgggugcgacuacgucagcaacaagggcguggacaccguguccgucggcaacacccuguacugcgugaacaagcaggagggcaagagccucuacgugaagggggagcccaucaucaacuucuacgacccgcuggucuuccccuccgacgaguucgacgccagcaucucccaggugaacgagaagaucaaccagagccuggccuucauccggaaguccgacgagcuccugcacaacgugaacgucggcaagagcaccacgaacaucaugaucaccaccaucaucaucgugaucaucgugauccugcugcuccugaucgccgucgggcuguuccucuacugcaaggcccgcugaggacuagucccuguucccagagcccacuuuuuuuucuuuuuuugaaauaaaauagccugucuuucagaucuaaaaaaaaaaaaaaaaaaaaaaaaaaaaaaaaaaaaaaaaaaaaaaaaaaaaaaaaaaaaaaaaugcaucccccccccccccccccccccccccccccccaaaggcucuuuucagagccaccagaauu

SEQ ID NO: 16541 - RNA, 1840 nt, Artificial Sequence
  mRNA product Design a-2 comprising derived and/or modified sequence from HRSV(Memphis-37)__AIY60640.1__F-del_DSCav1_mut4 (opt1)
gggagaguccgcucagccagguugcagaagcggcuuagcguguguccuaaucuucucucugcguguagguaggccugugccgcaaacaagcuuaccauggagcugcccauccucaagaccaacgccaucaccacgauccuggccgcggugacccugugcuucgccagcucccagaacaucaccgaggaguucuaccagagcacgugcuccgccgucagcaagggcuaccucuccgcccugcgcaccgggugguacaccagcgugaucaccaucgagcuguccaacaucaaggagaacaagugcaacggcaccgacgccaaggugaagcucaucaagcaggagcuggacaaguacaagaacgcggucacggagcugcagcuccugaugcagagcaccccggccgccggguccggcagcgccaucugcuccgggaucgcggugugcaaggugcugcaccucgagggcgaggucaacaagaucaagaacgcccugcugagcaccaacaaggccguggugucccucagcaacggcgucuccgugcugaccuucaaggugcuggaccucaagaacuacaucgacaagcagcugcugcccauccucaacaagcagagcugcuccaucagcaacaucgagacggucaucgaguuccagcagaagaacaaccggcugcuggagaucacccgcgaguucuccgugaacgccggggugaccacccccgucagcacguacaugcucaccaacagcgagcugcugucccucaucaacgacaugcccaucaccaacgaccagaagaagcugaugagcaacaacgugcagaucgugcggcagcaguccuacagcaucaugugcaucaucaaggaggagguccuggccuacguggugcagcucccgcuguacggcgucaucgacacccccugcuggaagcugcacacgagcccccucugcaccaccaacaccaaggagggguccaacaucugccugacgcgcaccgaccggggcugguacugcgacaacgcgggguccgugagcuucuucccccaggccgagaccugcaaggugcaguccaaccgcgucuucugcgacaccaugaacagccggacgcucccguccgaggugaaccugugcaacaucgacaucuucaaccccaaguacgacugcaagaucaugaccagcaagaccgacgucuccagcuccgugaucaccagccugggcgccaucguguccugcuacggcaagacgaagugcaccgccagcaacaagaaccgggggaucaucaagaccuucuccaacggcugcgacuacgucagcaacaaggggguggacaccgugagcgucggcaacacgcucuacugcgugaacaagcaggagggcaagucccuguacgugaagggggagcccaucaucaacuucuacgacccccuggucuucccgagcgacgaguucgacgccuccaucagccaggugaacgagaagaucaaccagucccucgcguucauccgcaagagcgacgagcugcugcacaacgugaacgucggcaaguccaccaccaacaucaugaucaccaccaucaucaucgugaucaucgugauccuccugcugcucaucgccgucgggcuguuccuguacugcaaggcccggugaggacuagucccuguucccagagcccacuuuuuuuucuuuuuuugaaauaaaauagccugucuuucagaucuaaaaaaaaaaaaaaaaaaaaaaaaaaaaaaaaaaaaaaaaaaaaaaaaaaaaaaaaaaaaaaaaugcaucccccccccccccccccccccccccccccccaaaggcucuuuucagagccaccagaauu

SEQ ID NO: 16542 - RNA, 1840 nt, Artificial Sequence
  mRNA product Design a-2 comprising derived and/or modified sequence from HRSV(Memphis-37)__AIY60640.1__F-del_DSCav1_mut4 (opt2)
gggagaguccgcucagccagguugcagaagcggcuuagcguguguccuaaucuucucucugcguguagguaggccugugccgcaaacaagcuuaccauggagcuccccauccucaagaccaacgccaucaccaccauccucgccgccgucacccucugcuucgccuccucccagaacaucaccgaggaguucuaccaguccaccugcuccgccgucuccaagggcuaccucuccgcccuccgcaccggcugguacaccuccgucaucaccaucgagcucuccaacaucaaggagaacaagugcaacggcaccgacgccaaggucaagcucaucaagcaggagcucgacaaguacaagaacgccgucaccgagcuccagcuccucaugcaguccacccccgccgccggcuccggcuccgccaucugcuccggcaucgccgucugcaagguccuccaccucgagggcgaggucaacaagaucaagaacgcccuccucuccaccaacaaggccgucgucucccucuccaacggcgucuccguccucaccuucaagguccucgaccucaagaacuacaucgacaagcagcuccuccccauccucaacaagcaguccugcuccaucuccaacaucgagaccgucaucgaguuccagcagaagaacaaccgccuccucgagaucacccgcgaguucuccgucaacgccggcgucaccacccccgucuccaccuacaugcucaccaacuccgagcuccucucccucaucaacgacaugcccaucaccaacgaccagaagaagcucauguccaacaacguccagaucguccgccagcaguccuacuccaucaugugcaucaucaaggaggagguccucgccuacgucguccagcucccccucuacggcgucaucgacacccccugcuggaagcuccacaccuccccccucugcaccaccaacaccaaggagggcuccaacaucugccucacccgcaccgaccgcggcugguacugcgacaacgccggcuccgucuccuucuucccccaggccgagaccugcaagguccaguccaaccgcgucuucugcgacaccaugaacucccgcacccuccccuccgaggucaaccucugcaacaucgacaucuucaaccccaaguacgacugcaagaucaugaccuccaagaccgacgucuccuccuccgucaucaccucccucggcgccaucgucuccugcuacggcaagaccaagugcaccgccuccaacaagaaccgcggcaucaucaagaccuucuccaacggcugcgacuacgucuccaacaagggcgucgacaccgucuccgucggcaacacccucuacugcgucaacaagcaggagggcaagucccucuacgucaagggcgagcccaucaucaacuucuacgacccccucgucuuccccuccgacgaguucgacgccuccaucucccaggucaacgagaagaucaaccagucccucgccuucauccgcaaguccgacgagcuccuccacaacgucaacgucggcaaguccaccaccaacaucaugaucaccaccaucaucaucgucaucaucgucauccuccuccuccucaucgccgucggccucuuccucuacugcaaggcccgcugaggacuagucccuguucccagagcccacuuuuuuuucuuuuuuugaaauaaaauagccugucuuucagaucuaaaaaaaaaaaaaaaaaaaaaaaaaaaaaaaaaaaaaaaaaaaaaaaaaaaaaaaaaaaaaaaaugcaucccccccccccccccccccccccccccccccaaaggcucuuuucagagccaccagaauu

SEQ ID NO: 16543 - RNA, 1840 nt, Artificial Sequence
  mRNA product Design a-2 comprising derived and/or modified sequence from HRSV(Memphis-37)__AIY60640.1__F-del_DSCav1_mut4 (opt3)
gggagaguccgcucagccagguugcagaagcggcuuagcguguguccuaaucuucucucugcguguagguaggccugugccgcaaacaagcuuaccauggagcugcccauccucaagaccaacgccauuacaacuauacuugcugcagugacgcugugcuucgccagcucccagaauaucaccgaagaguuuuaccaaucuacauguucagcggucaguaaaggcuauuugagcgcuuuaagaacugggugguacaccuccguuauuacaaucgaacugucuaacauuaaggagaauaaaugcaacggaaccgacgccaaggugaaacuaaucaagcaggaacucgauaaguauaaaaaugcaguaacugagcugcagcuucugaugcagucgaccccugccgcugguucaggcagcgcaauauguagugggaucgccgugugcaaggucuugcaccucgagggagaagugaacaaaauuaagaaugcucugcuguccacaaacaaagccguugugucucucagcaauggcgucuccguguuaacguucaagguacuggaccuuaagaacuacaucgauaaacaauugcugccaauucuaaauaagcagucauguaguaucagcaacauagagacuguuauugaauuucagcagaaaaauaacaggcuccuggagaucacccgggaguucucugugaaugcgggugucacaacuccgguguccaccuauaugcuuacaaacucagaacuguugagccucauuaacgacaugcccaucaccaaugaucaaaagaaacugaugaguaacaaugugcagaucguccgccagcagucuuacuccauuaugugcauaaucaaggaggaaguuuuagcauaugugguacaacugccucucuacggggugauugacacgccauguuggaaacuucauacuagcccccugugcacaaccaacacuaaggagggaucgaauaucuguuugacacgaaccgaucguggcugguacugcgacaacgccggcucugucuccuuuuucccucaggcugaaacguguaaggugcagucaaauagaguguuuugcgauaccaugaacaguagaacacugccaagcgaggugaaucucugcaacauagacauuuucaaucccaaauaugauuguaagaucaugacuuccaaaaccgacgucucuagcucagugaucacaagucugggggccauuguauccugcuacggaaagacuaaauguaccgcaagcaacaagaauagggguaucauuaagacauuuucuaacggcugcgauuauguuucaaauaaagggguggacaccgucagugugggaaacacucuuuacugugucaacaagcaagagggcaaaagccuguaugugaagggugaaccuauaaucaauuucuacgacccauugguuuuuccguccgaugaguucgacgcuucuauuucgcagguuaacgagaaaaucaaucagagccucgccuuuauccggaaguccgaugaacuguuacacaacguaaaugucgggaagucaacgacaaacauuaugauaaccacuaucauuaucgugauuaucguuauacugcuacuccugaucgcggugggacuuuucuuguauugcaaagcccgcugaggacuagucccuguucccagagcccacuuuuuuuucuuuuuuugaaauaaaauagccugucuuucagaucuaaaaaaaaaaaaaaaaaaaaaaaaaaaaaaaaaaaaaaaaaaaaaaaaaaaaaaaaaaaaaaaaugcaucccccccccccccccccccccccccccccccaaaggcucuuuucagagccaccagaauu

SEQ ID NO: 16544 - RNA, 1840 nt, Artificial Sequence
  mRNA product Design a-2 comprising derived and/or modified sequence from HRSV(Memphis-37)__AIY60640.1__F-del_DSCav1_mut4 (opt4)
gggagaguccgcucagccagguugcagaagcggcuuagcguguguccuaaucuucucucugcguguagguaggccugugccgcaaacaagcuuaccauggagcugcccauccugaagaccaacgccaucaccaccauccuggccgccgugacccugugcuucgccagcagccagaacaucaccgaggaguucuaccagagcaccugcagcgccgugagcaagggcuaccugagcgcccugagaaccggcugguacaccagcgugaucaccaucgagcugagcaacaucaaggagaacaagugcaacggcaccgacgccaaggugaagcugaucaagcaggagcuggacaaguacaagaacgccgugaccgagcugcagcugcugaugcagagcacccccgccgccggcagcggcagcgccaucugcagcggcaucgccgugugcaaggugcugcaccuggagggcgaggugaacaagaucaagaacgcccugcugagcaccaacaaggccguggugagccugagcaacggcgugagcgugcugaccuucaaggugcuggaccugaagaacuacaucgacaagcagcugcugcccauccugaacaagcagagcugcagcaucagcaacaucgagaccgugaucgaguuccagcagaagaacaacagacugcuggagaucaccagagaguucagcgugaacgccggcgugaccacccccgugagcaccuacaugcugaccaacagcgagcugcugagccugaucaacgacaugcccaucaccaacgaccagaagaagcugaugagcaacaacgugcagaucgugagacagcagagcuacagcaucaugugcaucaucaaggaggaggugcuggccuacguggugcagcugccccuguacggcgugaucgacacccccugcuggaagcugcacaccagcccccugugcaccaccaacaccaaggagggcagcaacaucugccugaccagaaccgacagaggcugguacugcgacaacgccggcagcgugagcuucuucccccaggccgagaccugcaaggugcagagcaacagaguguucugcgacaccaugaacagcagaacccugcccagcgaggugaaccugugcaacaucgacaucuucaaccccaaguacgacugcaagaucaugaccagcaagaccgacgugagcagcagcgugaucaccagccugggcgccaucgugagcugcuacggcaagaccaagugcaccgccagcaacaagaacagaggcaucaucaagaccuucagcaacggcugcgacuacgugagcaacaagggcguggacaccgugagcgugggcaacacccuguacugcgugaacaagcaggagggcaagagccuguacgugaagggcgagcccaucaucaacuucuacgacccccugguguuccccagcgacgaguucgacgccagcaucagccaggugaacgagaagaucaaccagagccuggccuucaucagaaagagcgacgagcugcugcacaacgugaacgugggcaagagcaccaccaacaucaugaucaccaccaucaucaucgugaucaucgugauccugcugcugcugaucgccgugggccuguuccuguacugcaaggccagaugaggacuagucccuguucccagagcccacuuuuuuuucuuuuuuugaaauaaaauagccugucuuucagaucuaaaaaaaaaaaaaaaaaaaaaaaaaaaaaaaaaaaaaaaaaaaaaaaaaaaaaaaaaaaaaaaaugcaucccccccccccccccccccccccccccccccaaaggcucuuuucagagccaccagaauu

SEQ ID NO: 16545 - RNA, 1840 nt, Artificial Sequence
  mRNA product Design a-2 comprising derived and/or modified sequence from HRSV(Memphis-37)__AIY60640.1__F-del_DSCav1_mut4 (opt5)
gggagaguccgcucagccagguugcagaagcggcuuagcguguguccuaaucuucucucugcguguagguaggccugugccgcaaacaagcuuaccauggagcugcccauccucaagaccaacgccauuacaacgauccuggcugccgugacccuuugcuucgcgagcucccagaauauuacagaagaguuuuaccaaucuaccuguagcgcugucuccaaaggcuaucugucugcccucagaacagggugguacaccagcguuaucacaauugaacuguccaacaucaaggagaauaaaugcaacggaaccgacgccaaggugaaacuuaucaagcaggaacuggauaaguauaaaaaugcugugacggagcuccagcugcugaugcagucuaccccugccgcuggcagcggguccgccauuuguagcggaaucgcggucugcaaggugcuccaccuggagggcgaaguuaacaaaauuaagaaugcccuucugucuacaaacaaagcuguggucucccucagcaauggggugucuguucugaccuucaaggugcuugaccugaagaacuacaucgauaaacaacuccugccgauucugaauaagcaguccuguagcaucucuaacauugagacagucaucgaauuucagcagaaaaauaaccggcuccuggagaucacccgcgaguucuccgugaaugccggagugacgacacccgucagcaccuauaugcuuacaaacuccgaacugcucucucugauuaacgacaugccuaucaccaaugaucaaaagaaacuuaugagcaacaauguucagauugugagacagcaguccuacagcaucaugugcauuaucaaggaggaagugcuggcuuaugucgugcaacucccccuguacggcguuaucgacaccccuuguuggaaacugcauacaucuccccucugcacgaccaacacaaaggagggcuccaauauuugucugacccggacagaucgcgggugguacugcgacaacgccggaagcgugagcuuuuucccucaggcggaaaccuguaagguccagucuaauagaguguuuugcgauacgaugaacuccagaacacugccgucugagguuaaucucugcaacaucgacauuuucaaucccaaauaugauuguaagaucaugaccagcaaaaccgacguguccagcucugucauuacaucccugggcgccaucgugagcugcuacgggaagaccaaauguacagcuucuaacaagaaucggggaaucauuaagacguuuuccaacggcugcgauuaugucagcaauaaagggguggacaccguuuccgugggaaacacacuuuacugugucaacaagcaagagggcaaaucucuguaugugaagggcgaaccuaucauuaauuucuacgacccccucguuuuuccuagcgaugaguucgacgccuccaucucucaggugaacgaaaagauuaaucagagccuggcuuuuauccgcaaguccgaugagcugcuccacaacgucaauguggggaaaagcaccacaaacauuaugaucaccacgaucauuaucgugauuaucguuauucugcuucugcucaucgccgucggacuguuccuguauugcaaagccagaugaggacuagucccuguucccagagcccacuuuuuuuucuuuuuuugaaauaaaauagccugucuuucagaucuaaaaaaaaaaaaaaaaaaaaaaaaaaaaaaaaaaaaaaaaaaaaaaaaaaaaaaaaaaaaaaaaugcaucccccccccccccccccccccccccccccccaaaggcucuuuucagagccaccagaauu

SEQ ID NO: 16546 - RNA, 1840 nt, Artificial Sequence
  mRNA product Design a-2 comprising derived and/or modified sequence from HRSV(Memphis-37)__AIY60640.1__F-del_DSCav1_mut4 (opt6)
gggagaguccgcucagccagguugcagaagcggcuuagcguguguccuaaucuucucucugcguguagguaggccugugccgcaaacaagcuuaccauggaacuaccaauacucaaaacaaacgcaauaacaacuauacuagccgcaguuacacucugcuucgcuucaucacaaaauaucacagaagaauuuuaccaaucuacauguucagcuguauccaaagguuaccuuucagcacuacgaacaggaugguauaccucaguaaucaccaucgaacucucgaacauaaaagaaaacaaauguaacggaaccgaugcuaaagucaagcucauaaaacaagaacuagacaaauacaaaaacgcaguaaccgaacuacaacuacuuaugcaaucaacaccagcugcaggcucaggcucagcaaucugcucaggcauagcuguaugcaaaguacuacaucuagaaggagaaguaaacaaaauaaaaaacgcauuauuaucaacaaauaaagcaguaguaucacuaucaaauggaguaucaguacucacauucaaaguacuagaucuaaaaaacuacauugacaaacaauuacuaccaauccucaacaaacaaucaugcucaauauccaacauagaaacaguaauagaauuucaacaaaaaaacaaucgacuacuagaaauaacaagagaauuuucagucaaugccggaguuacaacacccguaagcacuuacaugcuaaccaacucagaacuacuaucacuaauaaacgacaugccaauuacaaacgaccaaaaaaaacuaaugucaaauaacguacaaauaguacgucaacaaucauacucaauaaugugcauaauaaaagaagaaguccuagcauacguaguacaauuacccuuauauggcguaauagacacaccaugcuggaaacuacacacauccccacucugcaccaccaacaccaaagaaggcuccaacauaugucuaacccgaaccgacagagguugguauugugauaacgcuggcuccguaucauucuucccacaagcagaaacauguaaaguacaaucaaacagaguauucugcgauacaaugaauagcagaacacuaccaucagaaguaaacuuaugcaacaucgacaucuucaaucccaaauacgacugcaaaauaaugacauccaaaacugacguuucuucaagcguaauaacaucuuuaggagcaauaguauccugcuacggaaaaacuaaaugcacagcauccaauaaaaaccguggaauaauaaaaacauucucaaauggcugcgacuacgucucaaacaaaggcguagacaccguuagugucggaaacacacuauauugcguaaauaaacaagaaggaaaauccuuauacguaaaaggcgaaccaauaauuaacuucuaugacccccucguauuuccauccgaugaauuugacgcaucaaucucgcaaguaaacgaaaaaauaaaccaaagccuagcauucauaagaaaauccgacgaacuacuccacaauguaaauguaggaaaaucaacuaccaacauaaugauuacuacuauaauaauaguaauuauagucaucuuacuacuauuaauagcagucggauuauuccuauacugcaaagcaagauagggacuagucccuguucccagagcccacuuuuuuuucuuuuuuugaaauaaaauagccugucuuucagaucuaaaaaaaaaaaaaaaaaaaaaaaaaaaaaaaaaaaaaaaaaaaaaaaaaaaaaaaaaaaaaaaaugcaucccccccccccccccccccccccccccccccaaaggcucuuuucagagccaccagaauu

SEQ ID NO: 16547 - RNA, 1840 nt, Artificial Sequence
  mRNA product Design a-2 comprising derived and/or modified sequence from HRSV(Memphis-37)__AIY60640.1__F-del_DSCav1_mut4 (opt11)
gggagaguccgcucagccagguugcagaagcggcuuagcguguguccuaaucuucucucugcguguagguaggccugugccgcaaacaagcuuaccauggagcuccccauccuaaaaaccaacgccaucaccaccauccucgccgccgucacccuaugcuucgcuucaucacaaaacaucaccgaagaauuuuaccaaucuaccugcuccgccgucuccaaaggauaucucagcgcccuacggaccggcugguacaccuccgucauaaccaucgaacucaguaacaucaaagaaaacaaaugcaacggcaccgacgccaaagucaaacuaaucaaacaagaacuagauaaauacaaaaacgcggucaccgaacuacaacuccuaaugcaaagcacccccgccgccggauccggcuccgccauaugcuccggcauugcugucugcaaaguacuacaccucgagggcgaggucaacaaaaucaaaaacgcacuacucagcacuaauaaagccguaguaucccuaucaaacggugucucagucuuaacauucaaaguacucgaccuaaagaacuacaucgacaaacaacuccuacccauccucaacaagcaguccuguucuaucucaaacaucgaaaccgucaucgaauuucaacaaaagaacaaccgccuccucgaaaucacacgcgaguucuccgucaacgcaggaguaaccacccccgucuccaccuacaugcucacaaacucggaacuccucucacuaaucaacgacaugcccaucaccaacgaccaaaagaaacucaugagcaacaacguucaaaucguccgccaacaaucauacuccaucaugugcauaaucaaagaagaaguccuagcuuacgucguccagcugccccucuacggagucaucgacacgcccugcuggaaacuacacacaagcccccucugcaccaccaacaccaaagaaggcuccaacauaugccucacacggaccgaccgcgguugguacugcgacaacgccggcuccgucuccuucuucccccaagcagaaacuugcaaaguccaauccaaccgcguauucugcgacacaaugaacagcagaacacucccuagcgaagucaaccucugcaacaucgacauauucaaccccaaauacgacugcaaaaucaugacgucaaaaaccgacgucuccagcuccguuaucaccucacucggcgccaucgucagcugcuacggcaaaacuaaaugcaccgccuccaacaaaaaccgcggcaucauuaaaaccuucagcaacggcugcgacuacgucuccaacaaaggugucgauacgguauccgucggaaacacccuauacugcgucaacaaacaagaaggcaaaucucucuacgucaaaggcgaacccauaaucaauuucuacgacccccuagucuuccccuccgaugaauuugacgccuccaucagccaagucaacgagaaaaucaaccaaucacuagccuucauccggaaauccgacgaacuccuacacaacguaaacgucggcaaauccaccaccaauauaaugaucacaaccaucaucaucguaaucaucgucauccuccuccuacucaucgccgucggauuauucuuauacugcaaagcccgcuaaggacuagucccuguucccagagcccacuuuuuuuucuuuuuuugaaauaaaauagccugucuuucagaucuaaaaaaaaaaaaaaaaaaaaaaaaaaaaaaaaaaaaaaaaaaaaaaaaaaaaaaaaaaaaaaaaugcaucccccccccccccccccccccccccccccccaaaggcucuuuucagagccaccagaauu

SEQ ID NO: 16548 - RNA, 1918 nt, Artificial Sequence
  mRNA product Design a-3 comprising derived and/or modified sequence from HRSV(Memphis-37)__AIY60640.1__F-del_DSCav1_mut4 (opt1)
gggagagggcgcuuggcuugcaaggacccugagcugcggcauugaagcacacccaacccaacucgacugaagucagccucacugaaccggaucugagaaucuucucucucugggcuugccagggcucuccgaaccuagcuagcauccucuucaauuccaacuagaaagcuuaccauggagcugcccauccucaagaccaacgccaucaccacgauccuggccgcggugacccugugcuucgccagcucccagaacaucaccgaggaguucuaccagagcacgugcuccgccgucagcaagggcuaccucuccgcccugcgcaccgggugguacaccagcgugaucaccaucgagcuguccaacaucaaggagaacaagugcaacggcaccgacgccaaggugaagcucaucaagcaggagcuggacaaguacaagaacgcggucacggagcugcagcuccugaugcagagcaccccggccgccggcuccgggagcgcgaucugcuccggcaucgccgucugcaaggugcugcaccucgagggcgaggugaacaagaucaagaacgcccugcuguccaccaacaaggccgucgugagccucuccaacggggugagcguccugaccuucaaggugcuggaccucaagaacuacaucgacaagcagcugcugcccauccugaacaagcagagcugcuccaucagcaacaucgagaccgucaucgaguuccagcagaagaacaaccgccuccuggagaucacgcgggaguucagcgugaacgcgggcgugaccacccccgucuccaccuacaugcugacgaacagcgagcuccugucccugaucaacgacaugccgaucaccaacgaccagaagaagcucaugagcaacaacgugcagaucgugcgccagcaguccuacagcaucaugugcaucaucaaggaggagguccuggccuacguggugcagcugccccucuacggggucaucgacacccccugcuggaagcugcacaccagcccccugugcacgaccaacaccaaggagggcuccaacaucugccucacccggacggaccgcgggugguacugcgacaacgccggcagcguguccuucuucccgcaggccgagaccugcaagguccagagcaaccggguguucugcgacaccaugaacucccggacccugcccagcgaggugaaccucugcaacaucgacaucuucaaccccaaguacgacugcaagaucaugacguccaagaccgacgucagcuccagcgugaucaccucccugggcgccaucgugagcugcuacgggaagaccaagugcacggcgagcaacaagaaccgcggcaucaucaagaccuucuccaacgggugcgacuacgucagcaacaagggcguggacaccguguccgucggcaacacccuguacugcgugaacaagcaggagggcaagagccucuacgugaagggggagcccaucaucaacuucuacgacccgcuggucuuccccuccgacgaguucgacgccagcaucucccaggugaacgagaagaucaaccagagccuggccuucauccggaaguccgacgagcuccugcacaacgugaacgucggcaagagcaccacgaacaucaugaucaccaccaucaucaucgugaucaucgugauccugcugcuccugaucgccgucgggcuguuccucuacugcaaggcccgcugaggacuagucccuguucccagagcccacuuuuuuuucuuuuuuugaaauaaaauagccugucuuucagaucuaaaaaaaaaaaaaaaaaaaaaaaaaaaaaaaaaaaaaaaaaaaaaaaaaaaaaaaaaaaaaaaaugcaucccccccccccccccccccccccccccccccaaaggcucuuuucagagccaccagaauu

SEQ ID NO: 16549 - RNA, 1918 nt, Artificial Sequence
  mRNA product Design a-3 comprising derived and/or modified sequence from HRSV(Memphis-37)__AIY60640.1__F-del_DSCav1_mut4 (opt1)
gggagagggcgcuuggcuugcaaggacccugagcugcggcauugaagcacacccaacccaacucgacugaagucagccucacugaaccggaucugagaaucuucucucucugggcuugccagggcucuccgaaccuagcuagcauccucuucaauuccaacuagaaagcuuaccauggagcugcccauccucaagaccaacgccaucaccacgauccuggccgcggugacccugugcuucgccagcucccagaacaucaccgaggaguucuaccagagcacgugcuccgccgucagcaagggcuaccucuccgcccugcgcaccgggugguacaccagcgugaucaccaucgagcuguccaacaucaaggagaacaagugcaacggcaccgacgccaaggugaagcucaucaagcaggagcuggacaaguacaagaacgcggucacggagcugcagcuccugaugcagagcaccccggccgccggguccggcagcgccaucugcuccgggaucgcggugugcaaggugcugcaccucgagggcgaggucaacaagaucaagaacgcccugcugagcaccaacaaggccguggugucccucagcaacggcgucuccgugcugaccuucaaggugcuggaccucaagaacuacaucgacaagcagcugcugcccauccucaacaagcagagcugcuccaucagcaacaucgagacggucaucgaguuccagcagaagaacaaccggcugcuggagaucacccgcgaguucuccgugaacgccggggugaccacccccgucagcacguacaugcucaccaacagcgagcugcugucccucaucaacgacaugcccaucaccaacgaccagaagaagcugaugagcaacaacgugcagaucgugcggcagcaguccuacagcaucaugugcaucaucaaggaggagguccuggccuacguggugcagcucccgcuguacggcgucaucgacacccccugcuggaagcugcacacgagcccccucugcaccaccaacaccaaggagggguccaacaucugccugacgcgcaccgaccggggcugguacugcgacaacgcgggguccgugagcuucuucccccaggccgagaccugcaaggugcaguccaaccgcgucuucugcgacaccaugaacagccggacgcucccguccgaggugaaccugugcaacaucgacaucuucaaccccaaguacgacugcaagaucaugaccagcaagaccgacgucuccagcuccgugaucaccagccugggcgccaucguguccugcuacggcaagacgaagugcaccgccagcaacaagaaccgggggaucaucaagaccuucuccaacggcugcgacuacgucagcaacaaggggguggacaccgugagcgucggcaacacgcucuacugcgugaacaagcaggagggcaagucccuguacgugaagggggagcccaucaucaacuucuacgacccccuggucuucccgagcgacgaguucgacgccuccaucagccaggugaacgagaagaucaaccagucccucgcguucauccgcaagagcgacgagcugcugcacaacgugaacgucggcaaguccaccaccaacaucaugaucaccaccaucaucaucgugaucaucgugauccuccugcugcucaucgccgucgggcuguuccuguacugcaaggcccggugaggacuagucccuguucccagagcccacuuuuuuuucuuuuuuugaaauaaaauagccugucuuucagaucuaaaaaaaaaaaaaaaaaaaaaaaaaaaaaaaaaaaaaaaaaaaaaaaaaaaaaaaaaaaaaaaaugcaucccccccccccccccccccccccccccccccaaaggcucuuuucagagccaccagaauu

SEQ ID NO: 16550 - RNA, 1918 nt, Artificial Sequence
  mRNA product Design a-3 comprising derived and/or modified sequence from HRSV(Memphis-37)__AIY60640.1__F-del_DSCav1_mut4 (opt2)
gggagagggcgcuuggcuugcaaggacccugagcugcggcauugaagcacacccaacccaacucgacugaagucagccucacugaaccggaucugagaaucuucucucucugggcuugccagggcucuccgaaccuagcuagcauccucuucaauuccaacuagaaagcuuaccauggagcuccccauccucaagaccaacgccaucaccaccauccucgccgccgucacccucugcuucgccuccucccagaacaucaccgaggaguucuaccaguccaccugcuccgccgucuccaagggcuaccucuccgcccuccgcaccggcugguacaccuccgucaucaccaucgagcucuccaacaucaaggagaacaagugcaacggcaccgacgccaaggucaagcucaucaagcaggagcucgacaaguacaagaacgccgucaccgagcuccagcuccucaugcaguccacccccgccgccggcuccggcuccgccaucugcuccggcaucgccgucugcaagguccuccaccucgagggcgaggucaacaagaucaagaacgcccuccucuccaccaacaaggccgucgucucccucuccaacggcgucuccguccucaccuucaagguccucgaccucaagaacuacaucgacaagcagcuccuccccauccucaacaagcaguccugcuccaucuccaacaucgagaccgucaucgaguuccagcagaagaacaaccgccuccucgagaucacccgcgaguucuccgucaacgccggcgucaccacccccgucuccaccuacaugcucaccaacuccgagcuccucucccucaucaacgacaugcccaucaccaacgaccagaagaagcucauguccaacaacguccagaucguccgccagcaguccuacuccaucaugugcaucaucaaggaggagguccucgccuacgucguccagcucccccucuacggcgucaucgacacccccugcuggaagcuccacaccuccccccucugcaccaccaacaccaaggagggcuccaacaucugccucacccgcaccgaccgcggcugguacugcgacaacgccggcuccgucuccuucuucccccaggccgagaccugcaagguccaguccaaccgcgucuucugcgacaccaugaacucccgcacccuccccuccgaggucaaccucugcaacaucgacaucuucaaccccaaguacgacugcaagaucaugaccuccaagaccgacgucuccuccuccgucaucaccucccucggcgccaucgucuccugcuacggcaagaccaagugcaccgccuccaacaagaaccgcggcaucaucaagaccuucuccaacggcugcgacuacgucuccaacaagggcgucgacaccgucuccgucggcaacacccucuacugcgucaacaagcaggagggcaagucccucuacgucaagggcgagcccaucaucaacuucuacgacccccucgucuuccccuccgacgaguucgacgccuccaucucccaggucaacgagaagaucaaccagucccucgccuucauccgcaaguccgacgagcuccuccacaacgucaacgucggcaaguccaccaccaacaucaugaucaccaccaucaucaucgucaucaucgucauccuccuccuccucaucgccgucggccucuuccucuacugcaaggcccgcugaggacuagucccuguucccagagcccacuuuuuuuucuuuuuuugaaauaaaauagccugucuuucagaucuaaaaaaaaaaaaaaaaaaaaaaaaaaaaaaaaaaaaaaaaaaaaaaaaaaaaaaaaaaaaaaaaugcaucccccccccccccccccccccccccccccccaaaggcucuuuucagagccaccagaauu

SEQ ID NO: 16551 - RNA, 1918 nt, Artificial Sequence
  mRNA product Design a-3 comprising derived and/or modified sequence from HRSV(Memphis-37)__AIY60640.1__F-del_DSCav1_mut4 (opt3)
gggagagggcgcuuggcuugcaaggacccugagcugcggcauugaagcacacccaacccaacucgacugaagucagccucacugaaccggaucugagaaucuucucucucugggcuugccagggcucuccgaaccuagcuagcauccucuucaauuccaacuagaaagcuuaccauggagcugcccauccucaagaccaacgccauuacaacuauacuugcugcagugacgcugugcuucgccagcucccagaauaucaccgaagaguuuuaccaaucuacauguucagcggucaguaaaggcuauuugagcgcuuuaagaacugggugguacaccuccguuauuacaaucgaacugucuaacauuaaggagaauaaaugcaacggaaccgacgccaaggugaaacuaaucaagcaggaacucgauaaguauaaaaaugcaguaacugagcugcagcuucugaugcagucgaccccugccgcugguucaggcagcgcaauauguagugggaucgccgugugcaaggucuugcaccucgagggagaagugaacaaaauuaagaaugcucugcuguccacaaacaaagccguugugucucucagcaauggcgucuccguguuaacguucaagguacuggaccuuaagaacuacaucgauaaacaauugcugccaauucuaaauaagcagucauguaguaucagcaacauagagacuguuauugaauuucagcagaaaaauaacaggcuccuggagaucacccgggaguucucugugaaugcgggugucacaacuccgguguccaccuauaugcuuacaaacucagaacuguugagccucauuaacgacaugcccaucaccaaugaucaaaagaaacugaugaguaacaaugugcagaucguccgccagcagucuuacuccauuaugugcauaaucaaggaggaaguuuuagcauaugugguacaacugccucucuacggggugauugacacgccauguuggaaacuucauacuagcccccugugcacaaccaacacuaaggagggaucgaauaucuguuugacacgaaccgaucguggcugguacugcgacaacgccggcucugucuccuuuuucccucaggcugaaacguguaaggugcagucaaauagaguguuuugcgauaccaugaacaguagaacacugccaagcgaggugaaucucugcaacauagacauuuucaaucccaaauaugauuguaagaucaugacuuccaaaaccgacgucucuagcucagugaucacaagucugggggccauuguauccugcuacggaaagacuaaauguaccgcaagcaacaagaauagggguaucauuaagacauuuucuaacggcugcgauuauguuucaaauaaagggguggacaccgucagugugggaaacacucuuuacugugucaacaagcaagagggcaaaagccuguaugugaagggugaaccuauaaucaauuucuacgacccauugguuuuuccguccgaugaguucgacgcuucuauuucgcagguuaacgagaaaaucaaucagagccucgccuuuauccggaaguccgaugaacuguuacacaacguaaaugucgggaagucaacgacaaacauuaugauaaccacuaucauuaucgugauuaucguuauacugcuacuccugaucgcggugggacuuuucuuguauugcaaagcccgcugaggacuagucccuguucccagagcccacuuuuuuuucuuuuuuugaaauaaaauagccugucuuucagaucuaaaaaaaaaaaaaaaaaaaaaaaaaaaaaaaaaaaaaaaaaaaaaaaaaaaaaaaaaaaaaaaaugcaucccccccccccccccccccccccccccccccaaaggcucuuuucagagccaccagaauu

SEQ ID NO: 16552 - RNA, 1918 nt, Artificial Sequence
  mRNA product Design a-3 comprising derived and/or modified sequence from HRSV(Memphis-37)__AIY60640.1__F-del_DSCav1_mut4 (opt4)
gggagagggcgcuuggcuugcaaggacccugagcugcggcauugaagcacacccaacccaacucgacugaagucagccucacugaaccggaucugagaaucuucucucucugggcuugccagggcucuccgaaccuagcuagcauccucuucaauuccaacuagaaagcuuaccauggagcugcccauccugaagaccaacgccaucaccaccauccuggccgccgugacccugugcuucgccagcagccagaacaucaccgaggaguucuaccagagcaccugcagcgccgugagcaagggcuaccugagcgcccugagaaccggcugguacaccagcgugaucaccaucgagcugagcaacaucaaggagaacaagugcaacggcaccgacgccaaggugaagcugaucaagcaggagcuggacaaguacaagaacgccgugaccgagcugcagcugcugaugcagagcacccccgccgccggcagcggcagcgccaucugcagcggcaucgccgugugcaaggugcugcaccuggagggcgaggugaacaagaucaagaacgcccugcugagcaccaacaaggccguggugagccugagcaacggcgugagcgugcugaccuucaaggugcuggaccugaagaacuacaucgacaagcagcugcugcccauccugaacaagcagagcugcagcaucagcaacaucgagaccgugaucgaguuccagcagaagaacaacagacugcuggagaucaccagagaguucagcgugaacgccggcgugaccacccccgugagcaccuacaugcugaccaacagcgagcugcugagccugaucaacgacaugcccaucaccaacgaccagaagaagcugaugagcaacaacgugcagaucgugagacagcagagcuacagcaucaugugcaucaucaaggaggaggugcuggccuacguggugcagcugccccuguacggcgugaucgacacccccugcuggaagcugcacaccagcccccugugcaccaccaacaccaaggagggcagcaacaucugccugaccagaaccgacagaggcugguacugcgacaacgccggcagcgugagcuucuucccccaggccgagaccugcaaggugcagagcaacagaguguucugcgacaccaugaacagcagaacccugcccagcgaggugaaccugugcaacaucgacaucuucaaccccaaguacgacugcaagaucaugaccagcaagaccgacgugagcagcagcgugaucaccagccugggcgccaucgugagcugcuacggcaagaccaagugcaccgccagcaacaagaacagaggcaucaucaagaccuucagcaacggcugcgacuacgugagcaacaagggcguggacaccgugagcgugggcaacacccuguacugcgugaacaagcaggagggcaagagccuguacgugaagggcgagcccaucaucaacuucuacgacccccugguguuccccagcgacgaguucgacgccagcaucagccaggugaacgagaagaucaaccagagccuggccuucaucagaaagagcgacgagcugcugcacaacgugaacgugggcaagagcaccaccaacaucaugaucaccaccaucaucaucgugaucaucgugauccugcugcugcugaucgccgugggccuguuccuguacugcaaggccagaugaggacuagucccuguucccagagcccacuuuuuuuucuuuuuuugaaauaaaauagccugucuuucagaucuaaaaaaaaaaaaaaaaaaaaaaaaaaaaaaaaaaaaaaaaaaaaaaaaaaaaaaaaaaaaaaaaugcaucccccccccccccccccccccccccccccccaaaggcucuuuucagagccaccagaauu

SEQ ID NO: 16553 - RNA, 1918 nt, Artificial Sequence
  mRNA product Design a-3 comprising derived and/or modified sequence from HRSV(Memphis-37)__AIY60640.1__F-del_DSCav1_mut4 (opt5)
gggagagggcgcuuggcuugcaaggacccugagcugcggcauugaagcacacccaacccaacucgacugaagucagccucacugaaccggaucugagaaucuucucucucugggcuugccagggcucuccgaaccuagcuagcauccucuucaauuccaacuagaaagcuuaccauggagcugcccauccucaagaccaacgccauuacaacgauccuggcugccgugacccuuugcuucgcgagcucccagaauauuacagaagaguuuuaccaaucuaccuguagcgcugucuccaaaggcuaucugucugcccucagaacagggugguacaccagcguuaucacaauugaacuguccaacaucaaggagaauaaaugcaacggaaccgacgccaaggugaaacuuaucaagcaggaacuggauaaguauaaaaaugcugugacggagcuccagcugcugaugcagucuaccccugccgcuggcagcggguccgccauuuguagcggaaucgcggucugcaaggugcuccaccuggagggcgaaguuaacaaaauuaagaaugcccuucugucuacaaacaaagcuguggucucccucagcaauggggugucuguucugaccuucaaggugcuugaccugaagaacuacaucgauaaacaacuccugccgauucugaauaagcaguccuguagcaucucuaacauugagacagucaucgaauuucagcagaaaaauaaccggcuccuggagaucacccgcgaguucuccgugaaugccggagugacgacacccgucagcaccuauaugcuuacaaacuccgaacugcucucucugauuaacgacaugccuaucaccaaugaucaaaagaaacuuaugagcaacaauguucagauugugagacagcaguccuacagcaucaugugcauuaucaaggaggaagugcuggcuuaugucgugcaacucccccuguacggcguuaucgacaccccuuguuggaaacugcauacaucuccccucugcacgaccaacacaaaggagggcuccaauauuugucugacccggacagaucgcgggugguacugcgacaacgccggaagcgugagcuuuuucccucaggcggaaaccuguaagguccagucuaauagaguguuuugcgauacgaugaacuccagaacacugccgucugagguuaaucucugcaacaucgacauuuucaaucccaaauaugauuguaagaucaugaccagcaaaaccgacguguccagcucugucauuacaucccugggcgccaucgugagcugcuacgggaagaccaaauguacagcuucuaacaagaaucggggaaucauuaagacguuuuccaacggcugcgauuaugucagcaauaaagggguggacaccguuuccgugggaaacacacuuuacugugucaacaagcaagagggcaaaucucuguaugugaagggcgaaccuaucauuaauuucuacgacccccucguuuuuccuagcgaugaguucgacgccuccaucucucaggugaacgaaaagauuaaucagagccuggcuuuuauccgcaaguccgaugagcugcuccacaacgucaauguggggaaaagcaccacaaacauuaugaucaccacgaucauuaucgugauuaucguuauucugcuucugcucaucgccgucggacuguuccuguauugcaaagccagaugaggacuagucccuguucccagagcccacuuuuuuuucuuuuuuugaaauaaaauagccugucuuucagaucuaaaaaaaaaaaaaaaaaaaaaaaaaaaaaaaaaaaaaaaaaaaaaaaaaaaaaaaaaaaaaaaaugcaucccccccccccccccccccccccccccccccaaaggcucuuuucagagccaccagaauu

SEQ ID NO: 16554 - RNA, 1918 nt, Artificial Sequence
  mRNA product Design a-3 comprising derived and/or modified sequence from HRSV(Memphis-37)__AIY60640.1__F-del_DSCav1_mut4 (opt6)
gggagagggcgcuuggcuugcaaggacccugagcugcggcauugaagcacacccaacccaacucgacugaagucagccucacugaaccggaucugagaaucuucucucucugggcuugccagggcucuccgaaccuagcuagcauccucuucaauuccaacuagaaagcuuaccauggaacuaccaauacucaaaacaaacgcaauaacaacuauacuagccgcaguuacacucugcuucgcuucaucacaaaauaucacagaagaauuuuaccaaucuacauguucagcuguauccaaagguuaccuuucagcacuacgaacaggaugguauaccucaguaaucaccaucgaacucucgaacauaaaagaaaacaaauguaacggaaccgaugcuaaagucaagcucauaaaacaagaacuagacaaauacaaaaacgcaguaaccgaacuacaacuacuuaugcaaucaacaccagcugcaggcucaggcucagcaaucugcucaggcauagcuguaugcaaaguacuacaucuagaaggagaaguaaacaaaauaaaaaacgcauuauuaucaacaaauaaagcaguaguaucacuaucaaauggaguaucaguacucacauucaaaguacuagaucuaaaaaacuacauugacaaacaauuacuaccaauccucaacaaacaaucaugcucaauauccaacauagaaacaguaauagaauuucaacaaaaaaacaaucgacuacuagaaauaacaagagaauuuucagucaaugccggaguuacaacacccguaagcacuuacaugcuaaccaacucagaacuacuaucacuaauaaacgacaugccaauuacaaacgaccaaaaaaaacuaaugucaaauaacguacaaauaguacgucaacaaucauacucaauaaugugcauaauaaaagaagaaguccuagcauacguaguacaauuacccuuauauggcguaauagacacaccaugcuggaaacuacacacauccccacucugcaccaccaacaccaaagaaggcuccaacauaugucuaacccgaaccgacagagguugguauugugauaacgcuggcuccguaucauucuucccacaagcagaaacauguaaaguacaaucaaacagaguauucugcgauacaaugaauagcagaacacuaccaucagaaguaaacuuaugcaacaucgacaucuucaaucccaaauacgacugcaaaauaaugacauccaaaacugacguuucuucaagcguaauaacaucuuuaggagcaauaguauccugcuacggaaaaacuaaaugcacagcauccaauaaaaaccguggaauaauaaaaacauucucaaauggcugcgacuacgucucaaacaaaggcguagacaccguuagugucggaaacacacuauauugcguaaauaaacaagaaggaaaauccuuauacguaaaaggcgaaccaauaauuaacuucuaugacccccucguauuuccauccgaugaauuugacgcaucaaucucgcaaguaaacgaaaaaauaaaccaaagccuagcauucauaagaaaauccgacgaacuacuccacaauguaaauguaggaaaaucaacuaccaacauaaugauuacuacuauaauaauaguaauuauagucaucuuacuacuauuaauagcagucggauuauuccuauacugcaaagcaagauagggacuagucccuguucccagagcccacuuuuuuuucuuuuuuugaaauaaaauagccugucuuucagaucuaaaaaaaaaaaaaaaaaaaaaaaaaaaaaaaaaaaaaaaaaaaaaaaaaaaaaaaaaaaaaaaaugcaucccccccccccccccccccccccccccccccaaaggcucuuuucagagccaccagaauu

SEQ ID NO: 16555 - RNA, 1918 nt, Artificial Sequence
  mRNA product Design a-3 comprising derived and/or modified sequence from HRSV(Memphis-37)__AIY60640.1__F-del_DSCav1_mut4 (opt11)
gggagagggcgcuuggcuugcaaggacccugagcugcggcauugaagcacacccaacccaacucgacugaagucagccucacugaaccggaucugagaaucuucucucucugggcuugccagggcucuccgaaccuagcuagcauccucuucaauuccaacuagaaagcuuaccauggagcuccccauccuaaaaaccaacgccaucaccaccauccucgccgccgucacccuaugcuucgcuucaucacaaaacaucaccgaagaauuuuaccaaucuaccugcuccgccgucuccaaaggauaucucagcgcccuacggaccggcugguacaccuccgucauaaccaucgaacucaguaacaucaaagaaaacaaaugcaacggcaccgacgccaaagucaaacuaaucaaacaagaacuagauaaauacaaaaacgcggucaccgaacuacaacuccuaaugcaaagcacccccgccgccggauccggcuccgccauaugcuccggcauugcugucugcaaaguacuacaccucgagggcgaggucaacaaaaucaaaaacgcacuacucagcacuaauaaagccguaguaucccuaucaaacggugucucagucuuaacauucaaaguacucgaccuaaagaacuacaucgacaaacaacuccuacccauccucaacaagcaguccuguucuaucucaaacaucgaaaccgucaucgaauuucaacaaaagaacaaccgccuccucgaaaucacacgcgaguucuccgucaacgcaggaguaaccacccccgucuccaccuacaugcucacaaacucggaacuccucucacuaaucaacgacaugcccaucaccaacgaccaaaagaaacucaugagcaacaacguucaaaucguccgccaacaaucauacuccaucaugugcauaaucaaagaagaaguccuagcuuacgucguccagcugccccucuacggagucaucgacacgcccugcuggaaacuacacacaagcccccucugcaccaccaacaccaaagaaggcuccaacauaugccucacacggaccgaccgcgguugguacugcgacaacgccggcuccgucuccuucuucccccaagcagaaacuugcaaaguccaauccaaccgcguauucugcgacacaaugaacagcagaacacucccuagcgaagucaaccucugcaacaucgacauauucaaccccaaauacgacugcaaaaucaugacgucaaaaaccgacgucuccagcuccguuaucaccucacucggcgccaucgucagcugcuacggcaaaacuaaaugcaccgccuccaacaaaaaccgcggcaucauuaaaaccuucagcaacggcugcgacuacgucuccaacaaaggugucgauacgguauccgucggaaacacccuauacugcgucaacaaacaagaaggcaaaucucucuacgucaaaggcgaacccauaaucaauuucuacgacccccuagucuuccccuccgaugaauuugacgccuccaucagccaagucaacgagaaaaucaaccaaucacuagccuucauccggaaauccgacgaacuccuacacaacguaaacgucggcaaauccaccaccaauauaaugaucacaaccaucaucaucguaaucaucgucauccuccuccuacucaucgccgucggauuauucuuauacugcaaagcccgcuaaggacuagucccuguucccagagcccacuuuuuuuucuuuuuuugaaauaaaauagccugucuuucagaucuaaaaaaaaaaaaaaaaaaaaaaaaaaaaaaaaaaaaaaaaaaaaaaaaaaaaaaaaaaaaaaaaugcaucccccccccccccccccccccccccccccccaaaggcucuuuucagagccaccagaauu

SEQ ID NO: 16556 - RNA, 1867 nt, Artificial Sequence
  mRNA product Design a-4 comprising derived and/or modified sequence from HRSV(Memphis-37)__AIY60640.1__F-del_DSCav1_mut4 (opt1)
gggagacuccugucgggcggaaguaggaggaguagaguuuaaaaacaguacucuuuuuccgguucgggacguaguugaagcaacgacaagccggauaaccgcucuugagacaggaagcuuaccauggagcugcccauccucaagaccaacgccaucaccacgauccuggccgcggugacccugugcuucgccagcucccagaacaucaccgaggaguucuaccagagcacgugcuccgccgucagcaagggcuaccucuccgcccugcgcaccgggugguacaccagcgugaucaccaucgagcuguccaacaucaaggagaacaagugcaacggcaccgacgccaaggugaagcucaucaagcaggagcuggacaaguacaagaacgcggucacggagcugcagcuccugaugcagagcaccccggccgccggcuccgggagcgcgaucugcuccggcaucgccgucugcaaggugcugcaccucgagggcgaggugaacaagaucaagaacgcccugcuguccaccaacaaggccgucgugagccucuccaacggggugagcguccugaccuucaaggugcuggaccucaagaacuacaucgacaagcagcugcugcccauccugaacaagcagagcugcuccaucagcaacaucgagaccgucaucgaguuccagcagaagaacaaccgccuccuggagaucacgcgggaguucagcgugaacgcgggcgugaccacccccgucuccaccuacaugcugacgaacagcgagcuccugucccugaucaacgacaugccgaucaccaacgaccagaagaagcucaugagcaacaacgugcagaucgugcgccagcaguccuacagcaucaugugcaucaucaaggaggagguccuggccuacguggugcagcugccccucuacggggucaucgacacccccugcuggaagcugcacaccagcccccugugcacgaccaacaccaaggagggcuccaacaucugccucacccggacggaccgcgggugguacugcgacaacgccggcagcguguccuucuucccgcaggccgagaccugcaagguccagagcaaccggguguucugcgacaccaugaacucccggacccugcccagcgaggugaaccucugcaacaucgacaucuucaaccccaaguacgacugcaagaucaugacguccaagaccgacgucagcuccagcgugaucaccucccugggcgccaucgugagcugcuacgggaagaccaagugcacggcgagcaacaagaaccgcggcaucaucaagaccuucuccaacgggugcgacuacgucagcaacaagggcguggacaccguguccgucggcaacacccuguacugcgugaacaagcaggagggcaagagccucuacgugaagggggagcccaucaucaacuucuacgacccgcuggucuuccccuccgacgaguucgacgccagcaucucccaggugaacgagaagaucaaccagagccuggccuucauccggaaguccgacgagcuccugcacaacgugaacgucggcaagagcaccacgaacaucaugaucaccaccaucaucaucgugaucaucgugauccugcugcuccugaucgccgucgggcuguuccucuacugcaaggcccgcugaggacuagucccuguucccagagcccacuuuuuuuucuuuuuuugaaauaaaauagccugucuuucagaucuaaaaaaaaaaaaaaaaaaaaaaaaaaaaaaaaaaaaaaaaaaaaaaaaaaaaaaaaaaaaaaaaugcaucccccccccccccccccccccccccccccccaaaggcucuuuucagagccaccagaauu

SEQ ID NO: 16557 - RNA, 1867 nt, Artificial Sequence
  mRNA product Design a-4 comprising derived and/or modified sequence from HRSV(Memphis-37)__AIY60640.1__F-del_DSCav1_mut4 (opt1)
gggagacuccugucgggcggaaguaggaggaguagaguuuaaaaacaguacucuuuuuccgguucgggacguaguugaagcaacgacaagccggauaaccgcucuugagacaggaagcuuaccauggagcugcccauccucaagaccaacgccaucaccacgauccuggccgcggugacccugugcuucgccagcucccagaacaucaccgaggaguucuaccagagcacgugcuccgccgucagcaagggcuaccucuccgcccugcgcaccgggugguacaccagcgugaucaccaucgagcuguccaacaucaaggagaacaagugcaacggcaccgacgccaaggugaagcucaucaagcaggagcuggacaaguacaagaacgcggucacggagcugcagcuccugaugcagagcaccccggccgccggguccggcagcgccaucugcuccgggaucgcggugugcaaggugcugcaccucgagggcgaggucaacaagaucaagaacgcccugcugagcaccaacaaggccguggugucccucagcaacggcgucuccgugcugaccuucaaggugcuggaccucaagaacuacaucgacaagcagcugcugcccauccucaacaagcagagcugcuccaucagcaacaucgagacggucaucgaguuccagcagaagaacaaccggcugcuggagaucacccgcgaguucuccgugaacgccggggugaccacccccgucagcacguacaugcucaccaacagcgagcugcugucccucaucaacgacaugcccaucaccaacgaccagaagaagcugaugagcaacaacgugcagaucgugcggcagcaguccuacagcaucaugugcaucaucaaggaggagguccuggccuacguggugcagcucccgcuguacggcgucaucgacacccccugcuggaagcugcacacgagcccccucugcaccaccaacaccaaggagggguccaacaucugccugacgcgcaccgaccggggcugguacugcgacaacgcgggguccgugagcuucuucccccaggccgagaccugcaaggugcaguccaaccgcgucuucugcgacaccaugaacagccggacgcucccguccgaggugaaccugugcaacaucgacaucuucaaccccaaguacgacugcaagaucaugaccagcaagaccgacgucuccagcuccgugaucaccagccugggcgccaucguguccugcuacggcaagacgaagugcaccgccagcaacaagaaccgggggaucaucaagaccuucuccaacggcugcgacuacgucagcaacaaggggguggacaccgugagcgucggcaacacgcucuacugcgugaacaagcaggagggcaagucccuguacgugaagggggagcccaucaucaacuucuacgacccccuggucuucccgagcgacgaguucgacgccuccaucagccaggugaacgagaagaucaaccagucccucgcguucauccgcaagagcgacgagcugcugcacaacgugaacgucggcaaguccaccaccaacaucaugaucaccaccaucaucaucgugaucaucgugauccuccugcugcucaucgccgucgggcuguuccuguacugcaaggcccggugaggacuagucccuguucccagagcccacuuuuuuuucuuuuuuugaaauaaaauagccugucuuucagaucuaaaaaaaaaaaaaaaaaaaaaaaaaaaaaaaaaaaaaaaaaaaaaaaaaaaaaaaaaaaaaaaaugcaucccccccccccccccccccccccccccccccaaaggcucuuuucagagccaccagaauu

SEQ ID NO: 16558 - RNA, 1867 nt, Artificial Sequence
  mRNA product Design a-4 comprising derived and/or modified sequence from HRSV(Memphis-37)__AIY60640.1__F-del_DSCav1_mut4 (opt2)
gggagacuccugucgggcggaaguaggaggaguagaguuuaaaaacaguacucuuuuuccgguucgggacguaguugaagcaacgacaagccggauaaccgcucuugagacaggaagcuuaccauggagcuccccauccucaagaccaacgccaucaccaccauccucgccgccgucacccucugcuucgccuccucccagaacaucaccgaggaguucuaccaguccaccugcuccgccgucuccaagggcuaccucuccgcccuccgcaccggcugguacaccuccgucaucaccaucgagcucuccaacaucaaggagaacaagugcaacggcaccgacgccaaggucaagcucaucaagcaggagcucgacaaguacaagaacgccgucaccgagcuccagcuccucaugcaguccacccccgccgccggcuccggcuccgccaucugcuccggcaucgccgucugcaagguccuccaccucgagggcgaggucaacaagaucaagaacgcccuccucuccaccaacaaggccgucgucucccucuccaacggcgucuccguccucaccuucaagguccucgaccucaagaacuacaucgacaagcagcuccuccccauccucaacaagcaguccugcuccaucuccaacaucgagaccgucaucgaguuccagcagaagaacaaccgccuccucgagaucacccgcgaguucuccgucaacgccggcgucaccacccccgucuccaccuacaugcucaccaacuccgagcuccucucccucaucaacgacaugcccaucaccaacgaccagaagaagcucauguccaacaacguccagaucguccgccagcaguccuacuccaucaugugcaucaucaaggaggagguccucgccuacgucguccagcucccccucuacggcgucaucgacacccccugcuggaagcuccacaccuccccccucugcaccaccaacaccaaggagggcuccaacaucugccucacccgcaccgaccgcggcugguacugcgacaacgccggcuccgucuccuucuucccccaggccgagaccugcaagguccaguccaaccgcgucuucugcgacaccaugaacucccgcacccuccccuccgaggucaaccucugcaacaucgacaucuucaaccccaaguacgacugcaagaucaugaccuccaagaccgacgucuccuccuccgucaucaccucccucggcgccaucgucuccugcuacggcaagaccaagugcaccgccuccaacaagaaccgcggcaucaucaagaccuucuccaacggcugcgacuacgucuccaacaagggcgucgacaccgucuccgucggcaacacccucuacugcgucaacaagcaggagggcaagucccucuacgucaagggcgagcccaucaucaacuucuacgacccccucgucuuccccuccgacgaguucgacgccuccaucucccaggucaacgagaagaucaaccagucccucgccuucauccgcaaguccgacgagcuccuccacaacgucaacgucggcaaguccaccaccaacaucaugaucaccaccaucaucaucgucaucaucgucauccuccuccuccucaucgccgucggccucuuccucuacugcaaggcccgcugaggacuagucccuguucccagagcccacuuuuuuuucuuuuuuugaaauaaaauagccugucuuucagaucuaaaaaaaaaaaaaaaaaaaaaaaaaaaaaaaaaaaaaaaaaaaaaaaaaaaaaaaaaaaaaaaaugcaucccccccccccccccccccccccccccccccaaaggcucuuuucagagccaccagaauu

SEQ ID NO: 16559 - RNA, 1867 nt, Artificial Sequence
  mRNA product Design a-4 comprising derived and/or modified sequence from HRSV(Memphis-37)__AIY60640.1__F-del_DSCav1_mut4 (opt3)
gggagacuccugucgggcggaaguaggaggaguagaguuuaaaaacaguacucuuuuuccgguucgggacguaguugaagcaacgacaagccggauaaccgcucuugagacaggaagcuuaccauggagcugcccauccucaagaccaacgccauuacaacuauacuugcugcagugacgcugugcuucgccagcucccagaauaucaccgaagaguuuuaccaaucuacauguucagcggucaguaaaggcuauuugagcgcuuuaagaacugggugguacaccuccguuauuacaaucgaacugucuaacauuaaggagaauaaaugcaacggaaccgacgccaaggugaaacuaaucaagcaggaacucgauaaguauaaaaaugcaguaacugagcugcagcuucugaugcagucgaccccugccgcugguucaggcagcgcaauauguagugggaucgccgugugcaaggucuugcaccucgagggagaagugaacaaaauuaagaaugcucugcuguccacaaacaaagccguugugucucucagcaauggcgucuccguguuaacguucaagguacuggaccuuaagaacuacaucgauaaacaauugcugccaauucuaaauaagcagucauguaguaucagcaacauagagacuguuauugaauuucagcagaaaaauaacaggcuccuggagaucacccgggaguucucugugaaugcgggugucacaacuccgguguccaccuauaugcuuacaaacucagaacuguugagccucauuaacgacaugcccaucaccaaugaucaaaagaaacugaugaguaacaaugugcagaucguccgccagcagucuuacuccauuaugugcauaaucaaggaggaaguuuuagcauaugugguacaacugccucucuacggggugauugacacgccauguuggaaacuucauacuagcccccugugcacaaccaacacuaaggagggaucgaauaucuguuugacacgaaccgaucguggcugguacugcgacaacgccggcucugucuccuuuuucccucaggcugaaacguguaaggugcagucaaauagaguguuuugcgauaccaugaacaguagaacacugccaagcgaggugaaucucugcaacauagacauuuucaaucccaaauaugauuguaagaucaugacuuccaaaaccgacgucucuagcucagugaucacaagucugggggccauuguauccugcuacggaaagacuaaauguaccgcaagcaacaagaauagggguaucauuaagacauuuucuaacggcugcgauuauguuucaaauaaagggguggacaccgucagugugggaaacacucuuuacugugucaacaagcaagagggcaaaagccuguaugugaagggugaaccuauaaucaauuucuacgacccauugguuuuuccguccgaugaguucgacgcuucuauuucgcagguuaacgagaaaaucaaucagagccucgccuuuauccggaaguccgaugaacuguuacacaacguaaaugucgggaagucaacgacaaacauuaugauaaccacuaucauuaucgugauuaucguuauacugcuacuccugaucgcggugggacuuuucuuguauugcaaagcccgcugaggacuagucccuguucccagagcccacuuuuuuuucuuuuuuugaaauaaaauagccugucuuucagaucuaaaaaaaaaaaaaaaaaaaaaaaaaaaaaaaaaaaaaaaaaaaaaaaaaaaaaaaaaaaaaaaaugcaucccccccccccccccccccccccccccccccaaaggcucuuuucagagccaccagaauu

SEQ ID NO: 16560 - RNA, 1867 nt, Artificial Sequence
  mRNA product Design a-4 comprising derived and/or modified sequence from HRSV(Memphis-37)__AIY60640.1__F-del_DSCav1_mut4 (opt4)
gggagacuccugucgggcggaaguaggaggaguagaguuuaaaaacaguacucuuuuuccgguucgggacguaguugaagcaacgacaagccggauaaccgcucuugagacaggaagcuuaccauggagcugcccauccugaagaccaacgccaucaccaccauccuggccgccgugacccugugcuucgccagcagccagaacaucaccgaggaguucuaccagagcaccugcagcgccgugagcaagggcuaccugagcgcccugagaaccggcugguacaccagcgugaucaccaucgagcugagcaacaucaaggagaacaagugcaacggcaccgacgccaaggugaagcugaucaagcaggagcuggacaaguacaagaacgccgugaccgagcugcagcugcugaugcagagcacccccgccgccggcagcggcagcgccaucugcagcggcaucgccgugugcaaggugcugcaccuggagggcgaggugaacaagaucaagaacgcccugcugagcaccaacaaggccguggugagccugagcaacggcgugagcgugcugaccuucaaggugcuggaccugaagaacuacaucgacaagcagcugcugcccauccugaacaagcagagcugcagcaucagcaacaucgagaccgugaucgaguuccagcagaagaacaacagacugcuggagaucaccagagaguucagcgugaacgccggcgugaccacccccgugagcaccuacaugcugaccaacagcgagcugcugagccugaucaacgacaugcccaucaccaacgaccagaagaagcugaugagcaacaacgugcagaucgugagacagcagagcuacagcaucaugugcaucaucaaggaggaggugcuggccuacguggugcagcugccccuguacggcgugaucgacacccccugcuggaagcugcacaccagcccccugugcaccaccaacaccaaggagggcagcaacaucugccugaccagaaccgacagaggcugguacugcgacaacgccggcagcgugagcuucuucccccaggccgagaccugcaaggugcagagcaacagaguguucugcgacaccaugaacagcagaacccugcccagcgaggugaaccugugcaacaucgacaucuucaaccccaaguacgacugcaagaucaugaccagcaagaccgacgugagcagcagcgugaucaccagccugggcgccaucgugagcugcuacggcaagaccaagugcaccgccagcaacaagaacagaggcaucaucaagaccuucagcaacggcugcgacuacgugagcaacaagggcguggacaccgugagcgugggcaacacccuguacugcgugaacaagcaggagggcaagagccuguacgugaagggcgagcccaucaucaacuucuacgacccccugguguuccccagcgacgaguucgacgccagcaucagccaggugaacgagaagaucaaccagagccuggccuucaucagaaagagcgacgagcugcugcacaacgugaacgugggcaagagcaccaccaacaucaugaucaccaccaucaucaucgugaucaucgugauccugcugcugcugaucgccgugggccuguuccuguacugcaaggccagaugaggacuagucccuguucccagagcccacuuuuuuuucuuuuuuugaaauaaaauagccugucuuucagaucuaaaaaaaaaaaaaaaaaaaaaaaaaaaaaaaaaaaaaaaaaaaaaaaaaaaaaaaaaaaaaaaaugcaucccccccccccccccccccccccccccccccaaaggcucuuuucagagccaccagaauu

SEQ ID NO: 16561 - RNA, 1867 nt, Artificial Sequence
  mRNA product Design a-4 comprising derived and/or modified sequence from HRSV(Memphis-37)__AIY60640.1__F-del_DSCav1_mut4 (opt5)
gggagacuccugucgggcggaaguaggaggaguagaguuuaaaaacaguacucuuuuuccgguucgggacguaguugaagcaacgacaagccggauaaccgcucuugagacaggaagcuuaccauggagcugcccauccucaagaccaacgccauuacaacgauccuggcugccgugacccuuugcuucgcgagcucccagaauauuacagaagaguuuuaccaaucuaccuguagcgcugucuccaaaggcuaucugucugcccucagaacagggugguacaccagcguuaucacaauugaacuguccaacaucaaggagaauaaaugcaacggaaccgacgccaaggugaaacuuaucaagcaggaacuggauaaguauaaaaaugcugugacggagcuccagcugcugaugcagucuaccccugccgcuggcagcggguccgccauuuguagcggaaucgcggucugcaaggugcuccaccuggagggcgaaguuaacaaaauuaagaaugcccuucugucuacaaacaaagcuguggucucccucagcaauggggugucuguucugaccuucaaggugcuugaccugaagaacuacaucgauaaacaacuccugccgauucugaauaagcaguccuguagcaucucuaacauugagacagucaucgaauuucagcagaaaaauaaccggcuccuggagaucacccgcgaguucuccgugaaugccggagugacgacacccgucagcaccuauaugcuuacaaacuccgaacugcucucucugauuaacgacaugccuaucaccaaugaucaaaagaaacuuaugagcaacaauguucagauugugagacagcaguccuacagcaucaugugcauuaucaaggaggaagugcuggcuuaugucgugcaacucccccuguacggcguuaucgacaccccuuguuggaaacugcauacaucuccccucugcacgaccaacacaaaggagggcuccaauauuugucugacccggacagaucgcgggugguacugcgacaacgccggaagcgugagcuuuuucccucaggcggaaaccuguaagguccagucuaauagaguguuuugcgauacgaugaacuccagaacacugccgucugagguuaaucucugcaacaucgacauuuucaaucccaaauaugauuguaagaucaugaccagcaaaaccgacguguccagcucugucauuacaucccugggcgccaucgugagcugcuacgggaagaccaaauguacagcuucuaacaagaaucggggaaucauuaagacguuuuccaacggcugcgauuaugucagcaauaaagggguggacaccguuuccgugggaaacacacuuuacugugucaacaagcaagagggcaaaucucuguaugugaagggcgaaccuaucauuaauuucuacgacccccucguuuuuccuagcgaugaguucgacgccuccaucucucaggugaacgaaaagauuaaucagagccuggcuuuuauccgcaaguccgaugagcugcuccacaacgucaauguggggaaaagcaccacaaacauuaugaucaccacgaucauuaucgugauuaucguuauucugcuucugcucaucgccgucggacuguuccuguauugcaaagccagaugaggacuagucccuguucccagagcccacuuuuuuuucuuuuuuugaaauaaaauagccugucuuucagaucuaaaaaaaaaaaaaaaaaaaaaaaaaaaaaaaaaaaaaaaaaaaaaaaaaaaaaaaaaaaaaaaaugcaucccccccccccccccccccccccccccccccaaaggcucuuuucagagccaccagaauu

SEQ ID NO: 16562 - RNA, 1867 nt, Artificial Sequence
  mRNA product Design a-4 comprising derived and/or modified sequence from HRSV(Memphis-37)__AIY60640.1__F-del_DSCav1_mut4 (opt6)
gggagacuccugucgggcggaaguaggaggaguagaguuuaaaaacaguacucuuuuuccgguucgggacguaguugaagcaacgacaagccggauaaccgcucuugagacaggaagcuuaccauggaacuaccaauacucaaaacaaacgcaauaacaacuauacuagccgcaguuacacucugcuucgcuucaucacaaaauaucacagaagaauuuuaccaaucuacauguucagcuguauccaaagguuaccuuucagcacuacgaacaggaugguauaccucaguaaucaccaucgaacucucgaacauaaaagaaaacaaauguaacggaaccgaugcuaaagucaagcucauaaaacaagaacuagacaaauacaaaaacgcaguaaccgaacuacaacuacuuaugcaaucaacaccagcugcaggcucaggcucagcaaucugcucaggcauagcuguaugcaaaguacuacaucuagaaggagaaguaaacaaaauaaaaaacgcauuauuaucaacaaauaaagcaguaguaucacuaucaaauggaguaucaguacucacauucaaaguacuagaucuaaaaaacuacauugacaaacaauuacuaccaauccucaacaaacaaucaugcucaauauccaacauagaaacaguaauagaauuucaacaaaaaaacaaucgacuacuagaaauaacaagagaauuuucagucaaugccggaguuacaacacccguaagcacuuacaugcuaaccaacucagaacuacuaucacuaauaaacgacaugccaauuacaaacgaccaaaaaaaacuaaugucaaauaacguacaaauaguacgucaacaaucauacucaauaaugugcauaauaaaagaagaaguccuagcauacguaguacaauuacccuuauauggcguaauagacacaccaugcuggaaacuacacacauccccacucugcaccaccaacaccaaagaaggcuccaacauaugucuaacccgaaccgacagagguugguauugugauaacgcuggcuccguaucauucuucccacaagcagaaacauguaaaguacaaucaaacagaguauucugcgauacaaugaauagcagaacacuaccaucagaaguaaacuuaugcaacaucgacaucuucaaucccaaauacgacugcaaaauaaugacauccaaaacugacguuucuucaagcguaauaacaucuuuaggagcaauaguauccugcuacggaaaaacuaaaugcacagcauccaauaaaaaccguggaauaauaaaaacauucucaaauggcugcgacuacgucucaaacaaaggcguagacaccguuagugucggaaacacacuauauugcguaaauaaacaagaaggaaaauccuuauacguaaaaggcgaaccaauaauuaacuucuaugacccccucguauuuccauccgaugaauuugacgcaucaaucucgcaaguaaacgaaaaaauaaaccaaagccuagcauucauaagaaaauccgacgaacuacuccacaauguaaauguaggaaaaucaacuaccaacauaaugauuacuacuauaauaauaguaauuauagucaucuuacuacuauuaauagcagucggauuauuccuauacugcaaagcaagauagggacuagucccuguucccagagcccacuuuuuuuucuuuuuuugaaauaaaauagccugucuuucagaucuaaaaaaaaaaaaaaaaaaaaaaaaaaaaaaaaaaaaaaaaaaaaaaaaaaaaaaaaaaaaaaaaugcaucccccccccccccccccccccccccccccccaaaggcucuuuucagagccaccagaauu

SEQ ID NO: 16563 - RNA, 1867 nt, Artificial Sequence
  mRNA product Design a-4 comprising derived and/or modified sequence from HRSV(Memphis-37)__AIY60640.1__F-del_DSCav1_mut4 (opt11)
gggagacuccugucgggcggaaguaggaggaguagaguuuaaaaacaguacucuuuuuccgguucgggacguaguugaagcaacgacaagccggauaaccgcucuugagacaggaagcuuaccauggagcuccccauccuaaaaaccaacgccaucaccaccauccucgccgccgucacccuaugcuucgcuucaucacaaaacaucaccgaagaauuuuaccaaucuaccugcuccgccgucuccaaaggauaucucagcgcccuacggaccggcugguacaccuccgucauaaccaucgaacucaguaacaucaaagaaaacaaaugcaacggcaccgacgccaaagucaaacuaaucaaacaagaacuagauaaauacaaaaacgcggucaccgaacuacaacuccuaaugcaaagcacccccgccgccggauccggcuccgccauaugcuccggcauugcugucugcaaaguacuacaccucgagggcgaggucaacaaaaucaaaaacgcacuacucagcacuaauaaagccguaguaucccuaucaaacggugucucagucuuaacauucaaaguacucgaccuaaagaacuacaucgacaaacaacuccuacccauccucaacaagcaguccuguucuaucucaaacaucgaaaccgucaucgaauuucaacaaaagaacaaccgccuccucgaaaucacacgcgaguucuccgucaacgcaggaguaaccacccccgucuccaccuacaugcucacaaacucggaacuccucucacuaaucaacgacaugcccaucaccaacgaccaaaagaaacucaugagcaacaacguucaaaucguccgccaacaaucauacuccaucaugugcauaaucaaagaagaaguccuagcuuacgucguccagcugccccucuacggagucaucgacacgcccugcuggaaacuacacacaagcccccucugcaccaccaacaccaaagaaggcuccaacauaugccucacacggaccgaccgcgguugguacugcgacaacgccggcuccgucuccuucuucccccaagcagaaacuugcaaaguccaauccaaccgcguauucugcgacacaaugaacagcagaacacucccuagcgaagucaaccucugcaacaucgacauauucaaccccaaauacgacugcaaaaucaugacgucaaaaaccgacgucuccagcuccguuaucaccucacucggcgccaucgucagcugcuacggcaaaacuaaaugcaccgccuccaacaaaaaccgcggcaucauuaaaaccuucagcaacggcugcgacuacgucuccaacaaaggugucgauacgguauccgucggaaacacccuauacugcgucaacaaacaagaaggcaaaucucucuacgucaaaggcgaacccauaaucaauuucuacgacccccuagucuuccccuccgaugaauuugacgccuccaucagccaagucaacgagaaaaucaaccaaucacuagccuucauccggaaauccgacgaacuccuacacaacguaaacgucggcaaauccaccaccaauauaaugaucacaaccaucaucaucguaaucaucgucauccuccuccuacucaucgccgucggauuauucuuauacugcaaagcccgcuaaggacuagucccuguucccagagcccacuuuuuuuucuuuuuuugaaauaaaauagccugucuuucagaucuaaaaaaaaaaaaaaaaaaaaaaaaaaaaaaaaaaaaaaaaaaaaaaaaaaaaaaaaaaaaaaaaugcaucccccccccccccccccccccccccccccccaaaggcucuuuucagagccaccagaauu

SEQ ID NO: 16564 - RNA, 1813 nt, Artificial Sequence
  mRNA product Design a-5 comprising derived and/or modified sequence from HRSV(Memphis-37)__AIY60640.1__F-del_DSCav1_mut4 (opt1)
gggagacuuucccauucuguagcagaauuugguguugccuguggucuuggucccgcggagaagcuuaccauggagcugcccauccucaagaccaacgccaucaccacgauccuggccgcggugacccugugcuucgccagcucccagaacaucaccgaggaguucuaccagagcacgugcuccgccgucagcaagggcuaccucuccgcccugcgcaccgggugguacaccagcgugaucaccaucgagcuguccaacaucaaggagaacaagugcaacggcaccgacgccaaggugaagcucaucaagcaggagcuggacaaguacaagaacgcggucacggagcugcagcuccugaugcagagcaccccggccgccggcuccgggagcgcgaucugcuccggcaucgccgucugcaaggugcugcaccucgagggcgaggugaacaagaucaagaacgcccugcuguccaccaacaaggccgucgugagccucuccaacggggugagcguccugaccuucaaggugcuggaccucaagaacuacaucgacaagcagcugcugcccauccugaacaagcagagcugcuccaucagcaacaucgagaccgucaucgaguuccagcagaagaacaaccgccuccuggagaucacgcgggaguucagcgugaacgcgggcgugaccacccccgucuccaccuacaugcugacgaacagcgagcuccugucccugaucaacgacaugccgaucaccaacgaccagaagaagcucaugagcaacaacgugcagaucgugcgccagcaguccuacagcaucaugugcaucaucaaggaggagguccuggccuacguggugcagcugccccucuacggggucaucgacacccccugcuggaagcugcacaccagcccccugugcacgaccaacaccaaggagggcuccaacaucugccucacccggacggaccgcgggugguacugcgacaacgccggcagcguguccuucuucccgcaggccgagaccugcaagguccagagcaaccggguguucugcgacaccaugaacucccggacccugcccagcgaggugaaccucugcaacaucgacaucuucaaccccaaguacgacugcaagaucaugacguccaagaccgacgucagcuccagcgugaucaccucccugggcgccaucgugagcugcuacgggaagaccaagugcacggcgagcaacaagaaccgcggcaucaucaagaccuucuccaacgggugcgacuacgucagcaacaagggcguggacaccguguccgucggcaacacccuguacugcgugaacaagcaggagggcaagagccucuacgugaagggggagcccaucaucaacuucuacgacccgcuggucuuccccuccgacgaguucgacgccagcaucucccaggugaacgagaagaucaaccagagccuggccuucauccggaaguccgacgagcuccugcacaacgugaacgucggcaagagcaccacgaacaucaugaucaccaccaucaucaucgugaucaucgugauccugcugcuccugaucgccgucgggcuguuccucuacugcaaggcccgcugaggacuagucccuguucccagagcccacuuuuuuuucuuuuuuugaaauaaaauagccugucuuucagaucuaaaaaaaaaaaaaaaaaaaaaaaaaaaaaaaaaaaaaaaaaaaaaaaaaaaaaaaaaaaaaaaaugcaucccccccccccccccccccccccccccccccaaaggcucuuuucagagccaccagaauu

SEQ ID NO: 16565 - RNA, 1813 nt, Artificial Sequence
  mRNA product Design a-5 comprising derived and/or modified sequence from HRSV(Memphis-37)__AIY60640.1__F-del_DSCav1_mut4 (opt1)
gggagacuuucccauucuguagcagaauuugguguugccuguggucuuggucccgcggagaagcuuaccauggagcugcccauccucaagaccaacgccaucaccacgauccuggccgcggugacccugugcuucgccagcucccagaacaucaccgaggaguucuaccagagcacgugcuccgccgucagcaagggcuaccucuccgcccugcgcaccgggugguacaccagcgugaucaccaucgagcuguccaacaucaaggagaacaagugcaacggcaccgacgccaaggugaagcucaucaagcaggagcuggacaaguacaagaacgcggucacggagcugcagcuccugaugcagagcaccccggccgccggguccggcagcgccaucugcuccgggaucgcggugugcaaggugcugcaccucgagggcgaggucaacaagaucaagaacgcccugcugagcaccaacaaggccguggugucccucagcaacggcgucuccgugcugaccuucaaggugcuggaccucaagaacuacaucgacaagcagcugcugcccauccucaacaagcagagcugcuccaucagcaacaucgagacggucaucgaguuccagcagaagaacaaccggcugcuggagaucacccgcgaguucuccgugaacgccggggugaccacccccgucagcacguacaugcucaccaacagcgagcugcugucccucaucaacgacaugcccaucaccaacgaccagaagaagcugaugagcaacaacgugcagaucgugcggcagcaguccuacagcaucaugugcaucaucaaggaggagguccuggccuacguggugcagcucccgcuguacggcgucaucgacacccccugcuggaagcugcacacgagcccccucugcaccaccaacaccaaggagggguccaacaucugccugacgcgcaccgaccggggcugguacugcgacaacgcgggguccgugagcuucuucccccaggccgagaccugcaaggugcaguccaaccgcgucuucugcgacaccaugaacagccggacgcucccguccgaggugaaccugugcaacaucgacaucuucaaccccaaguacgacugcaagaucaugaccagcaagaccgacgucuccagcuccgugaucaccagccugggcgccaucguguccugcuacggcaagacgaagugcaccgccagcaacaagaaccgggggaucaucaagaccuucuccaacggcugcgacuacgucagcaacaaggggguggacaccgugagcgucggcaacacgcucuacugcgugaacaagcaggagggcaagucccuguacgugaagggggagcccaucaucaacuucuacgacccccuggucuucccgagcgacgaguucgacgccuccaucagccaggugaacgagaagaucaaccagucccucgcguucauccgcaagagcgacgagcugcugcacaacgugaacgucggcaaguccaccaccaacaucaugaucaccaccaucaucaucgugaucaucgugauccuccugcugcucaucgccgucgggcuguuccuguacugcaaggcccggugaggacuagucccuguucccagagcccacuuuuuuuucuuuuuuugaaauaaaauagccugucuuucagaucuaaaaaaaaaaaaaaaaaaaaaaaaaaaaaaaaaaaaaaaaaaaaaaaaaaaaaaaaaaaaaaaaugcaucccccccccccccccccccccccccccccccaaaggcucuuuucagagccaccagaauu

SEQ ID NO: 16566 - RNA, 1813 nt, Artificial Sequence
  mRNA product Design a-5 comprising derived and/or modified sequence from HRSV(Memphis-37)__AIY60640.1__F-del_DSCav1_mut4 (opt2)
gggagacuuucccauucuguagcagaauuugguguugccuguggucuuggucccgcggagaagcuuaccauggagcuccccauccucaagaccaacgccaucaccaccauccucgccgccgucacccucugcuucgccuccucccagaacaucaccgaggaguucuaccaguccaccugcuccgccgucuccaagggcuaccucuccgcccuccgcaccggcugguacaccuccgucaucaccaucgagcucuccaacaucaaggagaacaagugcaacggcaccgacgccaaggucaagcucaucaagcaggagcucgacaaguacaagaacgccgucaccgagcuccagcuccucaugcaguccacccccgccgccggcuccggcuccgccaucugcuccggcaucgccgucugcaagguccuccaccucgagggcgaggucaacaagaucaagaacgcccuccucuccaccaacaaggccgucgucucccucuccaacggcgucuccguccucaccuucaagguccucgaccucaagaacuacaucgacaagcagcuccuccccauccucaacaagcaguccugcuccaucuccaacaucgagaccgucaucgaguuccagcagaagaacaaccgccuccucgagaucacccgcgaguucuccgucaacgccggcgucaccacccccgucuccaccuacaugcucaccaacuccgagcuccucucccucaucaacgacaugcccaucaccaacgaccagaagaagcucauguccaacaacguccagaucguccgccagcaguccuacuccaucaugugcaucaucaaggaggagguccucgccuacgucguccagcucccccucuacggcgucaucgacacccccugcuggaagcuccacaccuccccccucugcaccaccaacaccaaggagggcuccaacaucugccucacccgcaccgaccgcggcugguacugcgacaacgccggcuccgucuccuucuucccccaggccgagaccugcaagguccaguccaaccgcgucuucugcgacaccaugaacucccgcacccuccccuccgaggucaaccucugcaacaucgacaucuucaaccccaaguacgacugcaagaucaugaccuccaagaccgacgucuccuccuccgucaucaccucccucggcgccaucgucuccugcuacggcaagaccaagugcaccgccuccaacaagaaccgcggcaucaucaagaccuucuccaacggcugcgacuacgucuccaacaagggcgucgacaccgucuccgucggcaacacccucuacugcgucaacaagcaggagggcaagucccucuacgucaagggcgagcccaucaucaacuucuacgacccccucgucuuccccuccgacgaguucgacgccuccaucucccaggucaacgagaagaucaaccagucccucgccuucauccgcaaguccgacgagcuccuccacaacgucaacgucggcaaguccaccaccaacaucaugaucaccaccaucaucaucgucaucaucgucauccuccuccuccucaucgccgucggccucuuccucuacugcaaggcccgcugaggacuagucccuguucccagagcccacuuuuuuuucuuuuuuugaaauaaaauagccugucuuucagaucuaaaaaaaaaaaaaaaaaaaaaaaaaaaaaaaaaaaaaaaaaaaaaaaaaaaaaaaaaaaaaaaaugcaucccccccccccccccccccccccccccccccaaaggcucuuuucagagccaccagaauu

SEQ ID NO: 16567 - RNA, 1813 nt, Artificial Sequence
  mRNA product Design a-5 comprising derived and/or modified sequence from HRSV(Memphis-37)__AIY60640.1__F-del_DSCav1_mut4 (opt3)
gggagacuuucccauucuguagcagaauuugguguugccuguggucuuggucccgcggagaagcuuaccauggagcugcccauccucaagaccaacgccauuacaacuauacuugcugcagugacgcugugcuucgccagcucccagaauaucaccgaagaguuuuaccaaucuacauguucagcggucaguaaaggcuauuugagcgcuuuaagaacugggugguacaccuccguuauuacaaucgaacugucuaacauuaaggagaauaaaugcaacggaaccgacgccaaggugaaacuaaucaagcaggaacucgauaaguauaaaaaugcaguaacugagcugcagcuucugaugcagucgaccccugccgcugguucaggcagcgcaauauguagugggaucgccgugugcaaggucuugcaccucgagggagaagugaacaaaauuaagaaugcucugcuguccacaaacaaagccguugugucucucagcaauggcgucuccguguuaacguucaagguacuggaccuuaagaacuacaucgauaaacaauugcugccaauucuaaauaagcagucauguaguaucagcaacauagagacuguuauugaauuucagcagaaaaauaacaggcuccuggagaucacccgggaguucucugugaaugcgggugucacaacuccgguguccaccuauaugcuuacaaacucagaacuguugagccucauuaacgacaugcccaucaccaaugaucaaaagaaacugaugaguaacaaugugcagaucguccgccagcagucuuacuccauuaugugcauaaucaaggaggaaguuuuagcauaugugguacaacugccucucuacggggugauugacacgccauguuggaaacuucauacuagcccccugugcacaaccaacacuaaggagggaucgaauaucuguuugacacgaaccgaucguggcugguacugcgacaacgccggcucugucuccuuuuucccucaggcugaaacguguaaggugcagucaaauagaguguuuugcgauaccaugaacaguagaacacugccaagcgaggugaaucucugcaacauagacauuuucaaucccaaauaugauuguaagaucaugacuuccaaaaccgacgucucuagcucagugaucacaagucugggggccauuguauccugcuacggaaagacuaaauguaccgcaagcaacaagaauagggguaucauuaagacauuuucuaacggcugcgauuauguuucaaauaaagggguggacaccgucagugugggaaacacucuuuacugugucaacaagcaagagggcaaaagccuguaugugaagggugaaccuauaaucaauuucuacgacccauugguuuuuccguccgaugaguucgacgcuucuauuucgcagguuaacgagaaaaucaaucagagccucgccuuuauccggaaguccgaugaacuguuacacaacguaaaugucgggaagucaacgacaaacauuaugauaaccacuaucauuaucgugauuaucguuauacugcuacuccugaucgcggugggacuuuucuuguauugcaaagcccgcugaggacuagucccuguucccagagcccacuuuuuuuucuuuuuuugaaauaaaauagccugucuuucagaucuaaaaaaaaaaaaaaaaaaaaaaaaaaaaaaaaaaaaaaaaaaaaaaaaaaaaaaaaaaaaaaaaugcaucccccccccccccccccccccccccccccccaaaggcucuuuucagagccaccagaauu

SEQ ID NO: 16568 - RNA, 1813 nt, Artificial Sequence
  mRNA product Design a-5 comprising derived and/or modified sequence from HRSV(Memphis-37)__AIY60640.1__F-del_DSCav1_mut4 (opt4)
gggagacuuucccauucuguagcagaauuugguguugccuguggucuuggucccgcggagaagcuuaccauggagcugcccauccugaagaccaacgccaucaccaccauccuggccgccgugacccugugcuucgccagcagccagaacaucaccgaggaguucuaccagagcaccugcagcgccgugagcaagggcuaccugagcgcccugagaaccggcugguacaccagcgugaucaccaucgagcugagcaacaucaaggagaacaagugcaacggcaccgacgccaaggugaagcugaucaagcaggagcuggacaaguacaagaacgccgugaccgagcugcagcugcugaugcagagcacccccgccgccggcagcggcagcgccaucugcagcggcaucgccgugugcaaggugcugcaccuggagggcgaggugaacaagaucaagaacgcccugcugagcaccaacaaggccguggugagccugagcaacggcgugagcgugcugaccuucaaggugcuggaccugaagaacuacaucgacaagcagcugcugcccauccugaacaagcagagcugcagcaucagcaacaucgagaccgugaucgaguuccagcagaagaacaacagacugcuggagaucaccagagaguucagcgugaacgccggcgugaccacccccgugagcaccuacaugcugaccaacagcgagcugcugagccugaucaacgacaugcccaucaccaacgaccagaagaagcugaugagcaacaacgugcagaucgugagacagcagagcuacagcaucaugugcaucaucaaggaggaggugcuggccuacguggugcagcugccccuguacggcgugaucgacacccccugcuggaagcugcacaccagcccccugugcaccaccaacaccaaggagggcagcaacaucugccugaccagaaccgacagaggcugguacugcgacaacgccggcagcgugagcuucuucccccaggccgagaccugcaaggugcagagcaacagaguguucugcgacaccaugaacagcagaacccugcccagcgaggugaaccugugcaacaucgacaucuucaaccccaaguacgacugcaagaucaugaccagcaagaccgacgugagcagcagcgugaucaccagccugggcgccaucgugagcugcuacggcaagaccaagugcaccgccagcaacaagaacagaggcaucaucaagaccuucagcaacggcugcgacuacgugagcaacaagggcguggacaccgugagcgugggcaacacccuguacugcgugaacaagcaggagggcaagagccuguacgugaagggcgagcccaucaucaacuucuacgacccccugguguuccccagcgacgaguucgacgccagcaucagccaggugaacgagaagaucaaccagagccuggccuucaucagaaagagcgacgagcugcugcacaacgugaacgugggcaagagcaccaccaacaucaugaucaccaccaucaucaucgugaucaucgugauccugcugcugcugaucgccgugggccuguuccuguacugcaaggccagaugaggacuagucccuguucccagagcccacuuuuuuuucuuuuuuugaaauaaaauagccugucuuucagaucuaaaaaaaaaaaaaaaaaaaaaaaaaaaaaaaaaaaaaaaaaaaaaaaaaaaaaaaaaaaaaaaaugcaucccccccccccccccccccccccccccccccaaaggcucuuuucagagccaccagaauu

SEQ ID NO: 16569 - RNA, 1813 nt, Artificial Sequence
  mRNA product Design a-5 comprising derived and/or modified sequence from HRSV(Memphis-37)__AIY60640.1__F-del_DSCav1_mut4 (opt5)
gggagacuuucccauucuguagcagaauuugguguugccuguggucuuggucccgcggagaagcuuaccauggagcugcccauccucaagaccaacgccauuacaacgauccuggcugccgugacccuuugcuucgcgagcucccagaauauuacagaagaguuuuaccaaucuaccuguagcgcugucuccaaaggcuaucugucugcccucagaacagggugguacaccagcguuaucacaauugaacuguccaacaucaaggagaauaaaugcaacggaaccgacgccaaggugaaacuuaucaagcaggaacuggauaaguauaaaaaugcugugacggagcuccagcugcugaugcagucuaccccugccgcuggcagcggguccgccauuuguagcggaaucgcggucugcaaggugcuccaccuggagggcgaaguuaacaaaauuaagaaugcccuucugucuacaaacaaagcuguggucucccucagcaauggggugucuguucugaccuucaaggugcuugaccugaagaacuacaucgauaaacaacuccugccgauucugaauaagcaguccuguagcaucucuaacauugagacagucaucgaauuucagcagaaaaauaaccggcuccuggagaucacccgcgaguucuccgugaaugccggagugacgacacccgucagcaccuauaugcuuacaaacuccgaacugcucucucugauuaacgacaugccuaucaccaaugaucaaaagaaacuuaugagcaacaauguucagauugugagacagcaguccuacagcaucaugugcauuaucaaggaggaagugcuggcuuaugucgugcaacucccccuguacggcguuaucgacaccccuuguuggaaacugcauacaucuccccucugcacgaccaacacaaaggagggcuccaauauuugucugacccggacagaucgcgggugguacugcgacaacgccggaagcgugagcuuuuucccucaggcggaaaccuguaagguccagucuaauagaguguuuugcgauacgaugaacuccagaacacugccgucugagguuaaucucugcaacaucgacauuuucaaucccaaauaugauuguaagaucaugaccagcaaaaccgacguguccagcucugucauuacaucccugggcgccaucgugagcugcuacgggaagaccaaauguacagcuucuaacaagaaucggggaaucauuaagacguuuuccaacggcugcgauuaugucagcaauaaagggguggacaccguuuccgugggaaacacacuuuacugugucaacaagcaagagggcaaaucucuguaugugaagggcgaaccuaucauuaauuucuacgacccccucguuuuuccuagcgaugaguucgacgccuccaucucucaggugaacgaaaagauuaaucagagccuggcuuuuauccgcaaguccgaugagcugcuccacaacgucaauguggggaaaagcaccacaaacauuaugaucaccacgaucauuaucgugauuaucguuauucugcuucugcucaucgccgucggacuguuccuguauugcaaagccagaugaggacuagucccuguucccagagcccacuuuuuuuucuuuuuuugaaauaaaauagccugucuuucagaucuaaaaaaaaaaaaaaaaaaaaaaaaaaaaaaaaaaaaaaaaaaaaaaaaaaaaaaaaaaaaaaaaugcaucccccccccccccccccccccccccccccccaaaggcucuuuucagagccaccagaauu

SEQ ID NO: 16570 - RNA, 1813 nt, Artificial Sequence
  mRNA product Design a-5 comprising derived and/or modified sequence from HRSV(Memphis-37)__AIY60640.1__F-del_DSCav1_mut4 (opt6)
gggagacuuucccauucuguagcagaauuugguguugccuguggucuuggucccgcggagaagcuuaccauggaacuaccaauacucaaaacaaacgcaauaacaacuauacuagccgcaguuacacucugcuucgcuucaucacaaaauaucacagaagaauuuuaccaaucuacauguucagcuguauccaaagguuaccuuucagcacuacgaacaggaugguauaccucaguaaucaccaucgaacucucgaacauaaaagaaaacaaauguaacggaaccgaugcuaaagucaagcucauaaaacaagaacuagacaaauacaaaaacgcaguaaccgaacuacaacuacuuaugcaaucaacaccagcugcaggcucaggcucagcaaucugcucaggcauagcuguaugcaaaguacuacaucuagaaggagaaguaaacaaaauaaaaaacgcauuauuaucaacaaauaaagcaguaguaucacuaucaaauggaguaucaguacucacauucaaaguacuagaucuaaaaaacuacauugacaaacaauuacuaccaauccucaacaaacaaucaugcucaauauccaacauagaaacaguaauagaauuucaacaaaaaaacaaucgacuacuagaaauaacaagagaauuuucagucaaugccggaguuacaacacccguaagcacuuacaugcuaaccaacucagaacuacuaucacuaauaaacgacaugccaauuacaaacgaccaaaaaaaacuaaugucaaauaacguacaaauaguacgucaacaaucauacucaauaaugugcauaauaaaagaagaaguccuagcauacguaguacaauuacccuuauauggcguaauagacacaccaugcuggaaacuacacacauccccacucugcaccaccaacaccaaagaaggcuccaacauaugucuaacccgaaccgacagagguugguauugugauaacgcuggcuccguaucauucuucccacaagcagaaacauguaaaguacaaucaaacagaguauucugcgauacaaugaauagcagaacacuaccaucagaaguaaacuuaugcaacaucgacaucuucaaucccaaauacgacugcaaaauaaugacauccaaaacugacguuucuucaagcguaauaacaucuuuaggagcaauaguauccugcuacggaaaaacuaaaugcacagcauccaauaaaaaccguggaauaauaaaaacauucucaaauggcugcgacuacgucucaaacaaaggcguagacaccguuagugucggaaacacacuauauugcguaaauaaacaagaaggaaaauccuuauacguaaaaggcgaaccaauaauuaacuucuaugacccccucguauuuccauccgaugaauuugacgcaucaaucucgcaaguaaacgaaaaaauaaaccaaagccuagcauucauaagaaaauccgacgaacuacuccacaauguaaauguaggaaaaucaacuaccaacauaaugauuacuacuauaauaauaguaauuauagucaucuuacuacuauuaauagcagucggauuauuccuauacugcaaagcaagauagggacuagucccuguucccagagcccacuuuuuuuucuuuuuuugaaauaaaauagccugucuuucagaucuaaaaaaaaaaaaaaaaaaaaaaaaaaaaaaaaaaaaaaaaaaaaaaaaaaaaaaaaaaaaaaaaugcaucccccccccccccccccccccccccccccccaaaggcucuuuucagagccaccagaauu

SEQ ID NO: 16571 - RNA, 1813 nt, Artificial Sequence
  mRNA product Design a-5 comprising derived and/or modified sequence from HRSV(Memphis-37)__AIY60640.1__F-del_DSCav1_mut4 (opt11)
gggagacuuucccauucuguagcagaauuugguguugccuguggucuuggucccgcggagaagcuuaccauggagcuccccauccuaaaaaccaacgccaucaccaccauccucgccgccgucacccuaugcuucgcuucaucacaaaacaucaccgaagaauuuuaccaaucuaccugcuccgccgucuccaaaggauaucucagcgcccuacggaccggcugguacaccuccgucauaaccaucgaacucaguaacaucaaagaaaacaaaugcaacggcaccgacgccaaagucaaacuaaucaaacaagaacuagauaaauacaaaaacgcggucaccgaacuacaacuccuaaugcaaagcacccccgccgccggauccggcuccgccauaugcuccggcauugcugucugcaaaguacuacaccucgagggcgaggucaacaaaaucaaaaacgcacuacucagcacuaauaaagccguaguaucccuaucaaacggugucucagucuuaacauucaaaguacucgaccuaaagaacuacaucgacaaacaacuccuacccauccucaacaagcaguccuguucuaucucaaacaucgaaaccgucaucgaauuucaacaaaagaacaaccgccuccucgaaaucacacgcgaguucuccgucaacgcaggaguaaccacccccgucuccaccuacaugcucacaaacucggaacuccucucacuaaucaacgacaugcccaucaccaacgaccaaaagaaacucaugagcaacaacguucaaaucguccgccaacaaucauacuccaucaugugcauaaucaaagaagaaguccuagcuuacgucguccagcugccccucuacggagucaucgacacgcccugcuggaaacuacacacaagcccccucugcaccaccaacaccaaagaaggcuccaacauaugccucacacggaccgaccgcgguugguacugcgacaacgccggcuccgucuccuucuucccccaagcagaaacuugcaaaguccaauccaaccgcguauucugcgacacaaugaacagcagaacacucccuagcgaagucaaccucugcaacaucgacauauucaaccccaaauacgacugcaaaaucaugacgucaaaaaccgacgucuccagcuccguuaucaccucacucggcgccaucgucagcugcuacggcaaaacuaaaugcaccgccuccaacaaaaaccgcggcaucauuaaaaccuucagcaacggcugcgacuacgucuccaacaaaggugucgauacgguauccgucggaaacacccuauacugcgucaacaaacaagaaggcaaaucucucuacgucaaaggcgaacccauaaucaauuucuacgacccccuagucuuccccuccgaugaauuugacgccuccaucagccaagucaacgagaaaaucaaccaaucacuagccuucauccggaaauccgacgaacuccuacacaacguaaacgucggcaaauccaccaccaauauaaugaucacaaccaucaucaucguaaucaucgucauccuccuccuacucaucgccgucggauuauucuuauacugcaaagcccgcuaaggacuagucccuguucccagagcccacuuuuuuuucuuuuuuugaaauaaaauagccugucuuucagaucuaaaaaaaaaaaaaaaaaaaaaaaaaaaaaaaaaaaaaaaaaaaaaaaaaaaaaaaaaaaaaaaaugcaucccccccccccccccccccccccccccccccaaaggcucuuuucagagccaccagaauu

SEQ ID NO: 16572 - RNA, 1994 nt, Artificial Sequence
  mRNA product Design b-1 comprising derived and/or modified sequence from HRSV(Memphis-37)__AIY60640.1__F-del_DSCav1_mut4 (opt1)
gggagacggagacggccugcaggaccugcucucucagcccucagccgaggccuacgccgagccgagugcgcagccgacgaccgggaggagccgcagccuucaacucugagguacugugauccgcgcugcccgccgggccgccccaguccgcugcugcggcaccuccuucccucgcgcccucuucgcucgccagcgccuucccugugagccugcgucaccgcggccgccaagcuuaccauggagcugcccauccucaagaccaacgccaucaccacgauccuggccgcggugacccugugcuucgccagcucccagaacaucaccgaggaguucuaccagagcacgugcuccgccgucagcaagggcuaccucuccgcccugcgcaccgggugguacaccagcgugaucaccaucgagcuguccaacaucaaggagaacaagugcaacggcaccgacgccaaggugaagcucaucaagcaggagcuggacaaguacaagaacgcggucacggagcugcagcuccugaugcagagcaccccggccgccggcuccgggagcgcgaucugcuccggcaucgccgucugcaaggugcugcaccucgagggcgaggugaacaagaucaagaacgcccugcuguccaccaacaaggccgucgugagccucuccaacggggugagcguccugaccuucaaggugcuggaccucaagaacuacaucgacaagcagcugcugcccauccugaacaagcagagcugcuccaucagcaacaucgagaccgucaucgaguuccagcagaagaacaaccgccuccuggagaucacgcgggaguucagcgugaacgcgggcgugaccacccccgucuccaccuacaugcugacgaacagcgagcuccugucccugaucaacgacaugccgaucaccaacgaccagaagaagcucaugagcaacaacgugcagaucgugcgccagcaguccuacagcaucaugugcaucaucaaggaggagguccuggccuacguggugcagcugccccucuacggggucaucgacacccccugcuggaagcugcacaccagcccccugugcacgaccaacaccaaggagggcuccaacaucugccucacccggacggaccgcgggugguacugcgacaacgccggcagcguguccuucuucccgcaggccgagaccugcaagguccagagcaaccggguguucugcgacaccaugaacucccggacccugcccagcgaggugaaccucugcaacaucgacaucuucaaccccaaguacgacugcaagaucaugacguccaagaccgacgucagcuccagcgugaucaccucccugggcgccaucgugagcugcuacgggaagaccaagugcacggcgagcaacaagaaccgcggcaucaucaagaccuucuccaacgggugcgacuacgucagcaacaagggcguggacaccguguccgucggcaacacccuguacugcgugaacaagcaggagggcaagagccucuacgugaagggggagcccaucaucaacuucuacgacccgcuggucuuccccuccgacgaguucgacgccagcaucucccaggugaacgagaagaucaaccagagccuggccuucauccggaaguccgacgagcuccugcacaacgugaacgucggcaagagcaccacgaacaucaugaucaccaccaucaucaucgugaucaucgugauccugcugcuccugaucgccgucgggcuguuccucuacugcaaggcccgcugaggacuaguguccaccugucccuccugggcugcuggauugucucguuuuccugccaaauaaacaggaucagcgcuuuacagaucuaaaaaaaaaaaaaaaaaaaaaaaaaaaaaaaaaaaaaaaaaaaaaaaaaaaaaaaaaaaaaaaaugcaucccccccccccccccccccccccccccccccaaaggcucuuuucagagccaccagaauu

SEQ ID NO: 16573 - RNA, 1994 nt, Artificial Sequence
  mRNA product Design b-1 comprising derived and/or modified sequence from HRSV(Memphis-37)__AIY60640.1__F-del_DSCav1_mut4 (opt1)
gggagacggagacggccugcaggaccugcucucucagcccucagccgaggccuacgccgagccgagugcgcagccgacgaccgggaggagccgcagccuucaacucugagguacugugauccgcgcugcccgccgggccgccccaguccgcugcugcggcaccuccuucccucgcgcccucuucgcucgccagcgccuucccugugagccugcgucaccgcggccgccaagcuuaccauggagcugcccauccucaagaccaacgccaucaccacgauccuggccgcggugacccugugcuucgccagcucccagaacaucaccgaggaguucuaccagagcacgugcuccgccgucagcaagggcuaccucuccgcccugcgcaccgggugguacaccagcgugaucaccaucgagcuguccaacaucaaggagaacaagugcaacggcaccgacgccaaggugaagcucaucaagcaggagcuggacaaguacaagaacgcggucacggagcugcagcuccugaugcagagcaccccggccgccggguccggcagcgccaucugcuccgggaucgcggugugcaaggugcugcaccucgagggcgaggucaacaagaucaagaacgcccugcugagcaccaacaaggccguggugucccucagcaacggcgucuccgugcugaccuucaaggugcuggaccucaagaacuacaucgacaagcagcugcugcccauccucaacaagcagagcugcuccaucagcaacaucgagacggucaucgaguuccagcagaagaacaaccggcugcuggagaucacccgcgaguucuccgugaacgccggggugaccacccccgucagcacguacaugcucaccaacagcgagcugcugucccucaucaacgacaugcccaucaccaacgaccagaagaagcugaugagcaacaacgugcagaucgugcggcagcaguccuacagcaucaugugcaucaucaaggaggagguccuggccuacguggugcagcucccgcuguacggcgucaucgacacccccugcuggaagcugcacacgagcccccucugcaccaccaacaccaaggagggguccaacaucugccugacgcgcaccgaccggggcugguacugcgacaacgcgggguccgugagcuucuucccccaggccgagaccugcaaggugcaguccaaccgcgucuucugcgacaccaugaacagccggacgcucccguccgaggugaaccugugcaacaucgacaucuucaaccccaaguacgacugcaagaucaugaccagcaagaccgacgucuccagcuccgugaucaccagccugggcgccaucguguccugcuacggcaagacgaagugcaccgccagcaacaagaaccgggggaucaucaagaccuucuccaacggcugcgacuacgucagcaacaaggggguggacaccgugagcgucggcaacacgcucuacugcgugaacaagcaggagggcaagucccuguacgugaagggggagcccaucaucaacuucuacgacccccuggucuucccgagcgacgaguucgacgccuccaucagccaggugaacgagaagaucaaccagucccucgcguucauccgcaagagcgacgagcugcugcacaacgugaacgucggcaaguccaccaccaacaucaugaucaccaccaucaucaucgugaucaucgugauccuccugcugcucaucgccgucgggcuguuccuguacugcaaggcccggugaggacuaguguccaccugucccuccugggcugcuggauugucucguuuuccugccaaauaaacaggaucagcgcuuuacagaucuaaaaaaaaaaaaaaaaaaaaaaaaaaaaaaaaaaaaaaaaaaaaaaaaaaaaaaaaaaaaaaaaugcaucccccccccccccccccccccccccccccccaaaggcucuuuucagagccaccagaauu

SEQ ID NO: 16574 - RNA, 1994 nt, Artificial Sequence
  mRNA product Design b-1 comprising derived and/or modified sequence from HRSV(Memphis-37)__AIY60640.1__F-del_DSCav1_mut4 (opt2)
gggagacggagacggccugcaggaccugcucucucagcccucagccgaggccuacgccgagccgagugcgcagccgacgaccgggaggagccgcagccuucaacucugagguacugugauccgcgcugcccgccgggccgccccaguccgcugcugcggcaccuccuucccucgcgcccucuucgcucgccagcgccuucccugugagccugcgucaccgcggccgccaagcuuaccauggagcuccccauccucaagaccaacgccaucaccaccauccucgccgccgucacccucugcuucgccuccucccagaacaucaccgaggaguucuaccaguccaccugcuccgccgucuccaagggcuaccucuccgcccuccgcaccggcugguacaccuccgucaucaccaucgagcucuccaacaucaaggagaacaagugcaacggcaccgacgccaaggucaagcucaucaagcaggagcucgacaaguacaagaacgccgucaccgagcuccagcuccucaugcaguccacccccgccgccggcuccggcuccgccaucugcuccggcaucgccgucugcaagguccuccaccucgagggcgaggucaacaagaucaagaacgcccuccucuccaccaacaaggccgucgucucccucuccaacggcgucuccguccucaccuucaagguccucgaccucaagaacuacaucgacaagcagcuccuccccauccucaacaagcaguccugcuccaucuccaacaucgagaccgucaucgaguuccagcagaagaacaaccgccuccucgagaucacccgcgaguucuccgucaacgccggcgucaccacccccgucuccaccuacaugcucaccaacuccgagcuccucucccucaucaacgacaugcccaucaccaacgaccagaagaagcucauguccaacaacguccagaucguccgccagcaguccuacuccaucaugugcaucaucaaggaggagguccucgccuacgucguccagcucccccucuacggcgucaucgacacccccugcuggaagcuccacaccuccccccucugcaccaccaacaccaaggagggcuccaacaucugccucacccgcaccgaccgcggcugguacugcgacaacgccggcuccgucuccuucuucccccaggccgagaccugcaagguccaguccaaccgcgucuucugcgacaccaugaacucccgcacccuccccuccgaggucaaccucugcaacaucgacaucuucaaccccaaguacgacugcaagaucaugaccuccaagaccgacgucuccuccuccgucaucaccucccucggcgccaucgucuccugcuacggcaagaccaagugcaccgccuccaacaagaaccgcggcaucaucaagaccuucuccaacggcugcgacuacgucuccaacaagggcgucgacaccgucuccgucggcaacacccucuacugcgucaacaagcaggagggcaagucccucuacgucaagggcgagcccaucaucaacuucuacgacccccucgucuuccccuccgacgaguucgacgccuccaucucccaggucaacgagaagaucaaccagucccucgccuucauccgcaaguccgacgagcuccuccacaacgucaacgucggcaaguccaccaccaacaucaugaucaccaccaucaucaucgucaucaucgucauccuccuccuccucaucgccgucggccucuuccucuacugcaaggcccgcugaggacuaguguccaccugucccuccugggcugcuggauugucucguuuuccugccaaauaaacaggaucagcgcuuuacagaucuaaaaaaaaaaaaaaaaaaaaaaaaaaaaaaaaaaaaaaaaaaaaaaaaaaaaaaaaaaaaaaaaugcaucccccccccccccccccccccccccccccccaaaggcucuuuucagagccaccagaauu

SEQ ID NO: 16575 - RNA, 1994 nt, Artificial Sequence
  mRNA product Design b-1 comprising derived and/or modified sequence from HRSV(Memphis-37)__AIY60640.1__F-del_DSCav1_mut4 (opt3)
gggagacggagacggccugcaggaccugcucucucagcccucagccgaggccuacgccgagccgagugcgcagccgacgaccgggaggagccgcagccuucaacucugagguacugugauccgcgcugcccgccgggccgccccaguccgcugcugcggcaccuccuucccucgcgcccucuucgcucgccagcgccuucccugugagccugcgucaccgcggccgccaagcuuaccauggagcugcccauccucaagaccaacgccauuacaacuauacuugcugcagugacgcugugcuucgccagcucccagaauaucaccgaagaguuuuaccaaucuacauguucagcggucaguaaaggcuauuugagcgcuuuaagaacugggugguacaccuccguuauuacaaucgaacugucuaacauuaaggagaauaaaugcaacggaaccgacgccaaggugaaacuaaucaagcaggaacucgauaaguauaaaaaugcaguaacugagcugcagcuucugaugcagucgaccccugccgcugguucaggcagcgcaauauguagugggaucgccgugugcaaggucuugcaccucgagggagaagugaacaaaauuaagaaugcucugcuguccacaaacaaagccguugugucucucagcaauggcgucuccguguuaacguucaagguacuggaccuuaagaacuacaucgauaaacaauugcugccaauucuaaauaagcagucauguaguaucagcaacauagagacuguuauugaauuucagcagaaaaauaacaggcuccuggagaucacccgggaguucucugugaaugcgggugucacaacuccgguguccaccuauaugcuuacaaacucagaacuguugagccucauuaacgacaugcccaucaccaaugaucaaaagaaacugaugaguaacaaugugcagaucguccgccagcagucuuacuccauuaugugcauaaucaaggaggaaguuuuagcauaugugguacaacugccucucuacggggugauugacacgccauguuggaaacuucauacuagcccccugugcacaaccaacacuaaggagggaucgaauaucuguuugacacgaaccgaucguggcugguacugcgacaacgccggcucugucuccuuuuucccucaggcugaaacguguaaggugcagucaaauagaguguuuugcgauaccaugaacaguagaacacugccaagcgaggugaaucucugcaacauagacauuuucaaucccaaauaugauuguaagaucaugacuuccaaaaccgacgucucuagcucagugaucacaagucugggggccauuguauccugcuacggaaagacuaaauguaccgcaagcaacaagaauagggguaucauuaagacauuuucuaacggcugcgauuauguuucaaauaaagggguggacaccgucagugugggaaacacucuuuacugugucaacaagcaagagggcaaaagccuguaugugaagggugaaccuauaaucaauuucuacgacccauugguuuuuccguccgaugaguucgacgcuucuauuucgcagguuaacgagaaaaucaaucagagccucgccuuuauccggaaguccgaugaacuguuacacaacguaaaugucgggaagucaacgacaaacauuaugauaaccacuaucauuaucgugauuaucguuauacugcuacuccugaucgcggugggacuuuucuuguauugcaaagcccgcugaggacuaguguccaccugucccuccugggcugcuggauugucucguuuuccugccaaauaaacaggaucagcgcuuuacagaucuaaaaaaaaaaaaaaaaaaaaaaaaaaaaaaaaaaaaaaaaaaaaaaaaaaaaaaaaaaaaaaaaugcaucccccccccccccccccccccccccccccccaaaggcucuuuucagagccaccagaauu

SEQ ID NO: 16576 - RNA, 1994 nt, Artificial Sequence
  mRNA product Design b-1 comprising derived and/or modified sequence from HRSV(Memphis-37)__AIY60640.1__F-del_DSCav1_mut4 (opt4)
gggagacggagacggccugcaggaccugcucucucagcccucagccgaggccuacgccgagccgagugcgcagccgacgaccgggaggagccgcagccuucaacucugagguacugugauccgcgcugcccgccgggccgccccaguccgcugcugcggcaccuccuucccucgcgcccucuucgcucgccagcgccuucccugugagccugcgucaccgcggccgccaagcuuaccauggagcugcccauccugaagaccaacgccaucaccaccauccuggccgccgugacccugugcuucgccagcagccagaacaucaccgaggaguucuaccagagcaccugcagcgccgugagcaagggcuaccugagcgcccugagaaccggcugguacaccagcgugaucaccaucgagcugagcaacaucaaggagaacaagugcaacggcaccgacgccaaggugaagcugaucaagcaggagcuggacaaguacaagaacgccgugaccgagcugcagcugcugaugcagagcacccccgccgccggcagcggcagcgccaucugcagcggcaucgccgugugcaaggugcugcaccuggagggcgaggugaacaagaucaagaacgcccugcugagcaccaacaaggccguggugagccugagcaacggcgugagcgugcugaccuucaaggugcuggaccugaagaacuacaucgacaagcagcugcugcccauccugaacaagcagagcugcagcaucagcaacaucgagaccgugaucgaguuccagcagaagaacaacagacugcuggagaucaccagagaguucagcgugaacgccggcgugaccacccccgugagcaccuacaugcugaccaacagcgagcugcugagccugaucaacgacaugcccaucaccaacgaccagaagaagcugaugagcaacaacgugcagaucgugagacagcagagcuacagcaucaugugcaucaucaaggaggaggugcuggccuacguggugcagcugccccuguacggcgugaucgacacccccugcuggaagcugcacaccagcccccugugcaccaccaacaccaaggagggcagcaacaucugccugaccagaaccgacagaggcugguacugcgacaacgccggcagcgugagcuucuucccccaggccgagaccugcaaggugcagagcaacagaguguucugcgacaccaugaacagcagaacccugcccagcgaggugaaccugugcaacaucgacaucuucaaccccaaguacgacugcaagaucaugaccagcaagaccgacgugagcagcagcgugaucaccagccugggcgccaucgugagcugcuacggcaagaccaagugcaccgccagcaacaagaacagaggcaucaucaagaccuucagcaacggcugcgacuacgugagcaacaagggcguggacaccgugagcgugggcaacacccuguacugcgugaacaagcaggagggcaagagccuguacgugaagggcgagcccaucaucaacuucuacgacccccugguguuccccagcgacgaguucgacgccagcaucagccaggugaacgagaagaucaaccagagccuggccuucaucagaaagagcgacgagcugcugcacaacgugaacgugggcaagagcaccaccaacaucaugaucaccaccaucaucaucgugaucaucgugauccugcugcugcugaucgccgugggccuguuccuguacugcaaggccagaugaggacuaguguccaccugucccuccugggcugcuggauugucucguuuuccugccaaauaaacaggaucagcgcuuuacagaucuaaaaaaaaaaaaaaaaaaaaaaaaaaaaaaaaaaaaaaaaaaaaaaaaaaaaaaaaaaaaaaaaugcaucccccccccccccccccccccccccccccccaaaggcucuuuucagagccaccagaauu

SEQ ID NO: 16577 - RNA, 1994 nt, Artificial Sequence
  mRNA product Design b-1 comprising derived and/or modified sequence from HRSV(Memphis-37)__AIY60640.1__F-del_DSCav1_mut4 (opt5)
gggagacggagacggccugcaggaccugcucucucagcccucagccgaggccuacgccgagccgagugcgcagccgacgaccgggaggagccgcagccuucaacucugagguacugugauccgcgcugcccgccgggccgccccaguccgcugcugcggcaccuccuucccucgcgcccucuucgcucgccagcgccuucccugugagccugcgucaccgcggccgccaagcuuaccauggagcugcccauccucaagaccaacgccauuacaacgauccuggcugccgugacccuuugcuucgcgagcucccagaauauuacagaagaguuuuaccaaucuaccuguagcgcugucuccaaaggcuaucugucugcccucagaacagggugguacaccagcguuaucacaauugaacuguccaacaucaaggagaauaaaugcaacggaaccgacgccaaggugaaacuuaucaagcaggaacuggauaaguauaaaaaugcugugacggagcuccagcugcugaugcagucuaccccugccgcuggcagcggguccgccauuuguagcggaaucgcggucugcaaggugcuccaccuggagggcgaaguuaacaaaauuaagaaugcccuucugucuacaaacaaagcuguggucucccucagcaauggggugucuguucugaccuucaaggugcuugaccugaagaacuacaucgauaaacaacuccugccgauucugaauaagcaguccuguagcaucucuaacauugagacagucaucgaauuucagcagaaaaauaaccggcuccuggagaucacccgcgaguucuccgugaaugccggagugacgacacccgucagcaccuauaugcuuacaaacuccgaacugcucucucugauuaacgacaugccuaucaccaaugaucaaaagaaacuuaugagcaacaauguucagauugugagacagcaguccuacagcaucaugugcauuaucaaggaggaagugcuggcuuaugucgugcaacucccccuguacggcguuaucgacaccccuuguuggaaacugcauacaucuccccucugcacgaccaacacaaaggagggcuccaauauuugucugacccggacagaucgcgggugguacugcgacaacgccggaagcgugagcuuuuucccucaggcggaaaccuguaagguccagucuaauagaguguuuugcgauacgaugaacuccagaacacugccgucugagguuaaucucugcaacaucgacauuuucaaucccaaauaugauuguaagaucaugaccagcaaaaccgacguguccagcucugucauuacaucccugggcgccaucgugagcugcuacgggaagaccaaauguacagcuucuaacaagaaucggggaaucauuaagacguuuuccaacggcugcgauuaugucagcaauaaagggguggacaccguuuccgugggaaacacacuuuacugugucaacaagcaagagggcaaaucucuguaugugaagggcgaaccuaucauuaauuucuacgacccccucguuuuuccuagcgaugaguucgacgccuccaucucucaggugaacgaaaagauuaaucagagccuggcuuuuauccgcaaguccgaugagcugcuccacaacgucaauguggggaaaagcaccacaaacauuaugaucaccacgaucauuaucgugauuaucguuauucugcuucugcucaucgccgucggacuguuccuguauugcaaagccagaugaggacuaguguccaccugucccuccugggcugcuggauugucucguuuuccugccaaauaaacaggaucagcgcuuuacagaucuaaaaaaaaaaaaaaaaaaaaaaaaaaaaaaaaaaaaaaaaaaaaaaaaaaaaaaaaaaaaaaaaugcaucccccccccccccccccccccccccccccccaaaggcucuuuucagagccaccagaauu

SEQ ID NO: 16578 - RNA, 1994 nt, Artificial Sequence
  mRNA product Design b-1 comprising derived and/or modified sequence from HRSV(Memphis-37)__AIY60640.1__F-del_DSCav1_mut4 (opt6)
gggagacggagacggccugcaggaccugcucucucagcccucagccgaggccuacgccgagccgagugcgcagccgacgaccgggaggagccgcagccuucaacucugagguacugugauccgcgcugcccgccgggccgccccaguccgcugcugcggcaccuccuucccucgcgcccucuucgcucgccagcgccuucccugugagccugcgucaccgcggccgccaagcuuaccauggaacuaccaauacucaaaacaaacgcaauaacaacuauacuagccgcaguuacacucugcuucgcuucaucacaaaauaucacagaagaauuuuaccaaucuacauguucagcuguauccaaagguuaccuuucagcacuacgaacaggaugguauaccucaguaaucaccaucgaacucucgaacauaaaagaaaacaaauguaacggaaccgaugcuaaagucaagcucauaaaacaagaacuagacaaauacaaaaacgcaguaaccgaacuacaacuacuuaugcaaucaacaccagcugcaggcucaggcucagcaaucugcucaggcauagcuguaugcaaaguacuacaucuagaaggagaaguaaacaaaauaaaaaacgcauuauuaucaacaaauaaagcaguaguaucacuaucaaauggaguaucaguacucacauucaaaguacuagaucuaaaaaacuacauugacaaacaauuacuaccaauccucaacaaacaaucaugcucaauauccaacauagaaacaguaauagaauuucaacaaaaaaacaaucgacuacuagaaauaacaagagaauuuucagucaaugccggaguuacaacacccguaagcacuuacaugcuaaccaacucagaacuacuaucacuaauaaacgacaugccaauuacaaacgaccaaaaaaaacuaaugucaaauaacguacaaauaguacgucaacaaucauacucaauaaugugcauaauaaaagaagaaguccuagcauacguaguacaauuacccuuauauggcguaauagacacaccaugcuggaaacuacacacauccccacucugcaccaccaacaccaaagaaggcuccaacauaugucuaacccgaaccgacagagguugguauugugauaacgcuggcuccguaucauucuucccacaagcagaaacauguaaaguacaaucaaacagaguauucugcgauacaaugaauagcagaacacuaccaucagaaguaaacuuaugcaacaucgacaucuucaaucccaaauacgacugcaaaauaaugacauccaaaacugacguuucuucaagcguaauaacaucuuuaggagcaauaguauccugcuacggaaaaacuaaaugcacagcauccaauaaaaaccguggaauaauaaaaacauucucaaauggcugcgacuacgucucaaacaaaggcguagacaccguuagugucggaaacacacuauauugcguaaauaaacaagaaggaaaauccuuauacguaaaaggcgaaccaauaauuaacuucuaugacccccucguauuuccauccgaugaauuugacgcaucaaucucgcaaguaaacgaaaaaauaaaccaaagccuagcauucauaagaaaauccgacgaacuacuccacaauguaaauguaggaaaaucaacuaccaacauaaugauuacuacuauaauaauaguaauuauagucaucuuacuacuauuaauagcagucggauuauuccuauacugcaaagcaagauagggacuaguguccaccugucccuccugggcugcuggauugucucguuuuccugccaaauaaacaggaucagcgcuuuacagaucuaaaaaaaaaaaaaaaaaaaaaaaaaaaaaaaaaaaaaaaaaaaaaaaaaaaaaaaaaaaaaaaaugcaucccccccccccccccccccccccccccccccaaaggcucuuuucagagccaccagaauu

SEQ ID NO: 16579 - RNA, 1994 nt, Artificial Sequence
  mRNA product Design b-1 comprising derived and/or modified sequence from HRSV(Memphis-37)__AIY60640.1__F-del_DSCav1_mut4 (opt11)
gggagacggagacggccugcaggaccugcucucucagcccucagccgaggccuacgccgagccgagugcgcagccgacgaccgggaggagccgcagccuucaacucugagguacugugauccgcgcugcccgccgggccgccccaguccgcugcugcggcaccuccuucccucgcgcccucuucgcucgccagcgccuucccugugagccugcgucaccgcggccgccaagcuuaccauggagcuccccauccuaaaaaccaacgccaucaccaccauccucgccgccgucacccuaugcuucgcuucaucacaaaacaucaccgaagaauuuuaccaaucuaccugcuccgccgucuccaaaggauaucucagcgcccuacggaccggcugguacaccuccgucauaaccaucgaacucaguaacaucaaagaaaacaaaugcaacggcaccgacgccaaagucaaacuaaucaaacaagaacuagauaaauacaaaaacgcggucaccgaacuacaacuccuaaugcaaagcacccccgccgccggauccggcuccgccauaugcuccggcauugcugucugcaaaguacuacaccucgagggcgaggucaacaaaaucaaaaacgcacuacucagcacuaauaaagccguaguaucccuaucaaacggugucucagucuuaacauucaaaguacucgaccuaaagaacuacaucgacaaacaacuccuacccauccucaacaagcaguccuguucuaucucaaacaucgaaaccgucaucgaauuucaacaaaagaacaaccgccuccucgaaaucacacgcgaguucuccgucaacgcaggaguaaccacccccgucuccaccuacaugcucacaaacucggaacuccucucacuaaucaacgacaugcccaucaccaacgaccaaaagaaacucaugagcaacaacguucaaaucguccgccaacaaucauacuccaucaugugcauaaucaaagaagaaguccuagcuuacgucguccagcugccccucuacggagucaucgacacgcccugcuggaaacuacacacaagcccccucugcaccaccaacaccaaagaaggcuccaacauaugccucacacggaccgaccgcgguugguacugcgacaacgccggcuccgucuccuucuucccccaagcagaaacuugcaaaguccaauccaaccgcguauucugcgacacaaugaacagcagaacacucccuagcgaagucaaccucugcaacaucgacauauucaaccccaaauacgacugcaaaaucaugacgucaaaaaccgacgucuccagcuccguuaucaccucacucggcgccaucgucagcugcuacggcaaaacuaaaugcaccgccuccaacaaaaaccgcggcaucauuaaaaccuucagcaacggcugcgacuacgucuccaacaaaggugucgauacgguauccgucggaaacacccuauacugcgucaacaaacaagaaggcaaaucucucuacgucaaaggcgaacccauaaucaauuucuacgacccccuagucuuccccuccgaugaauuugacgccuccaucagccaagucaacgagaaaaucaaccaaucacuagccuucauccggaaauccgacgaacuccuacacaacguaaacgucggcaaauccaccaccaauauaaugaucacaaccaucaucaucguaaucaucgucauccuccuccuacucaucgccgucggauuauucuuauacugcaaagcccgcuaaggacuaguguccaccugucccuccugggcugcuggauugucucguuuuccugccaaauaaacaggaucagcgcuuuacagaucuaaaaaaaaaaaaaaaaaaaaaaaaaaaaaaaaaaaaaaaaaaaaaaaaaaaaaaaaaaaaaaaaugcaucccccccccccccccccccccccccccccccaaaggcucuuuucagagccaccagaauu

SEQ ID NO: 16580 - RNA, 1814 nt, Artificial Sequence
  mRNA product Design b-2 comprising derived and/or modified sequence from HRSV(Memphis-37)__AIY60640.1__F-del_DSCav1_mut4 (opt1)
gggagagccucugcuggaguccggggaguggcguuggcugcuagagcgaagcuuaccauggagcugcccauccucaagaccaacgccaucaccacgauccuggccgcggugacccugugcuucgccagcucccagaacaucaccgaggaguucuaccagagcacgugcuccgccgucagcaagggcuaccucuccgcccugcgcaccgggugguacaccagcgugaucaccaucgagcuguccaacaucaaggagaacaagugcaacggcaccgacgccaaggugaagcucaucaagcaggagcuggacaaguacaagaacgcggucacggagcugcagcuccugaugcagagcaccccggccgccggcuccgggagcgcgaucugcuccggcaucgccgucugcaaggugcugcaccucgagggcgaggugaacaagaucaagaacgcccugcuguccaccaacaaggccgucgugagccucuccaacggggugagcguccugaccuucaaggugcuggaccucaagaacuacaucgacaagcagcugcugcccauccugaacaagcagagcugcuccaucagcaacaucgagaccgucaucgaguuccagcagaagaacaaccgccuccuggagaucacgcgggaguucagcgugaacgcgggcgugaccacccccgucuccaccuacaugcugacgaacagcgagcuccugucccugaucaacgacaugccgaucaccaacgaccagaagaagcucaugagcaacaacgugcagaucgugcgccagcaguccuacagcaucaugugcaucaucaaggaggagguccuggccuacguggugcagcugccccucuacggggucaucgacacccccugcuggaagcugcacaccagcccccugugcacgaccaacaccaaggagggcuccaacaucugccucacccggacggaccgcgggugguacugcgacaacgccggcagcguguccuucuucccgcaggccgagaccugcaagguccagagcaaccggguguucugcgacaccaugaacucccggacccugcccagcgaggugaaccucugcaacaucgacaucuucaaccccaaguacgacugcaagaucaugacguccaagaccgacgucagcuccagcgugaucaccucccugggcgccaucgugagcugcuacgggaagaccaagugcacggcgagcaacaagaaccgcggcaucaucaagaccuucuccaacgggugcgacuacgucagcaacaagggcguggacaccguguccgucggcaacacccuguacugcgugaacaagcaggagggcaagagccucuacgugaagggggagcccaucaucaacuucuacgacccgcuggucuuccccuccgacgaguucgacgccagcaucucccaggugaacgagaagaucaaccagagccuggccuucauccggaaguccgacgagcuccugcacaacgugaacgucggcaagagcaccacgaacaucaugaucaccaccaucaucaucgugaucaucgugauccugcugcuccugaucgccgucgggcuguuccucuacugcaaggcccgcugaggacuaguguccaccugucccuccugggcugcuggauugucucguuuuccugccaaauaaacaggaucagcgcuuuacagaucuaaaaaaaaaaaaaaaaaaaaaaaaaaaaaaaaaaaaaaaaaaaaaaaaaaaaaaaaaaaaaaaaugcaucccccccccccccccccccccccccccccccaaaggcucuuuucagagccaccagaauu

SEQ ID NO: 16581 - RNA, 1814 nt, Artificial Sequence
  mRNA product Design b-2 comprising derived and/or modified sequence from HRSV(Memphis-37)__AIY60640.1__F-del_DSCav1_mut4 (opt1)
gggagagccucugcuggaguccggggaguggcguuggcugcuagagcgaagcuuaccauggagcugcccauccucaagaccaacgccaucaccacgauccuggccgcggugacccugugcuucgccagcucccagaacaucaccgaggaguucuaccagagcacgugcuccgccgucagcaagggcuaccucuccgcccugcgcaccgggugguacaccagcgugaucaccaucgagcuguccaacaucaaggagaacaagugcaacggcaccgacgccaaggugaagcucaucaagcaggagcuggacaaguacaagaacgcggucacggagcugcagcuccugaugcagagcaccccggccgccggguccggcagcgccaucugcuccgggaucgcggugugcaaggugcugcaccucgagggcgaggucaacaagaucaagaacgcccugcugagcaccaacaaggccguggugucccucagcaacggcgucuccgugcugaccuucaaggugcuggaccucaagaacuacaucgacaagcagcugcugcccauccucaacaagcagagcugcuccaucagcaacaucgagacggucaucgaguuccagcagaagaacaaccggcugcuggagaucacccgcgaguucuccgugaacgccggggugaccacccccgucagcacguacaugcucaccaacagcgagcugcugucccucaucaacgacaugcccaucaccaacgaccagaagaagcugaugagcaacaacgugcagaucgugcggcagcaguccuacagcaucaugugcaucaucaaggaggagguccuggccuacguggugcagcucccgcuguacggcgucaucgacacccccugcuggaagcugcacacgagcccccucugcaccaccaacaccaaggagggguccaacaucugccugacgcgcaccgaccggggcugguacugcgacaacgcgggguccgugagcuucuucccccaggccgagaccugcaaggugcaguccaaccgcgucuucugcgacaccaugaacagccggacgcucccguccgaggugaaccugugcaacaucgacaucuucaaccccaaguacgacugcaagaucaugaccagcaagaccgacgucuccagcuccgugaucaccagccugggcgccaucguguccugcuacggcaagacgaagugcaccgccagcaacaagaaccgggggaucaucaagaccuucuccaacggcugcgacuacgucagcaacaaggggguggacaccgugagcgucggcaacacgcucuacugcgugaacaagcaggagggcaagucccuguacgugaagggggagcccaucaucaacuucuacgacccccuggucuucccgagcgacgaguucgacgccuccaucagccaggugaacgagaagaucaaccagucccucgcguucauccgcaagagcgacgagcugcugcacaacgugaacgucggcaaguccaccaccaacaucaugaucaccaccaucaucaucgugaucaucgugauccuccugcugcucaucgccgucgggcuguuccuguacugcaaggcccggugaggacuaguguccaccugucccuccugggcugcuggauugucucguuuuccugccaaauaaacaggaucagcgcuuuacagaucuaaaaaaaaaaaaaaaaaaaaaaaaaaaaaaaaaaaaaaaaaaaaaaaaaaaaaaaaaaaaaaaaugcaucccccccccccccccccccccccccccccccaaaggcucuuuucagagccaccagaauu

SEQ ID NO: 16582 - RNA, 1814 nt, Artificial Sequence
  mRNA product Design b-2 comprising derived and/or modified sequence from HRSV(Memphis-37)__AIY60640.1__F-del_DSCav1_mut4 (opt2)
gggagagccucugcuggaguccggggaguggcguuggcugcuagagcgaagcuuaccauggagcuccccauccucaagaccaacgccaucaccaccauccucgccgccgucacccucugcuucgccuccucccagaacaucaccgaggaguucuaccaguccaccugcuccgccgucuccaagggcuaccucuccgcccuccgcaccggcugguacaccuccgucaucaccaucgagcucuccaacaucaaggagaacaagugcaacggcaccgacgccaaggucaagcucaucaagcaggagcucgacaaguacaagaacgccgucaccgagcuccagcuccucaugcaguccacccccgccgccggcuccggcuccgccaucugcuccggcaucgccgucugcaagguccuccaccucgagggcgaggucaacaagaucaagaacgcccuccucuccaccaacaaggccgucgucucccucuccaacggcgucuccguccucaccuucaagguccucgaccucaagaacuacaucgacaagcagcuccuccccauccucaacaagcaguccugcuccaucuccaacaucgagaccgucaucgaguuccagcagaagaacaaccgccuccucgagaucacccgcgaguucuccgucaacgccggcgucaccacccccgucuccaccuacaugcucaccaacuccgagcuccucucccucaucaacgacaugcccaucaccaacgaccagaagaagcucauguccaacaacguccagaucguccgccagcaguccuacuccaucaugugcaucaucaaggaggagguccucgccuacgucguccagcucccccucuacggcgucaucgacacccccugcuggaagcuccacaccuccccccucugcaccaccaacaccaaggagggcuccaacaucugccucacccgcaccgaccgcggcugguacugcgacaacgccggcuccgucuccuucuucccccaggccgagaccugcaagguccaguccaaccgcgucuucugcgacaccaugaacucccgcacccuccccuccgaggucaaccucugcaacaucgacaucuucaaccccaaguacgacugcaagaucaugaccuccaagaccgacgucuccuccuccgucaucaccucccucggcgccaucgucuccugcuacggcaagaccaagugcaccgccuccaacaagaaccgcggcaucaucaagaccuucuccaacggcugcgacuacgucuccaacaagggcgucgacaccgucuccgucggcaacacccucuacugcgucaacaagcaggagggcaagucccucuacgucaagggcgagcccaucaucaacuucuacgacccccucgucuuccccuccgacgaguucgacgccuccaucucccaggucaacgagaagaucaaccagucccucgccuucauccgcaaguccgacgagcuccuccacaacgucaacgucggcaaguccaccaccaacaucaugaucaccaccaucaucaucgucaucaucgucauccuccuccuccucaucgccgucggccucuuccucuacugcaaggcccgcugaggacuaguguccaccugucccuccugggcugcuggauugucucguuuuccugccaaauaaacaggaucagcgcuuuacagaucuaaaaaaaaaaaaaaaaaaaaaaaaaaaaaaaaaaaaaaaaaaaaaaaaaaaaaaaaaaaaaaaaugcaucccccccccccccccccccccccccccccccaaaggcucuuuucagagccaccagaauu

SEQ ID NO: 16583 - RNA, 1814 nt, Artificial Sequence
  mRNA product Design b-2 comprising derived and/or modified sequence from HRSV(Memphis-37)__AIY60640.1__F-del_DSCav1_mut4 (opt3)
gggagagccucugcuggaguccggggaguggcguuggcugcuagagcgaagcuuaccauggagcugcccauccucaagaccaacgccauuacaacuauacuugcugcagugacgcugugcuucgccagcucccagaauaucaccgaagaguuuuaccaaucuacauguucagcggucaguaaaggcuauuugagcgcuuuaagaacugggugguacaccuccguuauuacaaucgaacugucuaacauuaaggagaauaaaugcaacggaaccgacgccaaggugaaacuaaucaagcaggaacucgauaaguauaaaaaugcaguaacugagcugcagcuucugaugcagucgaccccugccgcugguucaggcagcgcaauauguagugggaucgccgugugcaaggucuugcaccucgagggagaagugaacaaaauuaagaaugcucugcuguccacaaacaaagccguugugucucucagcaauggcgucuccguguuaacguucaagguacuggaccuuaagaacuacaucgauaaacaauugcugccaauucuaaauaagcagucauguaguaucagcaacauagagacuguuauugaauuucagcagaaaaauaacaggcuccuggagaucacccgggaguucucugugaaugcgggugucacaacuccgguguccaccuauaugcuuacaaacucagaacuguugagccucauuaacgacaugcccaucaccaaugaucaaaagaaacugaugaguaacaaugugcagaucguccgccagcagucuuacuccauuaugugcauaaucaaggaggaaguuuuagcauaugugguacaacugccucucuacggggugauugacacgccauguuggaaacuucauacuagcccccugugcacaaccaacacuaaggagggaucgaauaucuguuugacacgaaccgaucguggcugguacugcgacaacgccggcucugucuccuuuuucccucaggcugaaacguguaaggugcagucaaauagaguguuuugcgauaccaugaacaguagaacacugccaagcgaggugaaucucugcaacauagacauuuucaaucccaaauaugauuguaagaucaugacuuccaaaaccgacgucucuagcucagugaucacaagucugggggccauuguauccugcuacggaaagacuaaauguaccgcaagcaacaagaauagggguaucauuaagacauuuucuaacggcugcgauuauguuucaaauaaagggguggacaccgucagugugggaaacacucuuuacugugucaacaagcaagagggcaaaagccuguaugugaagggugaaccuauaaucaauuucuacgacccauugguuuuuccguccgaugaguucgacgcuucuauuucgcagguuaacgagaaaaucaaucagagccucgccuuuauccggaaguccgaugaacuguuacacaacguaaaugucgggaagucaacgacaaacauuaugauaaccacuaucauuaucgugauuaucguuauacugcuacuccugaucgcggugggacuuuucuuguauugcaaagcccgcugaggacuaguguccaccugucccuccugggcugcuggauugucucguuuuccugccaaauaaacaggaucagcgcuuuacagaucuaaaaaaaaaaaaaaaaaaaaaaaaaaaaaaaaaaaaaaaaaaaaaaaaaaaaaaaaaaaaaaaaugcaucccccccccccccccccccccccccccccccaaaggcucuuuucagagccaccagaauu

SEQ ID NO: 16584 - RNA, 1814 nt, Artificial Sequence
  mRNA product Design b-2 comprising derived and/or modified sequence from HRSV(Memphis-37)__AIY60640.1__F-del_DSCav1_mut4 (opt4)
gggagagccucugcuggaguccggggaguggcguuggcugcuagagcgaagcuuaccauggagcugcccauccugaagaccaacgccaucaccaccauccuggccgccgugacccugugcuucgccagcagccagaacaucaccgaggaguucuaccagagcaccugcagcgccgugagcaagggcuaccugagcgcccugagaaccggcugguacaccagcgugaucaccaucgagcugagcaacaucaaggagaacaagugcaacggcaccgacgccaaggugaagcugaucaagcaggagcuggacaaguacaagaacgccgugaccgagcugcagcugcugaugcagagcacccccgccgccggcagcggcagcgccaucugcagcggcaucgccgugugcaaggugcugcaccuggagggcgaggugaacaagaucaagaacgcccugcugagcaccaacaaggccguggugagccugagcaacggcgugagcgugcugaccuucaaggugcuggaccugaagaacuacaucgacaagcagcugcugcccauccugaacaagcagagcugcagcaucagcaacaucgagaccgugaucgaguuccagcagaagaacaacagacugcuggagaucaccagagaguucagcgugaacgccggcgugaccacccccgugagcaccuacaugcugaccaacagcgagcugcugagccugaucaacgacaugcccaucaccaacgaccagaagaagcugaugagcaacaacgugcagaucgugagacagcagagcuacagcaucaugugcaucaucaaggaggaggugcuggccuacguggugcagcugccccuguacggcgugaucgacacccccugcuggaagcugcacaccagcccccugugcaccaccaacaccaaggagggcagcaacaucugccugaccagaaccgacagaggcugguacugcgacaacgccggcagcgugagcuucuucccccaggccgagaccugcaaggugcagagcaacagaguguucugcgacaccaugaacagcagaacccugcccagcgaggugaaccugugcaacaucgacaucuucaaccccaaguacgacugcaagaucaugaccagcaagaccgacgugagcagcagcgugaucaccagccugggcgccaucgugagcugcuacggcaagaccaagugcaccgccagcaacaagaacagaggcaucaucaagaccuucagcaacggcugcgacuacgugagcaacaagggcguggacaccgugagcgugggcaacacccuguacugcgugaacaagcaggagggcaagagccuguacgugaagggcgagcccaucaucaacuucuacgacccccugguguuccccagcgacgaguucgacgccagcaucagccaggugaacgagaagaucaaccagagccuggccuucaucagaaagagcgacgagcugcugcacaacgugaacgugggcaagagcaccaccaacaucaugaucaccaccaucaucaucgugaucaucgugauccugcugcugcugaucgccgugggccuguuccuguacugcaaggccagaugaggacuaguguccaccugucccuccugggcugcuggauugucucguuuuccugccaaauaaacaggaucagcgcuuuacagaucuaaaaaaaaaaaaaaaaaaaaaaaaaaaaaaaaaaaaaaaaaaaaaaaaaaaaaaaaaaaaaaaaugcaucccccccccccccccccccccccccccccccaaaggcucuuuucagagccaccagaauu

SEQ ID NO: 16585 - RNA, 1814 nt, Artificial Sequence
  mRNA product Design b-2 comprising derived and/or modified sequence from HRSV(Memphis-37)__AIY60640.1__F-del_DSCav1_mut4 (opt5)
gggagagccucugcuggaguccggggaguggcguuggcugcuagagcgaagcuuaccauggagcugcccauccucaagaccaacgccauuacaacgauccuggcugccgugacccuuugcuucgcgagcucccagaauauuacagaagaguuuuaccaaucuaccuguagcgcugucuccaaaggcuaucugucugcccucagaacagggugguacaccagcguuaucacaauugaacuguccaacaucaaggagaauaaaugcaacggaaccgacgccaaggugaaacuuaucaagcaggaacuggauaaguauaaaaaugcugugacggagcuccagcugcugaugcagucuaccccugccgcuggcagcggguccgccauuuguagcggaaucgcggucugcaaggugcuccaccuggagggcgaaguuaacaaaauuaagaaugcccuucugucuacaaacaaagcuguggucucccucagcaauggggugucuguucugaccuucaaggugcuugaccugaagaacuacaucgauaaacaacuccugccgauucugaauaagcaguccuguagcaucucuaacauugagacagucaucgaauuucagcagaaaaauaaccggcuccuggagaucacccgcgaguucuccgugaaugccggagugacgacacccgucagcaccuauaugcuuacaaacuccgaacugcucucucugauuaacgacaugccuaucaccaaugaucaaaagaaacuuaugagcaacaauguucagauugugagacagcaguccuacagcaucaugugcauuaucaaggaggaagugcuggcuuaugucgugcaacucccccuguacggcguuaucgacaccccuuguuggaaacugcauacaucuccccucugcacgaccaacacaaaggagggcuccaauauuugucugacccggacagaucgcgggugguacugcgacaacgccggaagcgugagcuuuuucccucaggcggaaaccuguaagguccagucuaauagaguguuuugcgauacgaugaacuccagaacacugccgucugagguuaaucucugcaacaucgacauuuucaaucccaaauaugauuguaagaucaugaccagcaaaaccgacguguccagcucugucauuacaucccugggcgccaucgugagcugcuacgggaagaccaaauguacagcuucuaacaagaaucggggaaucauuaagacguuuuccaacggcugcgauuaugucagcaauaaagggguggacaccguuuccgugggaaacacacuuuacugugucaacaagcaagagggcaaaucucuguaugugaagggcgaaccuaucauuaauuucuacgacccccucguuuuuccuagcgaugaguucgacgccuccaucucucaggugaacgaaaagauuaaucagagccuggcuuuuauccgcaaguccgaugagcugcuccacaacgucaauguggggaaaagcaccacaaacauuaugaucaccacgaucauuaucgugauuaucguuauucugcuucugcucaucgccgucggacuguuccuguauugcaaagccagaugaggacuaguguccaccugucccuccugggcugcuggauugucucguuuuccugccaaauaaacaggaucagcgcuuuacagaucuaaaaaaaaaaaaaaaaaaaaaaaaaaaaaaaaaaaaaaaaaaaaaaaaaaaaaaaaaaaaaaaaugcaucccccccccccccccccccccccccccccccaaaggcucuuuucagagccaccagaauu

SEQ ID NO: 16586 - RNA, 1814 nt, Artificial Sequence
  mRNA product Design b-2 comprising derived and/or modified sequence from HRSV(Memphis-37)__AIY60640.1__F-del_DSCav1_mut4 (opt6)
gggagagccucugcuggaguccggggaguggcguuggcugcuagagcgaagcuuaccauggaacuaccaauacucaaaacaaacgcaauaacaacuauacuagccgcaguuacacucugcuucgcuucaucacaaaauaucacagaagaauuuuaccaaucuacauguucagcuguauccaaagguuaccuuucagcacuacgaacaggaugguauaccucaguaaucaccaucgaacucucgaacauaaaagaaaacaaauguaacggaaccgaugcuaaagucaagcucauaaaacaagaacuagacaaauacaaaaacgcaguaaccgaacuacaacuacuuaugcaaucaacaccagcugcaggcucaggcucagcaaucugcucaggcauagcuguaugcaaaguacuacaucuagaaggagaaguaaacaaaauaaaaaacgcauuauuaucaacaaauaaagcaguaguaucacuaucaaauggaguaucaguacucacauucaaaguacuagaucuaaaaaacuacauugacaaacaauuacuaccaauccucaacaaacaaucaugcucaauauccaacauagaaacaguaauagaauuucaacaaaaaaacaaucgacuacuagaaauaacaagagaauuuucagucaaugccggaguuacaacacccguaagcacuuacaugcuaaccaacucagaacuacuaucacuaauaaacgacaugccaauuacaaacgaccaaaaaaaacuaaugucaaauaacguacaaauaguacgucaacaaucauacucaauaaugugcauaauaaaagaagaaguccuagcauacguaguacaauuacccuuauauggcguaauagacacaccaugcuggaaacuacacacauccccacucugcaccaccaacaccaaagaaggcuccaacauaugucuaacccgaaccgacagagguugguauugugauaacgcuggcuccguaucauucuucccacaagcagaaacauguaaaguacaaucaaacagaguauucugcgauacaaugaauagcagaacacuaccaucagaaguaaacuuaugcaacaucgacaucuucaaucccaaauacgacugcaaaauaaugacauccaaaacugacguuucuucaagcguaauaacaucuuuaggagcaauaguauccugcuacggaaaaacuaaaugcacagcauccaauaaaaaccguggaauaauaaaaacauucucaaauggcugcgacuacgucucaaacaaaggcguagacaccguuagugucggaaacacacuauauugcguaaauaaacaagaaggaaaauccuuauacguaaaaggcgaaccaauaauuaacuucuaugacccccucguauuuccauccgaugaauuugacgcaucaaucucgcaaguaaacgaaaaaauaaaccaaagccuagcauucauaagaaaauccgacgaacuacuccacaauguaaauguaggaaaaucaacuaccaacauaaugauuacuacuauaauaauaguaauuauagucaucuuacuacuauuaauagcagucggauuauuccuauacugcaaagcaagauagggacuaguguccaccugucccuccugggcugcuggauugucucguuuuccugccaaauaaacaggaucagcgcuuuacagaucuaaaaaaaaaaaaaaaaaaaaaaaaaaaaaaaaaaaaaaaaaaaaaaaaaaaaaaaaaaaaaaaaugcaucccccccccccccccccccccccccccccccaaaggcucuuuucagagccaccagaauu

SEQ ID NO: 16587 - RNA, 1814 nt, Artificial Sequence
  mRNA product Design b-2 comprising derived and/or modified sequence from HRSV(Memphis-37)__AIY60640.1__F-del_DSCav1_mut4 (opt11)
gggagagccucugcuggaguccggggaguggcguuggcugcuagagcgaagcuuaccauggagcuccccauccuaaaaaccaacgccaucaccaccauccucgccgccgucacccuaugcuucgcuucaucacaaaacaucaccgaagaauuuuaccaaucuaccugcuccgccgucuccaaaggauaucucagcgcccuacggaccggcugguacaccuccgucauaaccaucgaacucaguaacaucaaagaaaacaaaugcaacggcaccgacgccaaagucaaacuaaucaaacaagaacuagauaaauacaaaaacgcggucaccgaacuacaacuccuaaugcaaagcacccccgccgccggauccggcuccgccauaugcuccggcauugcugucugcaaaguacuacaccucgagggcgaggucaacaaaaucaaaaacgcacuacucagcacuaauaaagccguaguaucccuaucaaacggugucucagucuuaacauucaaaguacucgaccuaaagaacuacaucgacaaacaacuccuacccauccucaacaagcaguccuguucuaucucaaacaucgaaaccgucaucgaauuucaacaaaagaacaaccgccuccucgaaaucacacgcgaguucuccgucaacgcaggaguaaccacccccgucuccaccuacaugcucacaaacucggaacuccucucacuaaucaacgacaugcccaucaccaacgaccaaaagaaacucaugagcaacaacguucaaaucguccgccaacaaucauacuccaucaugugcauaaucaaagaagaaguccuagcuuacgucguccagcugccccucuacggagucaucgacacgcccugcuggaaacuacacacaagcccccucugcaccaccaacaccaaagaaggcuccaacauaugccucacacggaccgaccgcgguugguacugcgacaacgccggcuccgucuccuucuucccccaagcagaaacuugcaaaguccaauccaaccgcguauucugcgacacaaugaacagcagaacacucccuagcgaagucaaccucugcaacaucgacauauucaaccccaaauacgacugcaaaaucaugacgucaaaaaccgacgucuccagcuccguuaucaccucacucggcgccaucgucagcugcuacggcaaaacuaaaugcaccgccuccaacaaaaaccgcggcaucauuaaaaccuucagcaacggcugcgacuacgucuccaacaaaggugucgauacgguauccgucggaaacacccuauacugcgucaacaaacaagaaggcaaaucucucuacgucaaaggcgaacccauaaucaauuucuacgacccccuagucuuccccuccgaugaauuugacgccuccaucagccaagucaacgagaaaaucaaccaaucacuagccuucauccggaaauccgacgaacuccuacacaacguaaacgucggcaaauccaccaccaauauaaugaucacaaccaucaucaucguaaucaucgucauccuccuccuacucaucgccgucggauuauucuuauacugcaaagcccgcuaaggacuaguguccaccugucccuccugggcugcuggauugucucguuuuccugccaaauaaacaggaucagcgcuuuacagaucuaaaaaaaaaaaaaaaaaaaaaaaaaaaaaaaaaaaaaaaaaaaaaaaaaaaaaaaaaaaaaaaaugcaucccccccccccccccccccccccccccccccaaaggcucuuuucagagccaccagaauu

SEQ ID NO: 16588 - RNA, 1834 nt, Artificial Sequence
  mRNA product Design b-3 comprising derived and/or modified sequence from HRSV(Memphis-37)__AIY60640.1__F-del_DSCav1_mut4 (opt1)
gggagagucccgcagucggcguccagcggcucugcuuguucgugugugugucguugcaggccuuauucaagcuuaccauggagcugcccauccucaagaccaacgccaucaccacgauccuggccgcggugacccugugcuucgccagcucccagaacaucaccgaggaguucuaccagagcacgugcuccgccgucagcaagggcuaccucuccgcccugcgcaccgggugguacaccagcgugaucaccaucgagcuguccaacaucaaggagaacaagugcaacggcaccgacgccaaggugaagcucaucaagcaggagcuggacaaguacaagaacgcggucacggagcugcagcuccugaugcagagcaccccggccgccggcuccgggagcgcgaucugcuccggcaucgccgucugcaaggugcugcaccucgagggcgaggugaacaagaucaagaacgcccugcuguccaccaacaaggccgucgugagccucuccaacggggugagcguccugaccuucaaggugcuggaccucaagaacuacaucgacaagcagcugcugcccauccugaacaagcagagcugcuccaucagcaacaucgagaccgucaucgaguuccagcagaagaacaaccgccuccuggagaucacgcgggaguucagcgugaacgcgggcgugaccacccccgucuccaccuacaugcugacgaacagcgagcuccugucccugaucaacgacaugccgaucaccaacgaccagaagaagcucaugagcaacaacgugcagaucgugcgccagcaguccuacagcaucaugugcaucaucaaggaggagguccuggccuacguggugcagcugccccucuacggggucaucgacacccccugcuggaagcugcacaccagcccccugugcacgaccaacaccaaggagggcuccaacaucugccucacccggacggaccgcgggugguacugcgacaacgccggcagcguguccuucuucccgcaggccgagaccugcaagguccagagcaaccggguguucugcgacaccaugaacucccggacccugcccagcgaggugaaccucugcaacaucgacaucuucaaccccaaguacgacugcaagaucaugacguccaagaccgacgucagcuccagcgugaucaccucccugggcgccaucgugagcugcuacgggaagaccaagugcacggcgagcaacaagaaccgcggcaucaucaagaccuucuccaacgggugcgacuacgucagcaacaagggcguggacaccguguccgucggcaacacccuguacugcgugaacaagcaggagggcaagagccucuacgugaagggggagcccaucaucaacuucuacgacccgcuggucuuccccuccgacgaguucgacgccagcaucucccaggugaacgagaagaucaaccagagccuggccuucauccggaaguccgacgagcuccugcacaacgugaacgucggcaagagcaccacgaacaucaugaucaccaccaucaucaucgugaucaucgugauccugcugcuccugaucgccgucgggcuguuccucuacugcaaggcccgcugaggacuaguguccaccugucccuccugggcugcuggauugucucguuuuccugccaaauaaacaggaucagcgcuuuacagaucuaaaaaaaaaaaaaaaaaaaaaaaaaaaaaaaaaaaaaaaaaaaaaaaaaaaaaaaaaaaaaaaaugcaucccccccccccccccccccccccccccccccaaaggcucuuuucagagccaccagaauu

SEQ ID NO: 16589 - RNA, 1834 nt, Artificial Sequence
  mRNA product Design b-3 comprising derived and/or modified sequence from HRSV(Memphis-37)__AIY60640.1__F-del_DSCav1_mut4 (opt1)
gggagagucccgcagucggcguccagcggcucugcuuguucgugugugugucguugcaggccuuauucaagcuuaccauggagcugcccauccucaagaccaacgccaucaccacgauccuggccgcggugacccugugcuucgccagcucccagaacaucaccgaggaguucuaccagagcacgugcuccgccgucagcaagggcuaccucuccgcccugcgcaccgggugguacaccagcgugaucaccaucgagcuguccaacaucaaggagaacaagugcaacggcaccgacgccaaggugaagcucaucaagcaggagcuggacaaguacaagaacgcggucacggagcugcagcuccugaugcagagcaccccggccgccggguccggcagcgccaucugcuccgggaucgcggugugcaaggugcugcaccucgagggcgaggucaacaagaucaagaacgcccugcugagcaccaacaaggccguggugucccucagcaacggcgucuccgugcugaccuucaaggugcuggaccucaagaacuacaucgacaagcagcugcugcccauccucaacaagcagagcugcuccaucagcaacaucgagacggucaucgaguuccagcagaagaacaaccggcugcuggagaucacccgcgaguucuccgugaacgccggggugaccacccccgucagcacguacaugcucaccaacagcgagcugcugucccucaucaacgacaugcccaucaccaacgaccagaagaagcugaugagcaacaacgugcagaucgugcggcagcaguccuacagcaucaugugcaucaucaaggaggagguccuggccuacguggugcagcucccgcuguacggcgucaucgacacccccugcuggaagcugcacacgagcccccucugcaccaccaacaccaaggagggguccaacaucugccugacgcgcaccgaccggggcugguacugcgacaacgcgggguccgugagcuucuucccccaggccgagaccugcaaggugcaguccaaccgcgucuucugcgacaccaugaacagccggacgcucccguccgaggugaaccugugcaacaucgacaucuucaaccccaaguacgacugcaagaucaugaccagcaagaccgacgucuccagcuccgugaucaccagccugggcgccaucguguccugcuacggcaagacgaagugcaccgccagcaacaagaaccgggggaucaucaagaccuucuccaacggcugcgacuacgucagcaacaaggggguggacaccgugagcgucggcaacacgcucuacugcgugaacaagcaggagggcaagucccuguacgugaagggggagcccaucaucaacuucuacgacccccuggucuucccgagcgacgaguucgacgccuccaucagccaggugaacgagaagaucaaccagucccucgcguucauccgcaagagcgacgagcugcugcacaacgugaacgucggcaaguccaccaccaacaucaugaucaccaccaucaucaucgugaucaucgugauccuccugcugcucaucgccgucgggcuguuccuguacugcaaggcccggugaggacuaguguccaccugucccuccugggcugcuggauugucucguuuuccugccaaauaaacaggaucagcgcuuuacagaucuaaaaaaaaaaaaaaaaaaaaaaaaaaaaaaaaaaaaaaaaaaaaaaaaaaaaaaaaaaaaaaaaugcaucccccccccccccccccccccccccccccccaaaggcucuuuucagagccaccagaauu

SEQ ID NO: 16590 - RNA, 1834 nt, Artificial Sequence
  mRNA product Design b-3 comprising derived and/or modified sequence from HRSV(Memphis-37)__AIY60640.1__F-del_DSCav1_mut4 (opt2)
gggagagucccgcagucggcguccagcggcucugcuuguucgugugugugucguugcaggccuuauucaagcuuaccauggagcuccccauccucaagaccaacgccaucaccaccauccucgccgccgucacccucugcuucgccuccucccagaacaucaccgaggaguucuaccaguccaccugcuccgccgucuccaagggcuaccucuccgcccuccgcaccggcugguacaccuccgucaucaccaucgagcucuccaacaucaaggagaacaagugcaacggcaccgacgccaaggucaagcucaucaagcaggagcucgacaaguacaagaacgccgucaccgagcuccagcuccucaugcaguccacccccgccgccggcuccggcuccgccaucugcuccggcaucgccgucugcaagguccuccaccucgagggcgaggucaacaagaucaagaacgcccuccucuccaccaacaaggccgucgucucccucuccaacggcgucuccguccucaccuucaagguccucgaccucaagaacuacaucgacaagcagcuccuccccauccucaacaagcaguccugcuccaucuccaacaucgagaccgucaucgaguuccagcagaagaacaaccgccuccucgagaucacccgcgaguucuccgucaacgccggcgucaccacccccgucuccaccuacaugcucaccaacuccgagcuccucucccucaucaacgacaugcccaucaccaacgaccagaagaagcucauguccaacaacguccagaucguccgccagcaguccuacuccaucaugugcaucaucaaggaggagguccucgccuacgucguccagcucccccucuacggcgucaucgacacccccugcuggaagcuccacaccuccccccucugcaccaccaacaccaaggagggcuccaacaucugccucacccgcaccgaccgcggcugguacugcgacaacgccggcuccgucuccuucuucccccaggccgagaccugcaagguccaguccaaccgcgucuucugcgacaccaugaacucccgcacccuccccuccgaggucaaccucugcaacaucgacaucuucaaccccaaguacgacugcaagaucaugaccuccaagaccgacgucuccuccuccgucaucaccucccucggcgccaucgucuccugcuacggcaagaccaagugcaccgccuccaacaagaaccgcggcaucaucaagaccuucuccaacggcugcgacuacgucuccaacaagggcgucgacaccgucuccgucggcaacacccucuacugcgucaacaagcaggagggcaagucccucuacgucaagggcgagcccaucaucaacuucuacgacccccucgucuuccccuccgacgaguucgacgccuccaucucccaggucaacgagaagaucaaccagucccucgccuucauccgcaaguccgacgagcuccuccacaacgucaacgucggcaaguccaccaccaacaucaugaucaccaccaucaucaucgucaucaucgucauccuccuccuccucaucgccgucggccucuuccucuacugcaaggcccgcugaggacuaguguccaccugucccuccugggcugcuggauugucucguuuuccugccaaauaaacaggaucagcgcuuuacagaucuaaaaaaaaaaaaaaaaaaaaaaaaaaaaaaaaaaaaaaaaaaaaaaaaaaaaaaaaaaaaaaaaugcaucccccccccccccccccccccccccccccccaaaggcucuuuucagagccaccagaauu

SEQ ID NO: 16591 - RNA, 1834 nt, Artificial Sequence
  mRNA product Design b-3 comprising derived and/or modified sequence from HRSV(Memphis-37)__AIY60640.1__F-del_DSCav1_mut4 (opt3)
gggagagucccgcagucggcguccagcggcucugcuuguucgugugugugucguugcaggccuuauucaagcuuaccauggagcugcccauccucaagaccaacgccauuacaacuauacuugcugcagugacgcugugcuucgccagcucccagaauaucaccgaagaguuuuaccaaucuacauguucagcggucaguaaaggcuauuugagcgcuuuaagaacugggugguacaccuccguuauuacaaucgaacugucuaacauuaaggagaauaaaugcaacggaaccgacgccaaggugaaacuaaucaagcaggaacucgauaaguauaaaaaugcaguaacugagcugcagcuucugaugcagucgaccccugccgcugguucaggcagcgcaauauguagugggaucgccgugugcaaggucuugcaccucgagggagaagugaacaaaauuaagaaugcucugcuguccacaaacaaagccguugugucucucagcaauggcgucuccguguuaacguucaagguacuggaccuuaagaacuacaucgauaaacaauugcugccaauucuaaauaagcagucauguaguaucagcaacauagagacuguuauugaauuucagcagaaaaauaacaggcuccuggagaucacccgggaguucucugugaaugcgggugucacaacuccgguguccaccuauaugcuuacaaacucagaacuguugagccucauuaacgacaugcccaucaccaaugaucaaaagaaacugaugaguaacaaugugcagaucguccgccagcagucuuacuccauuaugugcauaaucaaggaggaaguuuuagcauaugugguacaacugccucucuacggggugauugacacgccauguuggaaacuucauacuagcccccugugcacaaccaacacuaaggagggaucgaauaucuguuugacacgaaccgaucguggcugguacugcgacaacgccggcucugucuccuuuuucccucaggcugaaacguguaaggugcagucaaauagaguguuuugcgauaccaugaacaguagaacacugccaagcgaggugaaucucugcaacauagacauuuucaaucccaaauaugauuguaagaucaugacuuccaaaaccgacgucucuagcucagugaucacaagucugggggccauuguauccugcuacggaaagacuaaauguaccgcaagcaacaagaauagggguaucauuaagacauuuucuaacggcugcgauuauguuucaaauaaagggguggacaccgucagugugggaaacacucuuuacugugucaacaagcaagagggcaaaagccuguaugugaagggugaaccuauaaucaauuucuacgacccauugguuuuuccguccgaugaguucgacgcuucuauuucgcagguuaacgagaaaaucaaucagagccucgccuuuauccggaaguccgaugaacuguuacacaacguaaaugucgggaagucaacgacaaacauuaugauaaccacuaucauuaucgugauuaucguuauacugcuacuccugaucgcggugggacuuuucuuguauugcaaagcccgcugaggacuaguguccaccugucccuccugggcugcuggauugucucguuuuccugccaaauaaacaggaucagcgcuuuacagaucuaaaaaaaaaaaaaaaaaaaaaaaaaaaaaaaaaaaaaaaaaaaaaaaaaaaaaaaaaaaaaaaaugcaucccccccccccccccccccccccccccccccaaaggcucuuuucagagccaccagaauu

SEQ ID NO: 16592 - RNA, 1834 nt, Artificial Sequence
  mRNA product Design b-3 comprising derived and/or modified sequence from HRSV(Memphis-37)__AIY60640.1__F-del_DSCav1_mut4 (opt4)
gggagagucccgcagucggcguccagcggcucugcuuguucgugugugugucguugcaggccuuauucaagcuuaccauggagcugcccauccugaagaccaacgccaucaccaccauccuggccgccgugacccugugcuucgccagcagccagaacaucaccgaggaguucuaccagagcaccugcagcgccgugagcaagggcuaccugagcgcccugagaaccggcugguacaccagcgugaucaccaucgagcugagcaacaucaaggagaacaagugcaacggcaccgacgccaaggugaagcugaucaagcaggagcuggacaaguacaagaacgccgugaccgagcugcagcugcugaugcagagcacccccgccgccggcagcggcagcgccaucugcagcggcaucgccgugugcaaggugcugcaccuggagggcgaggugaacaagaucaagaacgcccugcugagcaccaacaaggccguggugagccugagcaacggcgugagcgugcugaccuucaaggugcuggaccugaagaacuacaucgacaagcagcugcugcccauccugaacaagcagagcugcagcaucagcaacaucgagaccgugaucgaguuccagcagaagaacaacagacugcuggagaucaccagagaguucagcgugaacgccggcgugaccacccccgugagcaccuacaugcugaccaacagcgagcugcugagccugaucaacgacaugcccaucaccaacgaccagaagaagcugaugagcaacaacgugcagaucgugagacagcagagcuacagcaucaugugcaucaucaaggaggaggugcuggccuacguggugcagcugccccuguacggcgugaucgacacccccugcuggaagcugcacaccagcccccugugcaccaccaacaccaaggagggcagcaacaucugccugaccagaaccgacagaggcugguacugcgacaacgccggcagcgugagcuucuucccccaggccgagaccugcaaggugcagagcaacagaguguucugcgacaccaugaacagcagaacccugcccagcgaggugaaccugugcaacaucgacaucuucaaccccaaguacgacugcaagaucaugaccagcaagaccgacgugagcagcagcgugaucaccagccugggcgccaucgugagcugcuacggcaagaccaagugcaccgccagcaacaagaacagaggcaucaucaagaccuucagcaacggcugcgacuacgugagcaacaagggcguggacaccgugagcgugggcaacacccuguacugcgugaacaagcaggagggcaagagccuguacgugaagggcgagcccaucaucaacuucuacgacccccugguguuccccagcgacgaguucgacgccagcaucagccaggugaacgagaagaucaaccagagccuggccuucaucagaaagagcgacgagcugcugcacaacgugaacgugggcaagagcaccaccaacaucaugaucaccaccaucaucaucgugaucaucgugauccugcugcugcugaucgccgugggccuguuccuguacugcaaggccagaugaggacuaguguccaccugucccuccugggcugcuggauugucucguuuuccugccaaauaaacaggaucagcgcuuuacagaucuaaaaaaaaaaaaaaaaaaaaaaaaaaaaaaaaaaaaaaaaaaaaaaaaaaaaaaaaaaaaaaaaugcaucccccccccccccccccccccccccccccccaaaggcucuuuucagagccaccagaauu

SEQ ID NO: 16593 - RNA, 1834 nt, Artificial Sequence
  mRNA product Design b-3 comprising derived and/or modified sequence from HRSV(Memphis-37)__AIY60640.1__F-del_DSCav1_mut4 (opt5)
gggagagucccgcagucggcguccagcggcucugcuuguucgugugugugucguugcaggccuuauucaagcuuaccauggagcugcccauccucaagaccaacgccauuacaacgauccuggcugccgugacccuuugcuucgcgagcucccagaauauuacagaagaguuuuaccaaucuaccuguagcgcugucuccaaaggcuaucugucugcccucagaacagggugguacaccagcguuaucacaauugaacuguccaacaucaaggagaauaaaugcaacggaaccgacgccaaggugaaacuuaucaagcaggaacuggauaaguauaaaaaugcugugacggagcuccagcugcugaugcagucuaccccugccgcuggcagcggguccgccauuuguagcggaaucgcggucugcaaggugcuccaccuggagggcgaaguuaacaaaauuaagaaugcccuucugucuacaaacaaagcuguggucucccucagcaauggggugucuguucugaccuucaaggugcuugaccugaagaacuacaucgauaaacaacuccugccgauucugaauaagcaguccuguagcaucucuaacauugagacagucaucgaauuucagcagaaaaauaaccggcuccuggagaucacccgcgaguucuccgugaaugccggagugacgacacccgucagcaccuauaugcuuacaaacuccgaacugcucucucugauuaacgacaugccuaucaccaaugaucaaaagaaacuuaugagcaacaauguucagauugugagacagcaguccuacagcaucaugugcauuaucaaggaggaagugcuggcuuaugucgugcaacucccccuguacggcguuaucgacaccccuuguuggaaacugcauacaucuccccucugcacgaccaacacaaaggagggcuccaauauuugucugacccggacagaucgcgggugguacugcgacaacgccggaagcgugagcuuuuucccucaggcggaaaccuguaagguccagucuaauagaguguuuugcgauacgaugaacuccagaacacugccgucugagguuaaucucugcaacaucgacauuuucaaucccaaauaugauuguaagaucaugaccagcaaaaccgacguguccagcucugucauuacaucccugggcgccaucgugagcugcuacgggaagaccaaauguacagcuucuaacaagaaucggggaaucauuaagacguuuuccaacggcugcgauuaugucagcaauaaagggguggacaccguuuccgugggaaacacacuuuacugugucaacaagcaagagggcaaaucucuguaugugaagggcgaaccuaucauuaauuucuacgacccccucguuuuuccuagcgaugaguucgacgccuccaucucucaggugaacgaaaagauuaaucagagccuggcuuuuauccgcaaguccgaugagcugcuccacaacgucaauguggggaaaagcaccacaaacauuaugaucaccacgaucauuaucgugauuaucguuauucugcuucugcucaucgccgucggacuguuccuguauugcaaagccagaugaggacuaguguccaccugucccuccugggcugcuggauugucucguuuuccugccaaauaaacaggaucagcgcuuuacagaucuaaaaaaaaaaaaaaaaaaaaaaaaaaaaaaaaaaaaaaaaaaaaaaaaaaaaaaaaaaaaaaaaugcaucccccccccccccccccccccccccccccccaaaggcucuuuucagagccaccagaauu

SEQ ID NO: 16594 - RNA, 1834 nt, Artificial Sequence
  mRNA product Design b-3 comprising derived and/or modified sequence from HRSV(Memphis-37)__AIY60640.1__F-del_DSCav1_mut4 (opt6)
gggagagucccgcagucggcguccagcggcucugcuuguucgugugugugucguugcaggccuuauucaagcuuaccauggaacuaccaauacucaaaacaaacgcaauaacaacuauacuagccgcaguuacacucugcuucgcuucaucacaaaauaucacagaagaauuuuaccaaucuacauguucagcuguauccaaagguuaccuuucagcacuacgaacaggaugguauaccucaguaaucaccaucgaacucucgaacauaaaagaaaacaaauguaacggaaccgaugcuaaagucaagcucauaaaacaagaacuagacaaauacaaaaacgcaguaaccgaacuacaacuacuuaugcaaucaacaccagcugcaggcucaggcucagcaaucugcucaggcauagcuguaugcaaaguacuacaucuagaaggagaaguaaacaaaauaaaaaacgcauuauuaucaacaaauaaagcaguaguaucacuaucaaauggaguaucaguacucacauucaaaguacuagaucuaaaaaacuacauugacaaacaauuacuaccaauccucaacaaacaaucaugcucaauauccaacauagaaacaguaauagaauuucaacaaaaaaacaaucgacuacuagaaauaacaagagaauuuucagucaaugccggaguuacaacacccguaagcacuuacaugcuaaccaacucagaacuacuaucacuaauaaacgacaugccaauuacaaacgaccaaaaaaaacuaaugucaaauaacguacaaauaguacgucaacaaucauacucaauaaugugcauaauaaaagaagaaguccuagcauacguaguacaauuacccuuauauggcguaauagacacaccaugcuggaaacuacacacauccccacucugcaccaccaacaccaaagaaggcuccaacauaugucuaacccgaaccgacagagguugguauugugauaacgcuggcuccguaucauucuucccacaagcagaaacauguaaaguacaaucaaacagaguauucugcgauacaaugaauagcagaacacuaccaucagaaguaaacuuaugcaacaucgacaucuucaaucccaaauacgacugcaaaauaaugacauccaaaacugacguuucuucaagcguaauaacaucuuuaggagcaauaguauccugcuacggaaaaacuaaaugcacagcauccaauaaaaaccguggaauaauaaaaacauucucaaauggcugcgacuacgucucaaacaaaggcguagacaccguuagugucggaaacacacuauauugcguaaauaaacaagaaggaaaauccuuauacguaaaaggcgaaccaauaauuaacuucuaugacccccucguauuuccauccgaugaauuugacgcaucaaucucgcaaguaaacgaaaaaauaaaccaaagccuagcauucauaagaaaauccgacgaacuacuccacaauguaaauguaggaaaaucaacuaccaacauaaugauuacuacuauaauaauaguaauuauagucaucuuacuacuauuaauagcagucggauuauuccuauacugcaaagcaagauagggacuaguguccaccugucccuccugggcugcuggauugucucguuuuccugccaaauaaacaggaucagcgcuuuacagaucuaaaaaaaaaaaaaaaaaaaaaaaaaaaaaaaaaaaaaaaaaaaaaaaaaaaaaaaaaaaaaaaaugcaucccccccccccccccccccccccccccccccaaaggcucuuuucagagccaccagaauu

SEQ ID NO: 16595 - RNA, 1834 nt, Artificial Sequence
  mRNA product Design b-3 comprising derived and/or modified sequence from HRSV(Memphis-37)__AIY60640.1__F-del_DSCav1_mut4 (opt11)
gggagagucccgcagucggcguccagcggcucugcuuguucgugugugugucguugcaggccuuauucaagcuuaccauggagcuccccauccuaaaaaccaacgccaucaccaccauccucgccgccgucacccuaugcuucgcuucaucacaaaacaucaccgaagaauuuuaccaaucuaccugcuccgccgucuccaaaggauaucucagcgcccuacggaccggcugguacaccuccgucauaaccaucgaacucaguaacaucaaagaaaacaaaugcaacggcaccgacgccaaagucaaacuaaucaaacaagaacuagauaaauacaaaaacgcggucaccgaacuacaacuccuaaugcaaagcacccccgccgccggauccggcuccgccauaugcuccggcauugcugucugcaaaguacuacaccucgagggcgaggucaacaaaaucaaaaacgcacuacucagcacuaauaaagccguaguaucccuaucaaacggugucucagucuuaacauucaaaguacucgaccuaaagaacuacaucgacaaacaacuccuacccauccucaacaagcaguccuguucuaucucaaacaucgaaaccgucaucgaauuucaacaaaagaacaaccgccuccucgaaaucacacgcgaguucuccgucaacgcaggaguaaccacccccgucuccaccuacaugcucacaaacucggaacuccucucacuaaucaacgacaugcccaucaccaacgaccaaaagaaacucaugagcaacaacguucaaaucguccgccaacaaucauacuccaucaugugcauaaucaaagaagaaguccuagcuuacgucguccagcugccccucuacggagucaucgacacgcccugcuggaaacuacacacaagcccccucugcaccaccaacaccaaagaaggcuccaacauaugccucacacggaccgaccgcgguugguacugcgacaacgccggcuccgucuccuucuucccccaagcagaaacuugcaaaguccaauccaaccgcguauucugcgacacaaugaacagcagaacacucccuagcgaagucaaccucugcaacaucgacauauucaaccccaaauacgacugcaaaaucaugacgucaaaaaccgacgucuccagcuccguuaucaccucacucggcgccaucgucagcugcuacggcaaaacuaaaugcaccgccuccaacaaaaaccgcggcaucauuaaaaccuucagcaacggcugcgacuacgucuccaacaaaggugucgauacgguauccgucggaaacacccuauacugcgucaacaaacaagaaggcaaaucucucuacgucaaaggcgaacccauaaucaauuucuacgacccccuagucuuccccuccgaugaauuugacgccuccaucagccaagucaacgagaaaaucaaccaaucacuagccuucauccggaaauccgacgaacuccuacacaacguaaacgucggcaaauccaccaccaauauaaugaucacaaccaucaucaucguaaucaucgucauccuccuccuacucaucgccgucggauuauucuuauacugcaaagcccgcuaaggacuaguguccaccugucccuccugggcugcuggauugucucguuuuccugccaaauaaacaggaucagcgcuuuacagaucuaaaaaaaaaaaaaaaaaaaaaaaaaaaaaaaaaaaaaaaaaaaaaaaaaaaaaaaaaaaaaaaaugcaucccccccccccccccccccccccccccccccaaaggcucuuuucagagccaccagaauu

SEQ ID NO: 16596 - RNA, 1885 nt, Artificial Sequence
  mRNA product Design b-4 comprising derived and/or modified sequence from HRSV(Memphis-37)__AIY60640.1__F-del_DSCav1_mut4 (opt1)
gggagagucccgcagucggcguccagcggcucugcuuguucgugugugugucguugcaggccuuauucaagcuuaccauggagcugcccauccucaagaccaacgccaucaccacgauccuggccgcggugacccugugcuucgccagcucccagaacaucaccgaggaguucuaccagagcacgugcuccgccgucagcaagggcuaccucuccgcccugcgcaccgggugguacaccagcgugaucaccaucgagcuguccaacaucaaggagaacaagugcaacggcaccgacgccaaggugaagcucaucaagcaggagcuggacaaguacaagaacgcggucacggagcugcagcuccugaugcagagcaccccggccgccggcuccgggagcgcgaucugcuccggcaucgccgucugcaaggugcugcaccucgagggcgaggugaacaagaucaagaacgcccugcuguccaccaacaaggccgucgugagccucuccaacggggugagcguccugaccuucaaggugcuggaccucaagaacuacaucgacaagcagcugcugcccauccugaacaagcagagcugcuccaucagcaacaucgagaccgucaucgaguuccagcagaagaacaaccgccuccuggagaucacgcgggaguucagcgugaacgcgggcgugaccacccccgucuccaccuacaugcugacgaacagcgagcuccugucccugaucaacgacaugccgaucaccaacgaccagaagaagcucaugagcaacaacgugcagaucgugcgccagcaguccuacagcaucaugugcaucaucaaggaggagguccuggccuacguggugcagcugccccucuacggggucaucgacacccccugcuggaagcugcacaccagcccccugugcacgaccaacaccaaggagggcuccaacaucugccucacccggacggaccgcgggugguacugcgacaacgccggcagcguguccuucuucccgcaggccgagaccugcaagguccagagcaaccggguguucugcgacaccaugaacucccggacccugcccagcgaggugaaccucugcaacaucgacaucuucaaccccaaguacgacugcaagaucaugacguccaagaccgacgucagcuccagcgugaucaccucccugggcgccaucgugagcugcuacgggaagaccaagugcacggcgagcaacaagaaccgcggcaucaucaagaccuucuccaacgggugcgacuacgucagcaacaagggcguggacaccguguccgucggcaacacccuguacugcgugaacaagcaggagggcaagagccucuacgugaagggggagcccaucaucaacuucuacgacccgcuggucuuccccuccgacgaguucgacgccagcaucucccaggugaacgagaagaucaaccagagccuggccuucauccggaaguccgacgagcuccugcacaacgugaacgucggcaagagcaccacgaacaucaugaucaccaccaucaucaucgugaucaucgugauccugcugcuccugaucgccgucgggcuguuccucuacugcaaggcccgcugaggacuaguaauaaggaaacuguaugaaugucugugggcaggaagugaagagauccuucuguaaagguuuuuggaauuaugucugcugaauaauaaacuuuuuugaaauaauaaaucugguagaaaaaugagaucuaaaaaaaaaaaaaaaaaaaaaaaaaaaaaaaaaaaaaaaaaaaaaaaaaaaaaaaaaaaaaaaaugcaucccccccccccccccccccccccccccccccaaaggcucuuuucagagccaccagaauu

SEQ ID NO: 16597 - RNA, 1885 nt, Artificial Sequence
  mRNA product Design b-4 comprising derived and/or modified sequence from HRSV(Memphis-37)__AIY60640.1__F-del_DSCav1_mut4 (opt1)
gggagagucccgcagucggcguccagcggcucugcuuguucgugugugugucguugcaggccuuauucaagcuuaccauggagcugcccauccucaagaccaacgccaucaccacgauccuggccgcggugacccugugcuucgccagcucccagaacaucaccgaggaguucuaccagagcacgugcuccgccgucagcaagggcuaccucuccgcccugcgcaccgggugguacaccagcgugaucaccaucgagcuguccaacaucaaggagaacaagugcaacggcaccgacgccaaggugaagcucaucaagcaggagcuggacaaguacaagaacgcggucacggagcugcagcuccugaugcagagcaccccggccgccggguccggcagcgccaucugcuccgggaucgcggugugcaaggugcugcaccucgagggcgaggucaacaagaucaagaacgcccugcugagcaccaacaaggccguggugucccucagcaacggcgucuccgugcugaccuucaaggugcuggaccucaagaacuacaucgacaagcagcugcugcccauccucaacaagcagagcugcuccaucagcaacaucgagacggucaucgaguuccagcagaagaacaaccggcugcuggagaucacccgcgaguucuccgugaacgccggggugaccacccccgucagcacguacaugcucaccaacagcgagcugcugucccucaucaacgacaugcccaucaccaacgaccagaagaagcugaugagcaacaacgugcagaucgugcggcagcaguccuacagcaucaugugcaucaucaaggaggagguccuggccuacguggugcagcucccgcuguacggcgucaucgacacccccugcuggaagcugcacacgagcccccucugcaccaccaacaccaaggagggguccaacaucugccugacgcgcaccgaccggggcugguacugcgacaacgcgggguccgugagcuucuucccccaggccgagaccugcaaggugcaguccaaccgcgucuucugcgacaccaugaacagccggacgcucccguccgaggugaaccugugcaacaucgacaucuucaaccccaaguacgacugcaagaucaugaccagcaagaccgacgucuccagcuccgugaucaccagccugggcgccaucguguccugcuacggcaagacgaagugcaccgccagcaacaagaaccgggggaucaucaagaccuucuccaacggcugcgacuacgucagcaacaaggggguggacaccgugagcgucggcaacacgcucuacugcgugaacaagcaggagggcaagucccuguacgugaagggggagcccaucaucaacuucuacgacccccuggucuucccgagcgacgaguucgacgccuccaucagccaggugaacgagaagaucaaccagucccucgcguucauccgcaagagcgacgagcugcugcacaacgugaacgucggcaaguccaccaccaacaucaugaucaccaccaucaucaucgugaucaucgugauccuccugcugcucaucgccgucgggcuguuccuguacugcaaggcccggugaggacuaguaauaaggaaacuguaugaaugucugugggcaggaagugaagagauccuucuguaaagguuuuuggaauuaugucugcugaauaauaaacuuuuuugaaauaauaaaucugguagaaaaaugagaucuaaaaaaaaaaaaaaaaaaaaaaaaaaaaaaaaaaaaaaaaaaaaaaaaaaaaaaaaaaaaaaaaugcaucccccccccccccccccccccccccccccccaaaggcucuuuucagagccaccagaauu

SEQ ID NO: 16598 - RNA, 1885 nt, Artificial Sequence
  mRNA product Design b-4 comprising derived and/or modified sequence from HRSV(Memphis-37)__AIY60640.1__F-del_DSCav1_mut4 (opt2)
gggagagucccgcagucggcguccagcggcucugcuuguucgugugugugucguugcaggccuuauucaagcuuaccauggagcuccccauccucaagaccaacgccaucaccaccauccucgccgccgucacccucugcuucgccuccucccagaacaucaccgaggaguucuaccaguccaccugcuccgccgucuccaagggcuaccucuccgcccuccgcaccggcugguacaccuccgucaucaccaucgagcucuccaacaucaaggagaacaagugcaacggcaccgacgccaaggucaagcucaucaagcaggagcucgacaaguacaagaacgccgucaccgagcuccagcuccucaugcaguccacccccgccgccggcuccggcuccgccaucugcuccggcaucgccgucugcaagguccuccaccucgagggcgaggucaacaagaucaagaacgcccuccucuccaccaacaaggccgucgucucccucuccaacggcgucuccguccucaccuucaagguccucgaccucaagaacuacaucgacaagcagcuccuccccauccucaacaagcaguccugcuccaucuccaacaucgagaccgucaucgaguuccagcagaagaacaaccgccuccucgagaucacccgcgaguucuccgucaacgccggcgucaccacccccgucuccaccuacaugcucaccaacuccgagcuccucucccucaucaacgacaugcccaucaccaacgaccagaagaagcucauguccaacaacguccagaucguccgccagcaguccuacuccaucaugugcaucaucaaggaggagguccucgccuacgucguccagcucccccucuacggcgucaucgacacccccugcuggaagcuccacaccuccccccucugcaccaccaacaccaaggagggcuccaacaucugccucacccgcaccgaccgcggcugguacugcgacaacgccggcuccgucuccuucuucccccaggccgagaccugcaagguccaguccaaccgcgucuucugcgacaccaugaacucccgcacccuccccuccgaggucaaccucugcaacaucgacaucuucaaccccaaguacgacugcaagaucaugaccuccaagaccgacgucuccuccuccgucaucaccucccucggcgccaucgucuccugcuacggcaagaccaagugcaccgccuccaacaagaaccgcggcaucaucaagaccuucuccaacggcugcgacuacgucuccaacaagggcgucgacaccgucuccgucggcaacacccucuacugcgucaacaagcaggagggcaagucccucuacgucaagggcgagcccaucaucaacuucuacgacccccucgucuuccccuccgacgaguucgacgccuccaucucccaggucaacgagaagaucaaccagucccucgccuucauccgcaaguccgacgagcuccuccacaacgucaacgucggcaaguccaccaccaacaucaugaucaccaccaucaucaucgucaucaucgucauccuccuccuccucaucgccgucggccucuuccucuacugcaaggcccgcugaggacuaguaauaaggaaacuguaugaaugucugugggcaggaagugaagagauccuucuguaaagguuuuuggaauuaugucugcugaauaauaaacuuuuuugaaauaauaaaucugguagaaaaaugagaucuaaaaaaaaaaaaaaaaaaaaaaaaaaaaaaaaaaaaaaaaaaaaaaaaaaaaaaaaaaaaaaaaugcaucccccccccccccccccccccccccccccccaaaggcucuuuucagagccaccagaauu

SEQ ID NO: 16599 - RNA, 1885 nt, Artificial Sequence
  mRNA product Design b-4 comprising derived and/or modified sequence from HRSV(Memphis-37)__AIY60640.1__F-del_DSCav1_mut4 (opt3)
gggagagucccgcagucggcguccagcggcucugcuuguucgugugugugucguugcaggccuuauucaagcuuaccauggagcugcccauccucaagaccaacgccauuacaacuauacuugcugcagugacgcugugcuucgccagcucccagaauaucaccgaagaguuuuaccaaucuacauguucagcggucaguaaaggcuauuugagcgcuuuaagaacugggugguacaccuccguuauuacaaucgaacugucuaacauuaaggagaauaaaugcaacggaaccgacgccaaggugaaacuaaucaagcaggaacucgauaaguauaaaaaugcaguaacugagcugcagcuucugaugcagucgaccccugccgcugguucaggcagcgcaauauguagugggaucgccgugugcaaggucuugcaccucgagggagaagugaacaaaauuaagaaugcucugcuguccacaaacaaagccguugugucucucagcaauggcgucuccguguuaacguucaagguacuggaccuuaagaacuacaucgauaaacaauugcugccaauucuaaauaagcagucauguaguaucagcaacauagagacuguuauugaauuucagcagaaaaauaacaggcuccuggagaucacccgggaguucucugugaaugcgggugucacaacuccgguguccaccuauaugcuuacaaacucagaacuguugagccucauuaacgacaugcccaucaccaaugaucaaaagaaacugaugaguaacaaugugcagaucguccgccagcagucuuacuccauuaugugcauaaucaaggaggaaguuuuagcauaugugguacaacugccucucuacggggugauugacacgccauguuggaaacuucauacuagcccccugugcacaaccaacacuaaggagggaucgaauaucuguuugacacgaaccgaucguggcugguacugcgacaacgccggcucugucuccuuuuucccucaggcugaaacguguaaggugcagucaaauagaguguuuugcgauaccaugaacaguagaacacugccaagcgaggugaaucucugcaacauagacauuuucaaucccaaauaugauuguaagaucaugacuuccaaaaccgacgucucuagcucagugaucacaagucugggggccauuguauccugcuacggaaagacuaaauguaccgcaagcaacaagaauagggguaucauuaagacauuuucuaacggcugcgauuauguuucaaauaaagggguggacaccgucagugugggaaacacucuuuacugugucaacaagcaagagggcaaaagccuguaugugaagggugaaccuauaaucaauuucuacgacccauugguuuuuccguccgaugaguucgacgcuucuauuucgcagguuaacgagaaaaucaaucagagccucgccuuuauccggaaguccgaugaacuguuacacaacguaaaugucgggaagucaacgacaaacauuaugauaaccacuaucauuaucgugauuaucguuauacugcuacuccugaucgcggugggacuuuucuuguauugcaaagcccgcugaggacuaguaauaaggaaacuguaugaaugucugugggcaggaagugaagagauccuucuguaaagguuuuuggaauuaugucugcugaauaauaaacuuuuuugaaauaauaaaucugguagaaaaaugagaucuaaaaaaaaaaaaaaaaaaaaaaaaaaaaaaaaaaaaaaaaaaaaaaaaaaaaaaaaaaaaaaaaugcaucccccccccccccccccccccccccccccccaaaggcucuuuucagagccaccagaauu

SEQ ID NO: 16600 - RNA, 1885 nt, Artificial Sequence
  mRNA product Design b-4 comprising derived and/or modified sequence from HRSV(Memphis-37)__AIY60640.1__F-del_DSCav1_mut4 (opt4)
gggagagucccgcagucggcguccagcggcucugcuuguucgugugugugucguugcaggccuuauucaagcuuaccauggagcugcccauccugaagaccaacgccaucaccaccauccuggccgccgugacccugugcuucgccagcagccagaacaucaccgaggaguucuaccagagcaccugcagcgccgugagcaagggcuaccugagcgcccugagaaccggcugguacaccagcgugaucaccaucgagcugagcaacaucaaggagaacaagugcaacggcaccgacgccaaggugaagcugaucaagcaggagcuggacaaguacaagaacgccgugaccgagcugcagcugcugaugcagagcacccccgccgccggcagcggcagcgccaucugcagcggcaucgccgugugcaaggugcugcaccuggagggcgaggugaacaagaucaagaacgcccugcugagcaccaacaaggccguggugagccugagcaacggcgugagcgugcugaccuucaaggugcuggaccugaagaacuacaucgacaagcagcugcugcccauccugaacaagcagagcugcagcaucagcaacaucgagaccgugaucgaguuccagcagaagaacaacagacugcuggagaucaccagagaguucagcgugaacgccggcgugaccacccccgugagcaccuacaugcugaccaacagcgagcugcugagccugaucaacgacaugcccaucaccaacgaccagaagaagcugaugagcaacaacgugcagaucgugagacagcagagcuacagcaucaugugcaucaucaaggaggaggugcuggccuacguggugcagcugccccuguacggcgugaucgacacccccugcuggaagcugcacaccagcccccugugcaccaccaacaccaaggagggcagcaacaucugccugaccagaaccgacagaggcugguacugcgacaacgccggcagcgugagcuucuucccccaggccgagaccugcaaggugcagagcaacagaguguucugcgacaccaugaacagcagaacccugcccagcgaggugaaccugugcaacaucgacaucuucaaccccaaguacgacugcaagaucaugaccagcaagaccgacgugagcagcagcgugaucaccagccugggcgccaucgugagcugcuacggcaagaccaagugcaccgccagcaacaagaacagaggcaucaucaagaccuucagcaacggcugcgacuacgugagcaacaagggcguggacaccgugagcgugggcaacacccuguacugcgugaacaagcaggagggcaagagccuguacgugaagggcgagcccaucaucaacuucuacgacccccugguguuccccagcgacgaguucgacgccagcaucagccaggugaacgagaagaucaaccagagccuggccuucaucagaaagagcgacgagcugcugcacaacgugaacgugggcaagagcaccaccaacaucaugaucaccaccaucaucaucgugaucaucgugauccugcugcugcugaucgccgugggccuguuccuguacugcaaggccagaugaggacuaguaauaaggaaacuguaugaaugucugugggcaggaagugaagagauccuucuguaaagguuuuuggaauuaugucugcugaauaauaaacuuuuuugaaauaauaaaucugguagaaaaaugagaucuaaaaaaaaaaaaaaaaaaaaaaaaaaaaaaaaaaaaaaaaaaaaaaaaaaaaaaaaaaaaaaaaugcaucccccccccccccccccccccccccccccccaaaggcucuuuucagagccaccagaauu

SEQ ID NO: 16601 - RNA, 1885 nt, Artificial Sequence
  mRNA product Design b-4 comprising derived and/or modified sequence from HRSV(Memphis-37)__AIY60640.1__F-del_DSCav1_mut4 (opt5)
gggagagucccgcagucggcguccagcggcucugcuuguucgugugugugucguugcaggccuuauucaagcuuaccauggagcugcccauccucaagaccaacgccauuacaacgauccuggcugccgugacccuuugcuucgcgagcucccagaauauuacagaagaguuuuaccaaucuaccuguagcgcugucuccaaaggcuaucugucugcccucagaacagggugguacaccagcguuaucacaauugaacuguccaacaucaaggagaauaaaugcaacggaaccgacgccaaggugaaacuuaucaagcaggaacuggauaaguauaaaaaugcugugacggagcuccagcugcugaugcagucuaccccugccgcuggcagcggguccgccauuuguagcggaaucgcggucugcaaggugcuccaccuggagggcgaaguuaacaaaauuaagaaugcccuucugucuacaaacaaagcuguggucucccucagcaauggggugucuguucugaccuucaaggugcuugaccugaagaacuacaucgauaaacaacuccugccgauucugaauaagcaguccuguagcaucucuaacauugagacagucaucgaauuucagcagaaaaauaaccggcuccuggagaucacccgcgaguucuccgugaaugccggagugacgacacccgucagcaccuauaugcuuacaaacuccgaacugcucucucugauuaacgacaugccuaucaccaaugaucaaaagaaacuuaugagcaacaauguucagauugugagacagcaguccuacagcaucaugugcauuaucaaggaggaagugcuggcuuaugucgugcaacucccccuguacggcguuaucgacaccccuuguuggaaacugcauacaucuccccucugcacgaccaacacaaaggagggcuccaauauuugucugacccggacagaucgcgggugguacugcgacaacgccggaagcgugagcuuuuucccucaggcggaaaccuguaagguccagucuaauagaguguuuugcgauacgaugaacuccagaacacugccgucugagguuaaucucugcaacaucgacauuuucaaucccaaauaugauuguaagaucaugaccagcaaaaccgacguguccagcucugucauuacaucccugggcgccaucgugagcugcuacgggaagaccaaauguacagcuucuaacaagaaucggggaaucauuaagacguuuuccaacggcugcgauuaugucagcaauaaagggguggacaccguuuccgugggaaacacacuuuacugugucaacaagcaagagggcaaaucucuguaugugaagggcgaaccuaucauuaauuucuacgacccccucguuuuuccuagcgaugaguucgacgccuccaucucucaggugaacgaaaagauuaaucagagccuggcuuuuauccgcaaguccgaugagcugcuccacaacgucaauguggggaaaagcaccacaaacauuaugaucaccacgaucauuaucgugauuaucguuauucugcuucugcucaucgccgucggacuguuccuguauugcaaagccagaugaggacuaguaauaaggaaacuguaugaaugucugugggcaggaagugaagagauccuucuguaaagguuuuuggaauuaugucugcugaauaauaaacuuuuuugaaauaauaaaucugguagaaaaaugagaucuaaaaaaaaaaaaaaaaaaaaaaaaaaaaaaaaaaaaaaaaaaaaaaaaaaaaaaaaaaaaaaaaugcaucccccccccccccccccccccccccccccccaaaggcucuuuucagagccaccagaauu

SEQ ID NO: 16602 - RNA, 1885 nt, Artificial Sequence
  mRNA product Design b-4 comprising derived and/or modified sequence from HRSV(Memphis-37)__AIY60640.1__F-del_DSCav1_mut4 (opt6)
gggagagucccgcagucggcguccagcggcucugcuuguucgugugugugucguugcaggccuuauucaagcuuaccauggaacuaccaauacucaaaacaaacgcaauaacaacuauacuagccgcaguuacacucugcuucgcuucaucacaaaauaucacagaagaauuuuaccaaucuacauguucagcuguauccaaagguuaccuuucagcacuacgaacaggaugguauaccucaguaaucaccaucgaacucucgaacauaaaagaaaacaaauguaacggaaccgaugcuaaagucaagcucauaaaacaagaacuagacaaauacaaaaacgcaguaaccgaacuacaacuacuuaugcaaucaacaccagcugcaggcucaggcucagcaaucugcucaggcauagcuguaugcaaaguacuacaucuagaaggagaaguaaacaaaauaaaaaacgcauuauuaucaacaaauaaagcaguaguaucacuaucaaauggaguaucaguacucacauucaaaguacuagaucuaaaaaacuacauugacaaacaauuacuaccaauccucaacaaacaaucaugcucaauauccaacauagaaacaguaauagaauuucaacaaaaaaacaaucgacuacuagaaauaacaagagaauuuucagucaaugccggaguuacaacacccguaagcacuuacaugcuaaccaacucagaacuacuaucacuaauaaacgacaugccaauuacaaacgaccaaaaaaaacuaaugucaaauaacguacaaauaguacgucaacaaucauacucaauaaugugcauaauaaaagaagaaguccuagcauacguaguacaauuacccuuauauggcguaauagacacaccaugcuggaaacuacacacauccccacucugcaccaccaacaccaaagaaggcuccaacauaugucuaacccgaaccgacagagguugguauugugauaacgcuggcuccguaucauucuucccacaagcagaaacauguaaaguacaaucaaacagaguauucugcgauacaaugaauagcagaacacuaccaucagaaguaaacuuaugcaacaucgacaucuucaaucccaaauacgacugcaaaauaaugacauccaaaacugacguuucuucaagcguaauaacaucuuuaggagcaauaguauccugcuacggaaaaacuaaaugcacagcauccaauaaaaaccguggaauaauaaaaacauucucaaauggcugcgacuacgucucaaacaaaggcguagacaccguuagugucggaaacacacuauauugcguaaauaaacaagaaggaaaauccuuauacguaaaaggcgaaccaauaauuaacuucuaugacccccucguauuuccauccgaugaauuugacgcaucaaucucgcaaguaaacgaaaaaauaaaccaaagccuagcauucauaagaaaauccgacgaacuacuccacaauguaaauguaggaaaaucaacuaccaacauaaugauuacuacuauaauaauaguaauuauagucaucuuacuacuauuaauagcagucggauuauuccuauacugcaaagcaagauagggacuaguaauaaggaaacuguaugaaugucugugggcaggaagugaagagauccuucuguaaagguuuuuggaauuaugucugcugaauaauaaacuuuuuugaaauaauaaaucugguagaaaaaugagaucuaaaaaaaaaaaaaaaaaaaaaaaaaaaaaaaaaaaaaaaaaaaaaaaaaaaaaaaaaaaaaaaaugcaucccccccccccccccccccccccccccccccaaaggcucuuuucagagccaccagaauu

SEQ ID NO: 16603 - RNA, 1885 nt, Artificial Sequence
  mRNA product Design b-4 comprising derived and/or modified sequence from HRSV(Memphis-37)__AIY60640.1__F-del_DSCav1_mut4 (opt11)
gggagagucccgcagucggcguccagcggcucugcuuguucgugugugugucguugcaggccuuauucaagcuuaccauggagcuccccauccuaaaaaccaacgccaucaccaccauccucgccgccgucacccuaugcuucgcuucaucacaaaacaucaccgaagaauuuuaccaaucuaccugcuccgccgucuccaaaggauaucucagcgcccuacggaccggcugguacaccuccgucauaaccaucgaacucaguaacaucaaagaaaacaaaugcaacggcaccgacgccaaagucaaacuaaucaaacaagaacuagauaaauacaaaaacgcggucaccgaacuacaacuccuaaugcaaagcacccccgccgccggauccggcuccgccauaugcuccggcauugcugucugcaaaguacuacaccucgagggcgaggucaacaaaaucaaaaacgcacuacucagcacuaauaaagccguaguaucccuaucaaacggugucucagucuuaacauucaaaguacucgaccuaaagaacuacaucgacaaacaacuccuacccauccucaacaagcaguccuguucuaucucaaacaucgaaaccgucaucgaauuucaacaaaagaacaaccgccuccucgaaaucacacgcgaguucuccgucaacgcaggaguaaccacccccgucuccaccuacaugcucacaaacucggaacuccucucacuaaucaacgacaugcccaucaccaacgaccaaaagaaacucaugagcaacaacguucaaaucguccgccaacaaucauacuccaucaugugcauaaucaaagaagaaguccuagcuuacgucguccagcugccccucuacggagucaucgacacgcccugcuggaaacuacacacaagcccccucugcaccaccaacaccaaagaaggcuccaacauaugccucacacggaccgaccgcgguugguacugcgacaacgccggcuccgucuccuucuucccccaagcagaaacuugcaaaguccaauccaaccgcguauucugcgacacaaugaacagcagaacacucccuagcgaagucaaccucugcaacaucgacauauucaaccccaaauacgacugcaaaaucaugacgucaaaaaccgacgucuccagcuccguuaucaccucacucggcgccaucgucagcugcuacggcaaaacuaaaugcaccgccuccaacaaaaaccgcggcaucauuaaaaccuucagcaacggcugcgacuacgucuccaacaaaggugucgauacgguauccgucggaaacacccuauacugcgucaacaaacaagaaggcaaaucucucuacgucaaaggcgaacccauaaucaauuucuacgacccccuagucuuccccuccgaugaauuugacgccuccaucagccaagucaacgagaaaaucaaccaaucacuagccuucauccggaaauccgacgaacuccuacacaacguaaacgucggcaaauccaccaccaauauaaugaucacaaccaucaucaucguaaucaucgucauccuccuccuacucaucgccgucggauuauucuuauacugcaaagcccgcuaaggacuaguaauaaggaaacuguaugaaugucugugggcaggaagugaagagauccuucuguaaagguuuuuggaauuaugucugcugaauaauaaacuuuuuugaaauaauaaaucugguagaaaaaugagaucuaaaaaaaaaaaaaaaaaaaaaaaaaaaaaaaaaaaaaaaaaaaaaaaaaaaaaaaaaaaaaaaaugcaucccccccccccccccccccccccccccccccaaaggcucuuuucagagccaccagaauu

SEQ ID NO: 16604 - RNA, 1947 nt, Artificial Sequence
  mRNA product Design b-5 comprising derived and/or modified sequence from HRSV(Memphis-37)__AIY60640.1__F-del_DSCav1_mut4 (opt1)
gggagacuccugucgggcggaaguaggaggaguagaguuuaaaaacaguacucuuuuuccgguucgggacguaguugaagcaacgacaagccggauaaccgcucuugagacaggaagcuuaccauggagcugcccauccucaagaccaacgccaucaccacgauccuggccgcggugacccugugcuucgccagcucccagaacaucaccgaggaguucuaccagagcacgugcuccgccgucagcaagggcuaccucuccgcccugcgcaccgggugguacaccagcgugaucaccaucgagcuguccaacaucaaggagaacaagugcaacggcaccgacgccaaggugaagcucaucaagcaggagcuggacaaguacaagaacgcggucacggagcugcagcuccugaugcagagcaccccggccgccggcuccgggagcgcgaucugcuccggcaucgccgucugcaaggugcugcaccucgagggcgaggugaacaagaucaagaacgcccugcuguccaccaacaaggccgucgugagccucuccaacggggugagcguccugaccuucaaggugcuggaccucaagaacuacaucgacaagcagcugcugcccauccugaacaagcagagcugcuccaucagcaacaucgagaccgucaucgaguuccagcagaagaacaaccgccuccuggagaucacgcgggaguucagcgugaacgcgggcgugaccacccccgucuccaccuacaugcugacgaacagcgagcuccugucccugaucaacgacaugccgaucaccaacgaccagaagaagcucaugagcaacaacgugcagaucgugcgccagcaguccuacagcaucaugugcaucaucaaggaggagguccuggccuacguggugcagcugccccucuacggggucaucgacacccccugcuggaagcugcacaccagcccccugugcacgaccaacaccaaggagggcuccaacaucugccucacccggacggaccgcgggugguacugcgacaacgccggcagcguguccuucuucccgcaggccgagaccugcaagguccagagcaaccggguguucugcgacaccaugaacucccggacccugcccagcgaggugaaccucugcaacaucgacaucuucaaccccaaguacgacugcaagaucaugacguccaagaccgacgucagcuccagcgugaucaccucccugggcgccaucgugagcugcuacgggaagaccaagugcacggcgagcaacaagaaccgcggcaucaucaagaccuucuccaacgggugcgacuacgucagcaacaagggcguggacaccguguccgucggcaacacccuguacugcgugaacaagcaggagggcaagagccucuacgugaagggggagcccaucaucaacuucuacgacccgcuggucuuccccuccgacgaguucgacgccagcaucucccaggugaacgagaagaucaaccagagccuggccuucauccggaaguccgacgagcuccugcacaacgugaacgucggcaagagcaccacgaacaucaugaucaccaccaucaucaucgugaucaucgugauccugcugcuccugaucgccgucgggcuguuccucuacugcaaggcccgcugaggacuaguacuggcugcaucucccuuuccucuguccuccauccuucucccaggauggugaagggggaccugguacccagugauccccaccccaggauccuaaaucaugacuuaccugcuaauaaaaacucauuggaaaagugagaagaucuaaaaaaaaaaaaaaaaaaaaaaaaaaaaaaaaaaaaaaaaaaaaaaaaaaaaaaaaaaaaaaaaugcaucccccccccccccccccccccccccccccccaaaggcucuuuucagagccaccagaauu

SEQ ID NO: 16605 - RNA, 1947 nt, Artificial Sequence
  mRNA product Design b-5 comprising derived and/or modified sequence from HRSV(Memphis-37)__AIY60640.1__F-del_DSCav1_mut4 (opt1)
gggagacuccugucgggcggaaguaggaggaguagaguuuaaaaacaguacucuuuuuccgguucgggacguaguugaagcaacgacaagccggauaaccgcucuugagacaggaagcuuaccauggagcugcccauccucaagaccaacgccaucaccacgauccuggccgcggugacccugugcuucgccagcucccagaacaucaccgaggaguucuaccagagcacgugcuccgccgucagcaagggcuaccucuccgcccugcgcaccgggugguacaccagcgugaucaccaucgagcuguccaacaucaaggagaacaagugcaacggcaccgacgccaaggugaagcucaucaagcaggagcuggacaaguacaagaacgcggucacggagcugcagcuccugaugcagagcaccccggccgccggguccggcagcgccaucugcuccgggaucgcggugugcaaggugcugcaccucgagggcgaggucaacaagaucaagaacgcccugcugagcaccaacaaggccguggugucccucagcaacggcgucuccgugcugaccuucaaggugcuggaccucaagaacuacaucgacaagcagcugcugcccauccucaacaagcagagcugcuccaucagcaacaucgagacggucaucgaguuccagcagaagaacaaccggcugcuggagaucacccgcgaguucuccgugaacgccggggugaccacccccgucagcacguacaugcucaccaacagcgagcugcugucccucaucaacgacaugcccaucaccaacgaccagaagaagcugaugagcaacaacgugcagaucgugcggcagcaguccuacagcaucaugugcaucaucaaggaggagguccuggccuacguggugcagcucccgcuguacggcgucaucgacacccccugcuggaagcugcacacgagcccccucugcaccaccaacaccaaggagggguccaacaucugccugacgcgcaccgaccggggcugguacugcgacaacgcgggguccgugagcuucuucccccaggccgagaccugcaaggugcaguccaaccgcgucuucugcgacaccaugaacagccggacgcucccguccgaggugaaccugugcaacaucgacaucuucaaccccaaguacgacugcaagaucaugaccagcaagaccgacgucuccagcuccgugaucaccagccugggcgccaucguguccugcuacggcaagacgaagugcaccgccagcaacaagaaccgggggaucaucaagaccuucuccaacggcugcgacuacgucagcaacaaggggguggacaccgugagcgucggcaacacgcucuacugcgugaacaagcaggagggcaagucccuguacgugaagggggagcccaucaucaacuucuacgacccccuggucuucccgagcgacgaguucgacgccuccaucagccaggugaacgagaagaucaaccagucccucgcguucauccgcaagagcgacgagcugcugcacaacgugaacgucggcaaguccaccaccaacaucaugaucaccaccaucaucaucgugaucaucgugauccuccugcugcucaucgccgucgggcuguuccuguacugcaaggcccggugaggacuaguacuggcugcaucucccuuuccucuguccuccauccuucucccaggauggugaagggggaccugguacccagugauccccaccccaggauccuaaaucaugacuuaccugcuaauaaaaacucauuggaaaagugagaagaucuaaaaaaaaaaaaaaaaaaaaaaaaaaaaaaaaaaaaaaaaaaaaaaaaaaaaaaaaaaaaaaaaugcaucccccccccccccccccccccccccccccccaaaggcucuuuucagagccaccagaauu

SEQ ID NO: 16606 - RNA, 1947 nt, Artificial Sequence
  mRNA product Design b-5 comprising derived and/or modified sequence from HRSV(Memphis-37)__AIY60640.1__F-del_DSCav1_mut4 (opt2)
gggagacuccugucgggcggaaguaggaggaguagaguuuaaaaacaguacucuuuuuccgguucgggacguaguugaagcaacgacaagccggauaaccgcucuugagacaggaagcuuaccauggagcuccccauccucaagaccaacgccaucaccaccauccucgccgccgucacccucugcuucgccuccucccagaacaucaccgaggaguucuaccaguccaccugcuccgccgucuccaagggcuaccucuccgcccuccgcaccggcugguacaccuccgucaucaccaucgagcucuccaacaucaaggagaacaagugcaacggcaccgacgccaaggucaagcucaucaagcaggagcucgacaaguacaagaacgccgucaccgagcuccagcuccucaugcaguccacccccgccgccggcuccggcuccgccaucugcuccggcaucgccgucugcaagguccuccaccucgagggcgaggucaacaagaucaagaacgcccuccucuccaccaacaaggccgucgucucccucuccaacggcgucuccguccucaccuucaagguccucgaccucaagaacuacaucgacaagcagcuccuccccauccucaacaagcaguccugcuccaucuccaacaucgagaccgucaucgaguuccagcagaagaacaaccgccuccucgagaucacccgcgaguucuccgucaacgccggcgucaccacccccgucuccaccuacaugcucaccaacuccgagcuccucucccucaucaacgacaugcccaucaccaacgaccagaagaagcucauguccaacaacguccagaucguccgccagcaguccuacuccaucaugugcaucaucaaggaggagguccucgccuacgucguccagcucccccucuacggcgucaucgacacccccugcuggaagcuccacaccuccccccucugcaccaccaacaccaaggagggcuccaacaucugccucacccgcaccgaccgcggcugguacugcgacaacgccggcuccgucuccuucuucccccaggccgagaccugcaagguccaguccaaccgcgucuucugcgacaccaugaacucccgcacccuccccuccgaggucaaccucugcaacaucgacaucuucaaccccaaguacgacugcaagaucaugaccuccaagaccgacgucuccuccuccgucaucaccucccucggcgccaucgucuccugcuacggcaagaccaagugcaccgccuccaacaagaaccgcggcaucaucaagaccuucuccaacggcugcgacuacgucuccaacaagggcgucgacaccgucuccgucggcaacacccucuacugcgucaacaagcaggagggcaagucccucuacgucaagggcgagcccaucaucaacuucuacgacccccucgucuuccccuccgacgaguucgacgccuccaucucccaggucaacgagaagaucaaccagucccucgccuucauccgcaaguccgacgagcuccuccacaacgucaacgucggcaaguccaccaccaacaucaugaucaccaccaucaucaucgucaucaucgucauccuccuccuccucaucgccgucggccucuuccucuacugcaaggcccgcugaggacuaguacuggcugcaucucccuuuccucuguccuccauccuucucccaggauggugaagggggaccugguacccagugauccccaccccaggauccuaaaucaugacuuaccugcuaauaaaaacucauuggaaaagugagaagaucuaaaaaaaaaaaaaaaaaaaaaaaaaaaaaaaaaaaaaaaaaaaaaaaaaaaaaaaaaaaaaaaaugcaucccccccccccccccccccccccccccccccaaaggcucuuuucagagccaccagaauu

SEQ ID NO: 16607 - RNA, 1947 nt, Artificial Sequence
  mRNA product Design b-5 comprising derived and/or modified sequence from HRSV(Memphis-37)__AIY60640.1__F-del_DSCav1_mut4 (opt3)
gggagacuccugucgggcggaaguaggaggaguagaguuuaaaaacaguacucuuuuuccgguucgggacguaguugaagcaacgacaagccggauaaccgcucuugagacaggaagcuuaccauggagcugcccauccucaagaccaacgccauuacaacuauacuugcugcagugacgcugugcuucgccagcucccagaauaucaccgaagaguuuuaccaaucuacauguucagcggucaguaaaggcuauuugagcgcuuuaagaacugggugguacaccuccguuauuacaaucgaacugucuaacauuaaggagaauaaaugcaacggaaccgacgccaaggugaaacuaaucaagcaggaacucgauaaguauaaaaaugcaguaacugagcugcagcuucugaugcagucgaccccugccgcugguucaggcagcgcaauauguagugggaucgccgugugcaaggucuugcaccucgagggagaagugaacaaaauuaagaaugcucugcuguccacaaacaaagccguugugucucucagcaauggcgucuccguguuaacguucaagguacuggaccuuaagaacuacaucgauaaacaauugcugccaauucuaaauaagcagucauguaguaucagcaacauagagacuguuauugaauuucagcagaaaaauaacaggcuccuggagaucacccgggaguucucugugaaugcgggugucacaacuccgguguccaccuauaugcuuacaaacucagaacuguugagccucauuaacgacaugcccaucaccaaugaucaaaagaaacugaugaguaacaaugugcagaucguccgccagcagucuuacuccauuaugugcauaaucaaggaggaaguuuuagcauaugugguacaacugccucucuacggggugauugacacgccauguuggaaacuucauacuagcccccugugcacaaccaacacuaaggagggaucgaauaucuguuugacacgaaccgaucguggcugguacugcgacaacgccggcucugucuccuuuuucccucaggcugaaacguguaaggugcagucaaauagaguguuuugcgauaccaugaacaguagaacacugccaagcgaggugaaucucugcaacauagacauuuucaaucccaaauaugauuguaagaucaugacuuccaaaaccgacgucucuagcucagugaucacaagucugggggccauuguauccugcuacggaaagacuaaauguaccgcaagcaacaagaauagggguaucauuaagacauuuucuaacggcugcgauuauguuucaaauaaagggguggacaccgucagugugggaaacacucuuuacugugucaacaagcaagagggcaaaagccuguaugugaagggugaaccuauaaucaauuucuacgacccauugguuuuuccguccgaugaguucgacgcuucuauuucgcagguuaacgagaaaaucaaucagagccucgccuuuauccggaaguccgaugaacuguuacacaacguaaaugucgggaagucaacgacaaacauuaugauaaccacuaucauuaucgugauuaucguuauacugcuacuccugaucgcggugggacuuuucuuguauugcaaagcccgcugaggacuaguacuggcugcaucucccuuuccucuguccuccauccuucucccaggauggugaagggggaccugguacccagugauccccaccccaggauccuaaaucaugacuuaccugcuaauaaaaacucauuggaaaagugagaagaucuaaaaaaaaaaaaaaaaaaaaaaaaaaaaaaaaaaaaaaaaaaaaaaaaaaaaaaaaaaaaaaaaugcaucccccccccccccccccccccccccccccccaaaggcucuuuucagagccaccagaauu

SEQ ID NO: 16608 - RNA, 1947 nt, Artificial Sequence
  mRNA product Design b-5 comprising derived and/or modified sequence from HRSV(Memphis-37)__AIY60640.1__F-del_DSCav1_mut4 (opt4)
gggagacuccugucgggcggaaguaggaggaguagaguuuaaaaacaguacucuuuuuccgguucgggacguaguugaagcaacgacaagccggauaaccgcucuugagacaggaagcuuaccauggagcugcccauccugaagaccaacgccaucaccaccauccuggccgccgugacccugugcuucgccagcagccagaacaucaccgaggaguucuaccagagcaccugcagcgccgugagcaagggcuaccugagcgcccugagaaccggcugguacaccagcgugaucaccaucgagcugagcaacaucaaggagaacaagugcaacggcaccgacgccaaggugaagcugaucaagcaggagcuggacaaguacaagaacgccgugaccgagcugcagcugcugaugcagagcacccccgccgccggcagcggcagcgccaucugcagcggcaucgccgugugcaaggugcugcaccuggagggcgaggugaacaagaucaagaacgcccugcugagcaccaacaaggccguggugagccugagcaacggcgugagcgugcugaccuucaaggugcuggaccugaagaacuacaucgacaagcagcugcugcccauccugaacaagcagagcugcagcaucagcaacaucgagaccgugaucgaguuccagcagaagaacaacagacugcuggagaucaccagagaguucagcgugaacgccggcgugaccacccccgugagcaccuacaugcugaccaacagcgagcugcugagccugaucaacgacaugcccaucaccaacgaccagaagaagcugaugagcaacaacgugcagaucgugagacagcagagcuacagcaucaugugcaucaucaaggaggaggugcuggccuacguggugcagcugccccuguacggcgugaucgacacccccugcuggaagcugcacaccagcccccugugcaccaccaacaccaaggagggcagcaacaucugccugaccagaaccgacagaggcugguacugcgacaacgccggcagcgugagcuucuucccccaggccgagaccugcaaggugcagagcaacagaguguucugcgacaccaugaacagcagaacccugcccagcgaggugaaccugugcaacaucgacaucuucaaccccaaguacgacugcaagaucaugaccagcaagaccgacgugagcagcagcgugaucaccagccugggcgccaucgugagcugcuacggcaagaccaagugcaccgccagcaacaagaacagaggcaucaucaagaccuucagcaacggcugcgacuacgugagcaacaagggcguggacaccgugagcgugggcaacacccuguacugcgugaacaagcaggagggcaagagccuguacgugaagggcgagcccaucaucaacuucuacgacccccugguguuccccagcgacgaguucgacgccagcaucagccaggugaacgagaagaucaaccagagccuggccuucaucagaaagagcgacgagcugcugcacaacgugaacgugggcaagagcaccaccaacaucaugaucaccaccaucaucaucgugaucaucgugauccugcugcugcugaucgccgugggccuguuccuguacugcaaggccagaugaggacuaguacuggcugcaucucccuuuccucuguccuccauccuucucccaggauggugaagggggaccugguacccagugauccccaccccaggauccuaaaucaugacuuaccugcuaauaaaaacucauuggaaaagugagaagaucuaaaaaaaaaaaaaaaaaaaaaaaaaaaaaaaaaaaaaaaaaaaaaaaaaaaaaaaaaaaaaaaaugcaucccccccccccccccccccccccccccccccaaaggcucuuuucagagccaccagaauu

SEQ ID NO: 16609 - RNA, 1947 nt, Artificial Sequence
  mRNA product Design b-5 comprising derived and/or modified sequence from HRSV(Memphis-37)__AIY60640.1__F-del_DSCav1_mut4 (opt5)
gggagacuccugucgggcggaaguaggaggaguagaguuuaaaaacaguacucuuuuuccgguucgggacguaguugaagcaacgacaagccggauaaccgcucuugagacaggaagcuuaccauggagcugcccauccucaagaccaacgccauuacaacgauccuggcugccgugacccuuugcuucgcgagcucccagaauauuacagaagaguuuuaccaaucuaccuguagcgcugucuccaaaggcuaucugucugcccucagaacagggugguacaccagcguuaucacaauugaacuguccaacaucaaggagaauaaaugcaacggaaccgacgccaaggugaaacuuaucaagcaggaacuggauaaguauaaaaaugcugugacggagcuccagcugcugaugcagucuaccccugccgcuggcagcggguccgccauuuguagcggaaucgcggucugcaaggugcuccaccuggagggcgaaguuaacaaaauuaagaaugcccuucugucuacaaacaaagcuguggucucccucagcaauggggugucuguucugaccuucaaggugcuugaccugaagaacuacaucgauaaacaacuccugccgauucugaauaagcaguccuguagcaucucuaacauugagacagucaucgaauuucagcagaaaaauaaccggcuccuggagaucacccgcgaguucuccgugaaugccggagugacgacacccgucagcaccuauaugcuuacaaacuccgaacugcucucucugauuaacgacaugccuaucaccaaugaucaaaagaaacuuaugagcaacaauguucagauugugagacagcaguccuacagcaucaugugcauuaucaaggaggaagugcuggcuuaugucgugcaacucccccuguacggcguuaucgacaccccuuguuggaaacugcauacaucuccccucugcacgaccaacacaaaggagggcuccaauauuugucugacccggacagaucgcgggugguacugcgacaacgccggaagcgugagcuuuuucccucaggcggaaaccuguaagguccagucuaauagaguguuuugcgauacgaugaacuccagaacacugccgucugagguuaaucucugcaacaucgacauuuucaaucccaaauaugauuguaagaucaugaccagcaaaaccgacguguccagcucugucauuacaucccugggcgccaucgugagcugcuacgggaagaccaaauguacagcuucuaacaagaaucggggaaucauuaagacguuuuccaacggcugcgauuaugucagcaauaaagggguggacaccguuuccgugggaaacacacuuuacugugucaacaagcaagagggcaaaucucuguaugugaagggcgaaccuaucauuaauuucuacgacccccucguuuuuccuagcgaugaguucgacgccuccaucucucaggugaacgaaaagauuaaucagagccuggcuuuuauccgcaaguccgaugagcugcuccacaacgucaauguggggaaaagcaccacaaacauuaugaucaccacgaucauuaucgugauuaucguuauucugcuucugcucaucgccgucggacuguuccuguauugcaaagccagaugaggacuaguacuggcugcaucucccuuuccucuguccuccauccuucucccaggauggugaagggggaccugguacccagugauccccaccccaggauccuaaaucaugacuuaccugcuaauaaaaacucauuggaaaagugagaagaucuaaaaaaaaaaaaaaaaaaaaaaaaaaaaaaaaaaaaaaaaaaaaaaaaaaaaaaaaaaaaaaaaugcaucccccccccccccccccccccccccccccccaaaggcucuuuucagagccaccagaauu

SEQ ID NO: 16610 - RNA, 1947 nt, Artificial Sequence
  mRNA product Design b-5 comprising derived and/or modified sequence from HRSV(Memphis-37)__AIY60640.1__F-del_DSCav1_mut4 (opt6)
gggagacuccugucgggcggaaguaggaggaguagaguuuaaaaacaguacucuuuuuccgguucgggacguaguugaagcaacgacaagccggauaaccgcucuugagacaggaagcuuaccauggaacuaccaauacucaaaacaaacgcaauaacaacuauacuagccgcaguuacacucugcuucgcuucaucacaaaauaucacagaagaauuuuaccaaucuacauguucagcuguauccaaagguuaccuuucagcacuacgaacaggaugguauaccucaguaaucaccaucgaacucucgaacauaaaagaaaacaaauguaacggaaccgaugcuaaagucaagcucauaaaacaagaacuagacaaauacaaaaacgcaguaaccgaacuacaacuacuuaugcaaucaacaccagcugcaggcucaggcucagcaaucugcucaggcauagcuguaugcaaaguacuacaucuagaaggagaaguaaacaaaauaaaaaacgcauuauuaucaacaaauaaagcaguaguaucacuaucaaauggaguaucaguacucacauucaaaguacuagaucuaaaaaacuacauugacaaacaauuacuaccaauccucaacaaacaaucaugcucaauauccaacauagaaacaguaauagaauuucaacaaaaaaacaaucgacuacuagaaauaacaagagaauuuucagucaaugccggaguuacaacacccguaagcacuuacaugcuaaccaacucagaacuacuaucacuaauaaacgacaugccaauuacaaacgaccaaaaaaaacuaaugucaaauaacguacaaauaguacgucaacaaucauacucaauaaugugcauaauaaaagaagaaguccuagcauacguaguacaauuacccuuauauggcguaauagacacaccaugcuggaaacuacacacauccccacucugcaccaccaacaccaaagaaggcuccaacauaugucuaacccgaaccgacagagguugguauugugauaacgcuggcuccguaucauucuucccacaagcagaaacauguaaaguacaaucaaacagaguauucugcgauacaaugaauagcagaacacuaccaucagaaguaaacuuaugcaacaucgacaucuucaaucccaaauacgacugcaaaauaaugacauccaaaacugacguuucuucaagcguaauaacaucuuuaggagcaauaguauccugcuacggaaaaacuaaaugcacagcauccaauaaaaaccguggaauaauaaaaacauucucaaauggcugcgacuacgucucaaacaaaggcguagacaccguuagugucggaaacacacuauauugcguaaauaaacaagaaggaaaauccuuauacguaaaaggcgaaccaauaauuaacuucuaugacccccucguauuuccauccgaugaauuugacgcaucaaucucgcaaguaaacgaaaaaauaaaccaaagccuagcauucauaagaaaauccgacgaacuacuccacaauguaaauguaggaaaaucaacuaccaacauaaugauuacuacuauaauaauaguaauuauagucaucuuacuacuauuaauagcagucggauuauuccuauacugcaaagcaagauagggacuaguacuggcugcaucucccuuuccucuguccuccauccuucucccaggauggugaagggggaccugguacccagugauccccaccccaggauccuaaaucaugacuuaccugcuaauaaaaacucauuggaaaagugagaagaucuaaaaaaaaaaaaaaaaaaaaaaaaaaaaaaaaaaaaaaaaaaaaaaaaaaaaaaaaaaaaaaaaugcaucccccccccccccccccccccccccccccccaaaggcucuuuucagagccaccagaauu

SEQ ID NO: 16611 - RNA, 1947 nt, Artificial Sequence
  mRNA product Design b-5 comprising derived and/or modified sequence from HRSV(Memphis-37)__AIY60640.1__F-del_DSCav1_mut4 (opt11)
gggagacuccugucgggcggaaguaggaggaguagaguuuaaaaacaguacucuuuuuccgguucgggacguaguugaagcaacgacaagccggauaaccgcucuugagacaggaagcuuaccauggagcuccccauccuaaaaaccaacgccaucaccaccauccucgccgccgucacccuaugcuucgcuucaucacaaaacaucaccgaagaauuuuaccaaucuaccugcuccgccgucuccaaaggauaucucagcgcccuacggaccggcugguacaccuccgucauaaccaucgaacucaguaacaucaaagaaaacaaaugcaacggcaccgacgccaaagucaaacuaaucaaacaagaacuagauaaauacaaaaacgcggucaccgaacuacaacuccuaaugcaaagcacccccgccgccggauccggcuccgccauaugcuccggcauugcugucugcaaaguacuacaccucgagggcgaggucaacaaaaucaaaaacgcacuacucagcacuaauaaagccguaguaucccuaucaaacggugucucagucuuaacauucaaaguacucgaccuaaagaacuacaucgacaaacaacuccuacccauccucaacaagcaguccuguucuaucucaaacaucgaaaccgucaucgaauuucaacaaaagaacaaccgccuccucgaaaucacacgcgaguucuccgucaacgcaggaguaaccacccccgucuccaccuacaugcucacaaacucggaacuccucucacuaaucaacgacaugcccaucaccaacgaccaaaagaaacucaugagcaacaacguucaaaucguccgccaacaaucauacuccaucaugugcauaaucaaagaagaaguccuagcuuacgucguccagcugccccucuacggagucaucgacacgcccugcuggaaacuacacacaagcccccucugcaccaccaacaccaaagaaggcuccaacauaugccucacacggaccgaccgcgguugguacugcgacaacgccggcuccgucuccuucuucccccaagcagaaacuugcaaaguccaauccaaccgcguauucugcgacacaaugaacagcagaacacucccuagcgaagucaaccucugcaacaucgacauauucaaccccaaauacgacugcaaaaucaugacgucaaaaaccgacgucuccagcuccguuaucaccucacucggcgccaucgucagcugcuacggcaaaacuaaaugcaccgccuccaacaaaaaccgcggcaucauuaaaaccuucagcaacggcugcgacuacgucuccaacaaaggugucgauacgguauccgucggaaacacccuauacugcgucaacaaacaagaaggcaaaucucucuacgucaaaggcgaacccauaaucaauuucuacgacccccuagucuuccccuccgaugaauuugacgccuccaucagccaagucaacgagaaaaucaaccaaucacuagccuucauccggaaauccgacgaacuccuacacaacguaaacgucggcaaauccaccaccaauauaaugaucacaaccaucaucaucguaaucaucgucauccuccuccuacucaucgccgucggauuauucuuauacugcaaagcccgcuaaggacuaguacuggcugcaucucccuuuccucuguccuccauccuucucccaggauggugaagggggaccugguacccagugauccccaccccaggauccuaaaucaugacuuaccugcuaauaaaaacucauuggaaaagugagaagaucuaaaaaaaaaaaaaaaaaaaaaaaaaaaaaaaaaaaaaaaaaaaaaaaaaaaaaaaaaaaaaaaaugcaucccccccccccccccccccccccccccccccaaaggcucuuuucagagccaccagaauu

SEQ ID NO: 16612 - RNA, 1853 nt, Artificial Sequence
  mRNA product Design c-1 comprising derived and/or modified sequence from HRSV(Memphis-37)__AIY60640.1__F-del_DSCav1_mut4 (opt1)
gggagaguccgcucagccagguugcagaagcggcuuagcguguguccuaaucuucucucugcguguagguaggccugugccgcaaacaagcuuaccauggagcugcccauccucaagaccaacgccaucaccacgauccuggccgcggugacccugugcuucgccagcucccagaacaucaccgaggaguucuaccagagcacgugcuccgccgucagcaagggcuaccucuccgcccugcgcaccgggugguacaccagcgugaucaccaucgagcuguccaacaucaaggagaacaagugcaacggcaccgacgccaaggugaagcucaucaagcaggagcuggacaaguacaagaacgcggucacggagcugcagcuccugaugcagagcaccccggccgccggcuccgggagcgcgaucugcuccggcaucgccgucugcaaggugcugcaccucgagggcgaggugaacaagaucaagaacgcccugcuguccaccaacaaggccgucgugagccucuccaacggggugagcguccugaccuucaaggugcuggaccucaagaacuacaucgacaagcagcugcugcccauccugaacaagcagagcugcuccaucagcaacaucgagaccgucaucgaguuccagcagaagaacaaccgccuccuggagaucacgcgggaguucagcgugaacgcgggcgugaccacccccgucuccaccuacaugcugacgaacagcgagcuccugucccugaucaacgacaugccgaucaccaacgaccagaagaagcucaugagcaacaacgugcagaucgugcgccagcaguccuacagcaucaugugcaucaucaaggaggagguccuggccuacguggugcagcugccccucuacggggucaucgacacccccugcuggaagcugcacaccagcccccugugcacgaccaacaccaaggagggcuccaacaucugccucacccggacggaccgcgggugguacugcgacaacgccggcagcguguccuucuucccgcaggccgagaccugcaagguccagagcaaccggguguucugcgacaccaugaacucccggacccugcccagcgaggugaaccucugcaacaucgacaucuucaaccccaaguacgacugcaagaucaugacguccaagaccgacgucagcuccagcgugaucaccucccugggcgccaucgugagcugcuacgggaagaccaagugcacggcgagcaacaagaaccgcggcaucaucaagaccuucuccaacgggugcgacuacgucagcaacaagggcguggacaccguguccgucggcaacacccuguacugcgugaacaagcaggagggcaagagccucuacgugaagggggagcccaucaucaacuucuacgacccgcuggucuuccccuccgacgaguucgacgccagcaucucccaggugaacgagaagaucaaccagagccuggccuucauccggaaguccgacgagcuccugcacaacgugaacgucggcaagagcaccacgaacaucaugaucaccaccaucaucaucgugaucaucgugauccugcugcuccugaucgccgucgggcuguuccucuacugcaaggcccgcugaggacuaguguccaccugucccuccugggcugcuggauugucucguuuuccugccaaauaaacaggaucagcgcuuuacagaucuaaaaaaaaaaaaaaaaaaaaaaaaaaaaaaaaaaaaaaaaaaaaaaaaaaaaaaaaaaaaaaaaugcaucccccccccccccccccccccccccccccccaaaggcucuuuucagagccaccagaauu

SEQ ID NO: 16613 - RNA, 1853 nt, Artificial Sequence
  mRNA product Design c-1 comprising derived and/or modified sequence from HRSV(Memphis-37)__AIY60640.1__F-del_DSCav1_mut4 (opt1)
gggagaguccgcucagccagguugcagaagcggcuuagcguguguccuaaucuucucucugcguguagguaggccugugccgcaaacaagcuuaccauggagcugcccauccucaagaccaacgccaucaccacgauccuggccgcggugacccugugcuucgccagcucccagaacaucaccgaggaguucuaccagagcacgugcuccgccgucagcaagggcuaccucuccgcccugcgcaccgggugguacaccagcgugaucaccaucgagcuguccaacaucaaggagaacaagugcaacggcaccgacgccaaggugaagcucaucaagcaggagcuggacaaguacaagaacgcggucacggagcugcagcuccugaugcagagcaccccggccgccggguccggcagcgccaucugcuccgggaucgcggugugcaaggugcugcaccucgagggcgaggucaacaagaucaagaacgcccugcugagcaccaacaaggccguggugucccucagcaacggcgucuccgugcugaccuucaaggugcuggaccucaagaacuacaucgacaagcagcugcugcccauccucaacaagcagagcugcuccaucagcaacaucgagacggucaucgaguuccagcagaagaacaaccggcugcuggagaucacccgcgaguucuccgugaacgccggggugaccacccccgucagcacguacaugcucaccaacagcgagcugcugucccucaucaacgacaugcccaucaccaacgaccagaagaagcugaugagcaacaacgugcagaucgugcggcagcaguccuacagcaucaugugcaucaucaaggaggagguccuggccuacguggugcagcucccgcuguacggcgucaucgacacccccugcuggaagcugcacacgagcccccucugcaccaccaacaccaaggagggguccaacaucugccugacgcgcaccgaccggggcugguacugcgacaacgcgggguccgugagcuucuucccccaggccgagaccugcaaggugcaguccaaccgcgucuucugcgacaccaugaacagccggacgcucccguccgaggugaaccugugcaacaucgacaucuucaaccccaaguacgacugcaagaucaugaccagcaagaccgacgucuccagcuccgugaucaccagccugggcgccaucguguccugcuacggcaagacgaagugcaccgccagcaacaagaaccgggggaucaucaagaccuucuccaacggcugcgacuacgucagcaacaaggggguggacaccgugagcgucggcaacacgcucuacugcgugaacaagcaggagggcaagucccuguacgugaagggggagcccaucaucaacuucuacgacccccuggucuucccgagcgacgaguucgacgccuccaucagccaggugaacgagaagaucaaccagucccucgcguucauccgcaagagcgacgagcugcugcacaacgugaacgucggcaaguccaccaccaacaucaugaucaccaccaucaucaucgugaucaucgugauccuccugcugcucaucgccgucgggcuguuccuguacugcaaggcccggugaggacuaguguccaccugucccuccugggcugcuggauugucucguuuuccugccaaauaaacaggaucagcgcuuuacagaucuaaaaaaaaaaaaaaaaaaaaaaaaaaaaaaaaaaaaaaaaaaaaaaaaaaaaaaaaaaaaaaaaugcaucccccccccccccccccccccccccccccccaaaggcucuuuucagagccaccagaauu

SEQ ID NO: 16614 - RNA, 1853 nt, Artificial Sequence
  mRNA product Design c-1 comprising derived and/or modified sequence from HRSV(Memphis-37)__AIY60640.1__F-del_DSCav1_mut4 (opt2)
gggagaguccgcucagccagguugcagaagcggcuuagcguguguccuaaucuucucucugcguguagguaggccugugccgcaaacaagcuuaccauggagcuccccauccucaagaccaacgccaucaccaccauccucgccgccgucacccucugcuucgccuccucccagaacaucaccgaggaguucuaccaguccaccugcuccgccgucuccaagggcuaccucuccgcccuccgcaccggcugguacaccuccgucaucaccaucgagcucuccaacaucaaggagaacaagugcaacggcaccgacgccaaggucaagcucaucaagcaggagcucgacaaguacaagaacgccgucaccgagcuccagcuccucaugcaguccacccccgccgccggcuccggcuccgccaucugcuccggcaucgccgucugcaagguccuccaccucgagggcgaggucaacaagaucaagaacgcccuccucuccaccaacaaggccgucgucucccucuccaacggcgucuccguccucaccuucaagguccucgaccucaagaacuacaucgacaagcagcuccuccccauccucaacaagcaguccugcuccaucuccaacaucgagaccgucaucgaguuccagcagaagaacaaccgccuccucgagaucacccgcgaguucuccgucaacgccggcgucaccacccccgucuccaccuacaugcucaccaacuccgagcuccucucccucaucaacgacaugcccaucaccaacgaccagaagaagcucauguccaacaacguccagaucguccgccagcaguccuacuccaucaugugcaucaucaaggaggagguccucgccuacgucguccagcucccccucuacggcgucaucgacacccccugcuggaagcuccacaccuccccccucugcaccaccaacaccaaggagggcuccaacaucugccucacccgcaccgaccgcggcugguacugcgacaacgccggcuccgucuccuucuucccccaggccgagaccugcaagguccaguccaaccgcgucuucugcgacaccaugaacucccgcacccuccccuccgaggucaaccucugcaacaucgacaucuucaaccccaaguacgacugcaagaucaugaccuccaagaccgacgucuccuccuccgucaucaccucccucggcgccaucgucuccugcuacggcaagaccaagugcaccgccuccaacaagaaccgcggcaucaucaagaccuucuccaacggcugcgacuacgucuccaacaagggcgucgacaccgucuccgucggcaacacccucuacugcgucaacaagcaggagggcaagucccucuacgucaagggcgagcccaucaucaacuucuacgacccccucgucuuccccuccgacgaguucgacgccuccaucucccaggucaacgagaagaucaaccagucccucgccuucauccgcaaguccgacgagcuccuccacaacgucaacgucggcaaguccaccaccaacaucaugaucaccaccaucaucaucgucaucaucgucauccuccuccuccucaucgccgucggccucuuccucuacugcaaggcccgcugaggacuaguguccaccugucccuccugggcugcuggauugucucguuuuccugccaaauaaacaggaucagcgcuuuacagaucuaaaaaaaaaaaaaaaaaaaaaaaaaaaaaaaaaaaaaaaaaaaaaaaaaaaaaaaaaaaaaaaaugcaucccccccccccccccccccccccccccccccaaaggcucuuuucagagccaccagaauu

SEQ ID NO: 16615 - RNA, 1853 nt, Artificial Sequence
  mRNA product Design c-1 comprising derived and/or modified sequence from HRSV(Memphis-37)__AIY60640.1__F-del_DSCav1_mut4 (opt3)
gggagaguccgcucagccagguugcagaagcggcuuagcguguguccuaaucuucucucugcguguagguaggccugugccgcaaacaagcuuaccauggagcugcccauccucaagaccaacgccauuacaacuauacuugcugcagugacgcugugcuucgccagcucccagaauaucaccgaagaguuuuaccaaucuacauguucagcggucaguaaaggcuauuugagcgcuuuaagaacugggugguacaccuccguuauuacaaucgaacugucuaacauuaaggagaauaaaugcaacggaaccgacgccaaggugaaacuaaucaagcaggaacucgauaaguauaaaaaugcaguaacugagcugcagcuucugaugcagucgaccccugccgcugguucaggcagcgcaauauguagugggaucgccgugugcaaggucuugcaccucgagggagaagugaacaaaauuaagaaugcucugcuguccacaaacaaagccguugugucucucagcaauggcgucuccguguuaacguucaagguacuggaccuuaagaacuacaucgauaaacaauugcugccaauucuaaauaagcagucauguaguaucagcaacauagagacuguuauugaauuucagcagaaaaauaacaggcuccuggagaucacccgggaguucucugugaaugcgggugucacaacuccgguguccaccuauaugcuuacaaacucagaacuguugagccucauuaacgacaugcccaucaccaaugaucaaaagaaacugaugaguaacaaugugcagaucguccgccagcagucuuacuccauuaugugcauaaucaaggaggaaguuuuagcauaugugguacaacugccucucuacggggugauugacacgccauguuggaaacuucauacuagcccccugugcacaaccaacacuaaggagggaucgaauaucuguuugacacgaaccgaucguggcugguacugcgacaacgccggcucugucuccuuuuucccucaggcugaaacguguaaggugcagucaaauagaguguuuugcgauaccaugaacaguagaacacugccaagcgaggugaaucucugcaacauagacauuuucaaucccaaauaugauuguaagaucaugacuuccaaaaccgacgucucuagcucagugaucacaagucugggggccauuguauccugcuacggaaagacuaaauguaccgcaagcaacaagaauagggguaucauuaagacauuuucuaacggcugcgauuauguuucaaauaaagggguggacaccgucagugugggaaacacucuuuacugugucaacaagcaagagggcaaaagccuguaugugaagggugaaccuauaaucaauuucuacgacccauugguuuuuccguccgaugaguucgacgcuucuauuucgcagguuaacgagaaaaucaaucagagccucgccuuuauccggaaguccgaugaacuguuacacaacguaaaugucgggaagucaacgacaaacauuaugauaaccacuaucauuaucgugauuaucguuauacugcuacuccugaucgcggugggacuuuucuuguauugcaaagcccgcugaggacuaguguccaccugucccuccugggcugcuggauugucucguuuuccugccaaauaaacaggaucagcgcuuuacagaucuaaaaaaaaaaaaaaaaaaaaaaaaaaaaaaaaaaaaaaaaaaaaaaaaaaaaaaaaaaaaaaaaugcaucccccccccccccccccccccccccccccccaaaggcucuuuucagagccaccagaauu

SEQ ID NO: 16616 - RNA, 1853 nt, Artificial Sequence
  mRNA product Design c-1 comprising derived and/or modified sequence from HRSV(Memphis-37)__AIY60640.1__F-del_DSCav1_mut4 (opt4)
gggagaguccgcucagccagguugcagaagcggcuuagcguguguccuaaucuucucucugcguguagguaggccugugccgcaaacaagcuuaccauggagcugcccauccugaagaccaacgccaucaccaccauccuggccgccgugacccugugcuucgccagcagccagaacaucaccgaggaguucuaccagagcaccugcagcgccgugagcaagggcuaccugagcgcccugagaaccggcugguacaccagcgugaucaccaucgagcugagcaacaucaaggagaacaagugcaacggcaccgacgccaaggugaagcugaucaagcaggagcuggacaaguacaagaacgccgugaccgagcugcagcugcugaugcagagcacccccgccgccggcagcggcagcgccaucugcagcggcaucgccgugugcaaggugcugcaccuggagggcgaggugaacaagaucaagaacgcccugcugagcaccaacaaggccguggugagccugagcaacggcgugagcgugcugaccuucaaggugcuggaccugaagaacuacaucgacaagcagcugcugcccauccugaacaagcagagcugcagcaucagcaacaucgagaccgugaucgaguuccagcagaagaacaacagacugcuggagaucaccagagaguucagcgugaacgccggcgugaccacccccgugagcaccuacaugcugaccaacagcgagcugcugagccugaucaacgacaugcccaucaccaacgaccagaagaagcugaugagcaacaacgugcagaucgugagacagcagagcuacagcaucaugugcaucaucaaggaggaggugcuggccuacguggugcagcugccccuguacggcgugaucgacacccccugcuggaagcugcacaccagcccccugugcaccaccaacaccaaggagggcagcaacaucugccugaccagaaccgacagaggcugguacugcgacaacgccggcagcgugagcuucuucccccaggccgagaccugcaaggugcagagcaacagaguguucugcgacaccaugaacagcagaacccugcccagcgaggugaaccugugcaacaucgacaucuucaaccccaaguacgacugcaagaucaugaccagcaagaccgacgugagcagcagcgugaucaccagccugggcgccaucgugagcugcuacggcaagaccaagugcaccgccagcaacaagaacagaggcaucaucaagaccuucagcaacggcugcgacuacgugagcaacaagggcguggacaccgugagcgugggcaacacccuguacugcgugaacaagcaggagggcaagagccuguacgugaagggcgagcccaucaucaacuucuacgacccccugguguuccccagcgacgaguucgacgccagcaucagccaggugaacgagaagaucaaccagagccuggccuucaucagaaagagcgacgagcugcugcacaacgugaacgugggcaagagcaccaccaacaucaugaucaccaccaucaucaucgugaucaucgugauccugcugcugcugaucgccgugggccuguuccuguacugcaaggccagaugaggacuaguguccaccugucccuccugggcugcuggauugucucguuuuccugccaaauaaacaggaucagcgcuuuacagaucuaaaaaaaaaaaaaaaaaaaaaaaaaaaaaaaaaaaaaaaaaaaaaaaaaaaaaaaaaaaaaaaaugcaucccccccccccccccccccccccccccccccaaaggcucuuuucagagccaccagaauu

SEQ ID NO: 16617 - RNA, 1853 nt, Artificial Sequence
  mRNA product Design c-1 comprising derived and/or modified sequence from HRSV(Memphis-37)__AIY60640.1__F-del_DSCav1_mut4 (opt5)
gggagaguccgcucagccagguugcagaagcggcuuagcguguguccuaaucuucucucugcguguagguaggccugugccgcaaacaagcuuaccauggagcugcccauccucaagaccaacgccauuacaacgauccuggcugccgugacccuuugcuucgcgagcucccagaauauuacagaagaguuuuaccaaucuaccuguagcgcugucuccaaaggcuaucugucugcccucagaacagggugguacaccagcguuaucacaauugaacuguccaacaucaaggagaauaaaugcaacggaaccgacgccaaggugaaacuuaucaagcaggaacuggauaaguauaaaaaugcugugacggagcuccagcugcugaugcagucuaccccugccgcuggcagcggguccgccauuuguagcggaaucgcggucugcaaggugcuccaccuggagggcgaaguuaacaaaauuaagaaugcccuucugucuacaaacaaagcuguggucucccucagcaauggggugucuguucugaccuucaaggugcuugaccugaagaacuacaucgauaaacaacuccugccgauucugaauaagcaguccuguagcaucucuaacauugagacagucaucgaauuucagcagaaaaauaaccggcuccuggagaucacccgcgaguucuccgugaaugccggagugacgacacccgucagcaccuauaugcuuacaaacuccgaacugcucucucugauuaacgacaugccuaucaccaaugaucaaaagaaacuuaugagcaacaauguucagauugugagacagcaguccuacagcaucaugugcauuaucaaggaggaagugcuggcuuaugucgugcaacucccccuguacggcguuaucgacaccccuuguuggaaacugcauacaucuccccucugcacgaccaacacaaaggagggcuccaauauuugucugacccggacagaucgcgggugguacugcgacaacgccggaagcgugagcuuuuucccucaggcggaaaccuguaagguccagucuaauagaguguuuugcgauacgaugaacuccagaacacugccgucugagguuaaucucugcaacaucgacauuuucaaucccaaauaugauuguaagaucaugaccagcaaaaccgacguguccagcucugucauuacaucccugggcgccaucgugagcugcuacgggaagaccaaauguacagcuucuaacaagaaucggggaaucauuaagacguuuuccaacggcugcgauuaugucagcaauaaagggguggacaccguuuccgugggaaacacacuuuacugugucaacaagcaagagggcaaaucucuguaugugaagggcgaaccuaucauuaauuucuacgacccccucguuuuuccuagcgaugaguucgacgccuccaucucucaggugaacgaaaagauuaaucagagccuggcuuuuauccgcaaguccgaugagcugcuccacaacgucaauguggggaaaagcaccacaaacauuaugaucaccacgaucauuaucgugauuaucguuauucugcuucugcucaucgccgucggacuguuccuguauugcaaagccagaugaggacuaguguccaccugucccuccugggcugcuggauugucucguuuuccugccaaauaaacaggaucagcgcuuuacagaucuaaaaaaaaaaaaaaaaaaaaaaaaaaaaaaaaaaaaaaaaaaaaaaaaaaaaaaaaaaaaaaaaugcaucccccccccccccccccccccccccccccccaaaggcucuuuucagagccaccagaauu

SEQ ID NO: 16618 - RNA, 1853 nt, Artificial Sequence
  mRNA product Design c-1 comprising derived and/or modified sequence from HRSV(Memphis-37)__AIY60640.1__F-del_DSCav1_mut4 (opt6)
gggagaguccgcucagccagguugcagaagcggcuuagcguguguccuaaucuucucucugcguguagguaggccugugccgcaaacaagcuuaccauggaacuaccaauacucaaaacaaacgcaauaacaacuauacuagccgcaguuacacucugcuucgcuucaucacaaaauaucacagaagaauuuuaccaaucuacauguucagcuguauccaaagguuaccuuucagcacuacgaacaggaugguauaccucaguaaucaccaucgaacucucgaacauaaaagaaaacaaauguaacggaaccgaugcuaaagucaagcucauaaaacaagaacuagacaaauacaaaaacgcaguaaccgaacuacaacuacuuaugcaaucaacaccagcugcaggcucaggcucagcaaucugcucaggcauagcuguaugcaaaguacuacaucuagaaggagaaguaaacaaaauaaaaaacgcauuauuaucaacaaauaaagcaguaguaucacuaucaaauggaguaucaguacucacauucaaaguacuagaucuaaaaaacuacauugacaaacaauuacuaccaauccucaacaaacaaucaugcucaauauccaacauagaaacaguaauagaauuucaacaaaaaaacaaucgacuacuagaaauaacaagagaauuuucagucaaugccggaguuacaacacccguaagcacuuacaugcuaaccaacucagaacuacuaucacuaauaaacgacaugccaauuacaaacgaccaaaaaaaacuaaugucaaauaacguacaaauaguacgucaacaaucauacucaauaaugugcauaauaaaagaagaaguccuagcauacguaguacaauuacccuuauauggcguaauagacacaccaugcuggaaacuacacacauccccacucugcaccaccaacaccaaagaaggcuccaacauaugucuaacccgaaccgacagagguugguauugugauaacgcuggcuccguaucauucuucccacaagcagaaacauguaaaguacaaucaaacagaguauucugcgauacaaugaauagcagaacacuaccaucagaaguaaacuuaugcaacaucgacaucuucaaucccaaauacgacugcaaaauaaugacauccaaaacugacguuucuucaagcguaauaacaucuuuaggagcaauaguauccugcuacggaaaaacuaaaugcacagcauccaauaaaaaccguggaauaauaaaaacauucucaaauggcugcgacuacgucucaaacaaaggcguagacaccguuagugucggaaacacacuauauugcguaaauaaacaagaaggaaaauccuuauacguaaaaggcgaaccaauaauuaacuucuaugacccccucguauuuccauccgaugaauuugacgcaucaaucucgcaaguaaacgaaaaaauaaaccaaagccuagcauucauaagaaaauccgacgaacuacuccacaauguaaauguaggaaaaucaacuaccaacauaaugauuacuacuauaauaauaguaauuauagucaucuuacuacuauuaauagcagucggauuauuccuauacugcaaagcaagauagggacuaguguccaccugucccuccugggcugcuggauugucucguuuuccugccaaauaaacaggaucagcgcuuuacagaucuaaaaaaaaaaaaaaaaaaaaaaaaaaaaaaaaaaaaaaaaaaaaaaaaaaaaaaaaaaaaaaaaugcaucccccccccccccccccccccccccccccccaaaggcucuuuucagagccaccagaauu

SEQ ID NO: 16619 - RNA, 1853 nt, Artificial Sequence
  mRNA product Design c-1 comprising derived and/or modified sequence from HRSV(Memphis-37)__AIY60640.1__F-del_DSCav1_mut4 (opt11)
gggagaguccgcucagccagguugcagaagcggcuuagcguguguccuaaucuucucucugcguguagguaggccugugccgcaaacaagcuuaccauggagcuccccauccuaaaaaccaacgccaucaccaccauccucgccgccgucacccuaugcuucgcuucaucacaaaacaucaccgaagaauuuuaccaaucuaccugcuccgccgucuccaaaggauaucucagcgcccuacggaccggcugguacaccuccgucauaaccaucgaacucaguaacaucaaagaaaacaaaugcaacggcaccgacgccaaagucaaacuaaucaaacaagaacuagauaaauacaaaaacgcggucaccgaacuacaacuccuaaugcaaagcacccccgccgccggauccggcuccgccauaugcuccggcauugcugucugcaaaguacuacaccucgagggcgaggucaacaaaaucaaaaacgcacuacucagcacuaauaaagccguaguaucccuaucaaacggugucucagucuuaacauucaaaguacucgaccuaaagaacuacaucgacaaacaacuccuacccauccucaacaagcaguccuguucuaucucaaacaucgaaaccgucaucgaauuucaacaaaagaacaaccgccuccucgaaaucacacgcgaguucuccgucaacgcaggaguaaccacccccgucuccaccuacaugcucacaaacucggaacuccucucacuaaucaacgacaugcccaucaccaacgaccaaaagaaacucaugagcaacaacguucaaaucguccgccaacaaucauacuccaucaugugcauaaucaaagaagaaguccuagcuuacgucguccagcugccccucuacggagucaucgacacgcccugcuggaaacuacacacaagcccccucugcaccaccaacaccaaagaaggcuccaacauaugccucacacggaccgaccgcgguugguacugcgacaacgccggcuccgucuccuucuucccccaagcagaaacuugcaaaguccaauccaaccgcguauucugcgacacaaugaacagcagaacacucccuagcgaagucaaccucugcaacaucgacauauucaaccccaaauacgacugcaaaaucaugacgucaaaaaccgacgucuccagcuccguuaucaccucacucggcgccaucgucagcugcuacggcaaaacuaaaugcaccgccuccaacaaaaaccgcggcaucauuaaaaccuucagcaacggcugcgacuacgucuccaacaaaggugucgauacgguauccgucggaaacacccuauacugcgucaacaaacaagaaggcaaaucucucuacgucaaaggcgaacccauaaucaauuucuacgacccccuagucuuccccuccgaugaauuugacgccuccaucagccaagucaacgagaaaaucaaccaaucacuagccuucauccggaaauccgacgaacuccuacacaacguaaacgucggcaaauccaccaccaauauaaugaucacaaccaucaucaucguaaucaucgucauccuccuccuacucaucgccgucggauuauucuuauacugcaaagcccgcuaaggacuaguguccaccugucccuccugggcugcuggauugucucguuuuccugccaaauaaacaggaucagcgcuuuacagaucuaaaaaaaaaaaaaaaaaaaaaaaaaaaaaaaaaaaaaaaaaaaaaaaaaaaaaaaaaaaaaaaaugcaucccccccccccccccccccccccccccccccaaaggcucuuuucagagccaccagaauu

SEQ ID NO: 16620 - RNA, 1943 nt, Artificial Sequence
  mRNA product Design c-2 comprising derived and/or modified sequence from HRSV(Memphis-37)__AIY60640.1__F-del_DSCav1_mut4 (opt1)
gggagacuccugucgggcggaaguaggaggaguagaguuuaaaaacaguacucuuuuuccgguucgggacguaguugaagcaacgacaagccggauaaccgcucuugagacaggaagcuuaccauggagcugcccauccucaagaccaacgccaucaccacgauccuggccgcggugacccugugcuucgccagcucccagaacaucaccgaggaguucuaccagagcacgugcuccgccgucagcaagggcuaccucuccgcccugcgcaccgggugguacaccagcgugaucaccaucgagcuguccaacaucaaggagaacaagugcaacggcaccgacgccaaggugaagcucaucaagcaggagcuggacaaguacaagaacgcggucacggagcugcagcuccugaugcagagcaccccggccgccggcuccgggagcgcgaucugcuccggcaucgccgucugcaaggugcugcaccucgagggcgaggugaacaagaucaagaacgcccugcuguccaccaacaaggccgucgugagccucuccaacggggugagcguccugaccuucaaggugcuggaccucaagaacuacaucgacaagcagcugcugcccauccugaacaagcagagcugcuccaucagcaacaucgagaccgucaucgaguuccagcagaagaacaaccgccuccuggagaucacgcgggaguucagcgugaacgcgggcgugaccacccccgucuccaccuacaugcugacgaacagcgagcuccugucccugaucaacgacaugccgaucaccaacgaccagaagaagcucaugagcaacaacgugcagaucgugcgccagcaguccuacagcaucaugugcaucaucaaggaggagguccuggccuacguggugcagcugccccucuacggggucaucgacacccccugcuggaagcugcacaccagcccccugugcacgaccaacaccaaggagggcuccaacaucugccucacccggacggaccgcgggugguacugcgacaacgccggcagcguguccuucuucccgcaggccgagaccugcaagguccagagcaaccggguguucugcgacaccaugaacucccggacccugcccagcgaggugaaccucugcaacaucgacaucuucaaccccaaguacgacugcaagaucaugacguccaagaccgacgucagcuccagcgugaucaccucccugggcgccaucgugagcugcuacgggaagaccaagugcacggcgagcaacaagaaccgcggcaucaucaagaccuucuccaacgggugcgacuacgucagcaacaagggcguggacaccguguccgucggcaacacccuguacugcgugaacaagcaggagggcaagagccucuacgugaagggggagcccaucaucaacuucuacgacccgcuggucuuccccuccgacgaguucgacgccagcaucucccaggugaacgagaagaucaaccagagccuggccuucauccggaaguccgacgagcuccugcacaacgugaacgucggcaagagcaccacgaacaucaugaucaccaccaucaucaucgugaucaucgugauccugcugcuccugaucgccgucgggcuguuccucuacugcaaggcccgcugaggacuaguggaagcauuuuccuggcugauuaaaagaaauuacucagcuauggucaucuguuccuguuagaaggcuaugcagcauauuauauacuaugcgcauguuaugaaaugcauaauaaaaaauuuuaaaaaaucuaaaagaucuaaaaaaaaaaaaaaaaaaaaaaaaaaaaaaaaaaaaaaaaaaaaaaaaaaaaaaaaaaaaaaaaugcaucccccccccccccccccccccccccccccccaaaggcucuuuucagagccaccagaauu

SEQ ID NO: 16621 - RNA, 1943 nt, Artificial Sequence
  mRNA product Design c-2 comprising derived and/or modified sequence from HRSV(Memphis-37)__AIY60640.1__F-del_DSCav1_mut4 (opt1)
gggagacuccugucgggcggaaguaggaggaguagaguuuaaaaacaguacucuuuuuccgguucgggacguaguugaagcaacgacaagccggauaaccgcucuugagacaggaagcuuaccauggagcugcccauccucaagaccaacgccaucaccacgauccuggccgcggugacccugugcuucgccagcucccagaacaucaccgaggaguucuaccagagcacgugcuccgccgucagcaagggcuaccucuccgcccugcgcaccgggugguacaccagcgugaucaccaucgagcuguccaacaucaaggagaacaagugcaacggcaccgacgccaaggugaagcucaucaagcaggagcuggacaaguacaagaacgcggucacggagcugcagcuccugaugcagagcaccccggccgccggguccggcagcgccaucugcuccgggaucgcggugugcaaggugcugcaccucgagggcgaggucaacaagaucaagaacgcccugcugagcaccaacaaggccguggugucccucagcaacggcgucuccgugcugaccuucaaggugcuggaccucaagaacuacaucgacaagcagcugcugcccauccucaacaagcagagcugcuccaucagcaacaucgagacggucaucgaguuccagcagaagaacaaccggcugcuggagaucacccgcgaguucuccgugaacgccggggugaccacccccgucagcacguacaugcucaccaacagcgagcugcugucccucaucaacgacaugcccaucaccaacgaccagaagaagcugaugagcaacaacgugcagaucgugcggcagcaguccuacagcaucaugugcaucaucaaggaggagguccuggccuacguggugcagcucccgcuguacggcgucaucgacacccccugcuggaagcugcacacgagcccccucugcaccaccaacaccaaggagggguccaacaucugccugacgcgcaccgaccggggcugguacugcgacaacgcgggguccgugagcuucuucccccaggccgagaccugcaaggugcaguccaaccgcgucuucugcgacaccaugaacagccggacgcucccguccgaggugaaccugugcaacaucgacaucuucaaccccaaguacgacugcaagaucaugaccagcaagaccgacgucuccagcuccgugaucaccagccugggcgccaucguguccugcuacggcaagacgaagugcaccgccagcaacaagaaccgggggaucaucaagaccuucuccaacggcugcgacuacgucagcaacaaggggguggacaccgugagcgucggcaacacgcucuacugcgugaacaagcaggagggcaagucccuguacgugaagggggagcccaucaucaacuucuacgacccccuggucuucccgagcgacgaguucgacgccuccaucagccaggugaacgagaagaucaaccagucccucgcguucauccgcaagagcgacgagcugcugcacaacgugaacgucggcaaguccaccaccaacaucaugaucaccaccaucaucaucgugaucaucgugauccuccugcugcucaucgccgucgggcuguuccuguacugcaaggcccggugaggacuaguggaagcauuuuccuggcugauuaaaagaaauuacucagcuauggucaucuguuccuguuagaaggcuaugcagcauauuauauacuaugcgcauguuaugaaaugcauaauaaaaaauuuuaaaaaaucuaaaagaucuaaaaaaaaaaaaaaaaaaaaaaaaaaaaaaaaaaaaaaaaaaaaaaaaaaaaaaaaaaaaaaaaugcaucccccccccccccccccccccccccccccccaaaggcucuuuucagagccaccagaauu

SEQ ID NO: 16622 - RNA, 1943 nt, Artificial Sequence
  mRNA product Design c-2 comprising derived and/or modified sequence from HRSV(Memphis-37)__AIY60640.1__F-del_DSCav1_mut4 (opt2)
gggagacuccugucgggcggaaguaggaggaguagaguuuaaaaacaguacucuuuuuccgguucgggacguaguugaagcaacgacaagccggauaaccgcucuugagacaggaagcuuaccauggagcuccccauccucaagaccaacgccaucaccaccauccucgccgccgucacccucugcuucgccuccucccagaacaucaccgaggaguucuaccaguccaccugcuccgccgucuccaagggcuaccucuccgcccuccgcaccggcugguacaccuccgucaucaccaucgagcucuccaacaucaaggagaacaagugcaacggcaccgacgccaaggucaagcucaucaagcaggagcucgacaaguacaagaacgccgucaccgagcuccagcuccucaugcaguccacccccgccgccggcuccggcuccgccaucugcuccggcaucgccgucugcaagguccuccaccucgagggcgaggucaacaagaucaagaacgcccuccucuccaccaacaaggccgucgucucccucuccaacggcgucuccguccucaccuucaagguccucgaccucaagaacuacaucgacaagcagcuccuccccauccucaacaagcaguccugcuccaucuccaacaucgagaccgucaucgaguuccagcagaagaacaaccgccuccucgagaucacccgcgaguucuccgucaacgccggcgucaccacccccgucuccaccuacaugcucaccaacuccgagcuccucucccucaucaacgacaugcccaucaccaacgaccagaagaagcucauguccaacaacguccagaucguccgccagcaguccuacuccaucaugugcaucaucaaggaggagguccucgccuacgucguccagcucccccucuacggcgucaucgacacccccugcuggaagcuccacaccuccccccucugcaccaccaacaccaaggagggcuccaacaucugccucacccgcaccgaccgcggcugguacugcgacaacgccggcuccgucuccuucuucccccaggccgagaccugcaagguccaguccaaccgcgucuucugcgacaccaugaacucccgcacccuccccuccgaggucaaccucugcaacaucgacaucuucaaccccaaguacgacugcaagaucaugaccuccaagaccgacgucuccuccuccgucaucaccucccucggcgccaucgucuccugcuacggcaagaccaagugcaccgccuccaacaagaaccgcggcaucaucaagaccuucuccaacggcugcgacuacgucuccaacaagggcgucgacaccgucuccgucggcaacacccucuacugcgucaacaagcaggagggcaagucccucuacgucaagggcgagcccaucaucaacuucuacgacccccucgucuuccccuccgacgaguucgacgccuccaucucccaggucaacgagaagaucaaccagucccucgccuucauccgcaaguccgacgagcuccuccacaacgucaacgucggcaaguccaccaccaacaucaugaucaccaccaucaucaucgucaucaucgucauccuccuccuccucaucgccgucggccucuuccucuacugcaaggcccgcugaggacuaguggaagcauuuuccuggcugauuaaaagaaauuacucagcuauggucaucuguuccuguuagaaggcuaugcagcauauuauauacuaugcgcauguuaugaaaugcauaauaaaaaauuuuaaaaaaucuaaaagaucuaaaaaaaaaaaaaaaaaaaaaaaaaaaaaaaaaaaaaaaaaaaaaaaaaaaaaaaaaaaaaaaaugcaucccccccccccccccccccccccccccccccaaaggcucuuuucagagccaccagaauu

SEQ ID NO: 16623 - RNA, 1943 nt, Artificial Sequence
  mRNA product Design c-2 comprising derived and/or modified sequence from HRSV(Memphis-37)__AIY60640.1__F-del_DSCav1_mut4 (opt3)
gggagacuccugucgggcggaaguaggaggaguagaguuuaaaaacaguacucuuuuuccgguucgggacguaguugaagcaacgacaagccggauaaccgcucuugagacaggaagcuuaccauggagcugcccauccucaagaccaacgccauuacaacuauacuugcugcagugacgcugugcuucgccagcucccagaauaucaccgaagaguuuuaccaaucuacauguucagcggucaguaaaggcuauuugagcgcuuuaagaacugggugguacaccuccguuauuacaaucgaacugucuaacauuaaggagaauaaaugcaacggaaccgacgccaaggugaaacuaaucaagcaggaacucgauaaguauaaaaaugcaguaacugagcugcagcuucugaugcagucgaccccugccgcugguucaggcagcgcaauauguagugggaucgccgugugcaaggucuugcaccucgagggagaagugaacaaaauuaagaaugcucugcuguccacaaacaaagccguugugucucucagcaauggcgucuccguguuaacguucaagguacuggaccuuaagaacuacaucgauaaacaauugcugccaauucuaaauaagcagucauguaguaucagcaacauagagacuguuauugaauuucagcagaaaaauaacaggcuccuggagaucacccgggaguucucugugaaugcgggugucacaacuccgguguccaccuauaugcuuacaaacucagaacuguugagccucauuaacgacaugcccaucaccaaugaucaaaagaaacugaugaguaacaaugugcagaucguccgccagcagucuuacuccauuaugugcauaaucaaggaggaaguuuuagcauaugugguacaacugccucucuacggggugauugacacgccauguuggaaacuucauacuagcccccugugcacaaccaacacuaaggagggaucgaauaucuguuugacacgaaccgaucguggcugguacugcgacaacgccggcucugucuccuuuuucccucaggcugaaacguguaaggugcagucaaauagaguguuuugcgauaccaugaacaguagaacacugccaagcgaggugaaucucugcaacauagacauuuucaaucccaaauaugauuguaagaucaugacuuccaaaaccgacgucucuagcucagugaucacaagucugggggccauuguauccugcuacggaaagacuaaauguaccgcaagcaacaagaauagggguaucauuaagacauuuucuaacggcugcgauuauguuucaaauaaagggguggacaccgucagugugggaaacacucuuuacugugucaacaagcaagagggcaaaagccuguaugugaagggugaaccuauaaucaauuucuacgacccauugguuuuuccguccgaugaguucgacgcuucuauuucgcagguuaacgagaaaaucaaucagagccucgccuuuauccggaaguccgaugaacuguuacacaacguaaaugucgggaagucaacgacaaacauuaugauaaccacuaucauuaucgugauuaucguuauacugcuacuccugaucgcggugggacuuuucuuguauugcaaagcccgcugaggacuaguggaagcauuuuccuggcugauuaaaagaaauuacucagcuauggucaucuguuccuguuagaaggcuaugcagcauauuauauacuaugcgcauguuaugaaaugcauaauaaaaaauuuuaaaaaaucuaaaagaucuaaaaaaaaaaaaaaaaaaaaaaaaaaaaaaaaaaaaaaaaaaaaaaaaaaaaaaaaaaaaaaaaugcaucccccccccccccccccccccccccccccccaaaggcucuuuucagagccaccagaauu

SEQ ID NO: 16624 - RNA, 1943 nt, Artificial Sequence
  mRNA product Design c-2 comprising derived and/or modified sequence from HRSV(Memphis-37)__AIY60640.1__F-del_DSCav1_mut4 (opt4)
gggagacuccugucgggcggaaguaggaggaguagaguuuaaaaacaguacucuuuuuccgguucgggacguaguugaagcaacgacaagccggauaaccgcucuugagacaggaagcuuaccauggagcugcccauccugaagaccaacgccaucaccaccauccuggccgccgugacccugugcuucgccagcagccagaacaucaccgaggaguucuaccagagcaccugcagcgccgugagcaagggcuaccugagcgcccugagaaccggcugguacaccagcgugaucaccaucgagcugagcaacaucaaggagaacaagugcaacggcaccgacgccaaggugaagcugaucaagcaggagcuggacaaguacaagaacgccgugaccgagcugcagcugcugaugcagagcacccccgccgccggcagcggcagcgccaucugcagcggcaucgccgugugcaaggugcugcaccuggagggcgaggugaacaagaucaagaacgcccugcugagcaccaacaaggccguggugagccugagcaacggcgugagcgugcugaccuucaaggugcuggaccugaagaacuacaucgacaagcagcugcugcccauccugaacaagcagagcugcagcaucagcaacaucgagaccgugaucgaguuccagcagaagaacaacagacugcuggagaucaccagagaguucagcgugaacgccggcgugaccacccccgugagcaccuacaugcugaccaacagcgagcugcugagccugaucaacgacaugcccaucaccaacgaccagaagaagcugaugagcaacaacgugcagaucgugagacagcagagcuacagcaucaugugcaucaucaaggaggaggugcuggccuacguggugcagcugccccuguacggcgugaucgacacccccugcuggaagcugcacaccagcccccugugcaccaccaacaccaaggagggcagcaacaucugccugaccagaaccgacagaggcugguacugcgacaacgccggcagcgugagcuucuucccccaggccgagaccugcaaggugcagagcaacagaguguucugcgacaccaugaacagcagaacccugcccagcgaggugaaccugugcaacaucgacaucuucaaccccaaguacgacugcaagaucaugaccagcaagaccgacgugagcagcagcgugaucaccagccugggcgccaucgugagcugcuacggcaagaccaagugcaccgccagcaacaagaacagaggcaucaucaagaccuucagcaacggcugcgacuacgugagcaacaagggcguggacaccgugagcgugggcaacacccuguacugcgugaacaagcaggagggcaagagccuguacgugaagggcgagcccaucaucaacuucuacgacccccugguguuccccagcgacgaguucgacgccagcaucagccaggugaacgagaagaucaaccagagccuggccuucaucagaaagagcgacgagcugcugcacaacgugaacgugggcaagagcaccaccaacaucaugaucaccaccaucaucaucgugaucaucgugauccugcugcugcugaucgccgugggccuguuccuguacugcaaggccagaugaggacuaguggaagcauuuuccuggcugauuaaaagaaauuacucagcuauggucaucuguuccuguuagaaggcuaugcagcauauuauauacuaugcgcauguuaugaaaugcauaauaaaaaauuuuaaaaaaucuaaaagaucuaaaaaaaaaaaaaaaaaaaaaaaaaaaaaaaaaaaaaaaaaaaaaaaaaaaaaaaaaaaaaaaaugcaucccccccccccccccccccccccccccccccaaaggcucuuuucagagccaccagaauu

SEQ ID NO: 16625 - RNA, 1943 nt, Artificial Sequence
  mRNA product Design c-2 comprising derived and/or modified sequence from HRSV(Memphis-37)__AIY60640.1__F-del_DSCav1_mut4 (opt5)
gggagacuccugucgggcggaaguaggaggaguagaguuuaaaaacaguacucuuuuuccgguucgggacguaguugaagcaacgacaagccggauaaccgcucuugagacaggaagcuuaccauggagcugcccauccucaagaccaacgccauuacaacgauccuggcugccgugacccuuugcuucgcgagcucccagaauauuacagaagaguuuuaccaaucuaccuguagcgcugucuccaaaggcuaucugucugcccucagaacagggugguacaccagcguuaucacaauugaacuguccaacaucaaggagaauaaaugcaacggaaccgacgccaaggugaaacuuaucaagcaggaacuggauaaguauaaaaaugcugugacggagcuccagcugcugaugcagucuaccccugccgcuggcagcggguccgccauuuguagcggaaucgcggucugcaaggugcuccaccuggagggcgaaguuaacaaaauuaagaaugcccuucugucuacaaacaaagcuguggucucccucagcaauggggugucuguucugaccuucaaggugcuugaccugaagaacuacaucgauaaacaacuccugccgauucugaauaagcaguccuguagcaucucuaacauugagacagucaucgaauuucagcagaaaaauaaccggcuccuggagaucacccgcgaguucuccgugaaugccggagugacgacacccgucagcaccuauaugcuuacaaacuccgaacugcucucucugauuaacgacaugccuaucaccaaugaucaaaagaaacuuaugagcaacaauguucagauugugagacagcaguccuacagcaucaugugcauuaucaaggaggaagugcuggcuuaugucgugcaacucccccuguacggcguuaucgacaccccuuguuggaaacugcauacaucuccccucugcacgaccaacacaaaggagggcuccaauauuugucugacccggacagaucgcgggugguacugcgacaacgccggaagcgugagcuuuuucccucaggcggaaaccuguaagguccagucuaauagaguguuuugcgauacgaugaacuccagaacacugccgucugagguuaaucucugcaacaucgacauuuucaaucccaaauaugauuguaagaucaugaccagcaaaaccgacguguccagcucugucauuacaucccugggcgccaucgugagcugcuacgggaagaccaaauguacagcuucuaacaagaaucggggaaucauuaagacguuuuccaacggcugcgauuaugucagcaauaaagggguggacaccguuuccgugggaaacacacuuuacugugucaacaagcaagagggcaaaucucuguaugugaagggcgaaccuaucauuaauuucuacgacccccucguuuuuccuagcgaugaguucgacgccuccaucucucaggugaacgaaaagauuaaucagagccuggcuuuuauccgcaaguccgaugagcugcuccacaacgucaauguggggaaaagcaccacaaacauuaugaucaccacgaucauuaucgugauuaucguuauucugcuucugcucaucgccgucggacuguuccuguauugcaaagccagaugaggacuaguggaagcauuuuccuggcugauuaaaagaaauuacucagcuauggucaucuguuccuguuagaaggcuaugcagcauauuauauacuaugcgcauguuaugaaaugcauaauaaaaaauuuuaaaaaaucuaaaagaucuaaaaaaaaaaaaaaaaaaaaaaaaaaaaaaaaaaaaaaaaaaaaaaaaaaaaaaaaaaaaaaaaugcaucccccccccccccccccccccccccccccccaaaggcucuuuucagagccaccagaauu

SEQ ID NO: 16626 - RNA, 1943 nt, Artificial Sequence
  mRNA product Design c-2 comprising derived and/or modified sequence from HRSV(Memphis-37)__AIY60640.1__F-del_DSCav1_mut4 (opt6)
gggagacuccugucgggcggaaguaggaggaguagaguuuaaaaacaguacucuuuuuccgguucgggacguaguugaagcaacgacaagccggauaaccgcucuugagacaggaagcuuaccauggaacuaccaauacucaaaacaaacgcaauaacaacuauacuagccgcaguuacacucugcuucgcuucaucacaaaauaucacagaagaauuuuaccaaucuacauguucagcuguauccaaagguuaccuuucagcacuacgaacaggaugguauaccucaguaaucaccaucgaacucucgaacauaaaagaaaacaaauguaacggaaccgaugcuaaagucaagcucauaaaacaagaacuagacaaauacaaaaacgcaguaaccgaacuacaacuacuuaugcaaucaacaccagcugcaggcucaggcucagcaaucugcucaggcauagcuguaugcaaaguacuacaucuagaaggagaaguaaacaaaauaaaaaacgcauuauuaucaacaaauaaagcaguaguaucacuaucaaauggaguaucaguacucacauucaaaguacuagaucuaaaaaacuacauugacaaacaauuacuaccaauccucaacaaacaaucaugcucaauauccaacauagaaacaguaauagaauuucaacaaaaaaacaaucgacuacuagaaauaacaagagaauuuucagucaaugccggaguuacaacacccguaagcacuuacaugcuaaccaacucagaacuacuaucacuaauaaacgacaugccaauuacaaacgaccaaaaaaaacuaaugucaaauaacguacaaauaguacgucaacaaucauacucaauaaugugcauaauaaaagaagaaguccuagcauacguaguacaauuacccuuauauggcguaauagacacaccaugcuggaaacuacacacauccccacucugcaccaccaacaccaaagaaggcuccaacauaugucuaacccgaaccgacagagguugguauugugauaacgcuggcuccguaucauucuucccacaagcagaaacauguaaaguacaaucaaacagaguauucugcgauacaaugaauagcagaacacuaccaucagaaguaaacuuaugcaacaucgacaucuucaaucccaaauacgacugcaaaauaaugacauccaaaacugacguuucuucaagcguaauaacaucuuuaggagcaauaguauccugcuacggaaaaacuaaaugcacagcauccaauaaaaaccguggaauaauaaaaacauucucaaauggcugcgacuacgucucaaacaaaggcguagacaccguuagugucggaaacacacuauauugcguaaauaaacaagaaggaaaauccuuauacguaaaaggcgaaccaauaauuaacuucuaugacccccucguauuuccauccgaugaauuugacgcaucaaucucgcaaguaaacgaaaaaauaaaccaaagccuagcauucauaagaaaauccgacgaacuacuccacaauguaaauguaggaaaaucaacuaccaacauaaugauuacuacuauaauaauaguaauuauagucaucuuacuacuauuaauagcagucggauuauuccuauacugcaaagcaagauagggacuaguggaagcauuuuccuggcugauuaaaagaaauuacucagcuauggucaucuguuccuguuagaaggcuaugcagcauauuauauacuaugcgcauguuaugaaaugcauaauaaaaaauuuuaaaaaaucuaaaagaucuaaaaaaaaaaaaaaaaaaaaaaaaaaaaaaaaaaaaaaaaaaaaaaaaaaaaaaaaaaaaaaaaugcaucccccccccccccccccccccccccccccccaaaggcucuuuucagagccaccagaauu

SEQ ID NO: 16627 - RNA, 1943 nt, Artificial Sequence
  mRNA product Design c-2 comprising derived and/or modified sequence from HRSV(Memphis-37)__AIY60640.1__F-del_DSCav1_mut4 (opt11)
gggagacuccugucgggcggaaguaggaggaguagaguuuaaaaacaguacucuuuuuccgguucgggacguaguugaagcaacgacaagccggauaaccgcucuugagacaggaagcuuaccauggagcuccccauccuaaaaaccaacgccaucaccaccauccucgccgccgucacccuaugcuucgcuucaucacaaaacaucaccgaagaauuuuaccaaucuaccugcuccgccgucuccaaaggauaucucagcgcccuacggaccggcugguacaccuccgucauaaccaucgaacucaguaacaucaaagaaaacaaaugcaacggcaccgacgccaaagucaaacuaaucaaacaagaacuagauaaauacaaaaacgcggucaccgaacuacaacuccuaaugcaaagcacccccgccgccggauccggcuccgccauaugcuccggcauugcugucugcaaaguacuacaccucgagggcgaggucaacaaaaucaaaaacgcacuacucagcacuaauaaagccguaguaucccuaucaaacggugucucagucuuaacauucaaaguacucgaccuaaagaacuacaucgacaaacaacuccuacccauccucaacaagcaguccuguucuaucucaaacaucgaaaccgucaucgaauuucaacaaaagaacaaccgccuccucgaaaucacacgcgaguucuccgucaacgcaggaguaaccacccccgucuccaccuacaugcucacaaacucggaacuccucucacuaaucaacgacaugcccaucaccaacgaccaaaagaaacucaugagcaacaacguucaaaucguccgccaacaaucauacuccaucaugugcauaaucaaagaagaaguccuagcuuacgucguccagcugccccucuacggagucaucgacacgcccugcuggaaacuacacacaagcccccucugcaccaccaacaccaaagaaggcuccaacauaugccucacacggaccgaccgcgguugguacugcgacaacgccggcuccgucuccuucuucccccaagcagaaacuugcaaaguccaauccaaccgcguauucugcgacacaaugaacagcagaacacucccuagcgaagucaaccucugcaacaucgacauauucaaccccaaauacgacugcaaaaucaugacgucaaaaaccgacgucuccagcuccguuaucaccucacucggcgccaucgucagcugcuacggcaaaacuaaaugcaccgccuccaacaaaaaccgcggcaucauuaaaaccuucagcaacggcugcgacuacgucuccaacaaaggugucgauacgguauccgucggaaacacccuauacugcgucaacaaacaagaaggcaaaucucucuacgucaaaggcgaacccauaaucaauuucuacgacccccuagucuuccccuccgaugaauuugacgccuccaucagccaagucaacgagaaaaucaaccaaucacuagccuucauccggaaauccgacgaacuccuacacaacguaaacgucggcaaauccaccaccaauauaaugaucacaaccaucaucaucguaaucaucgucauccuccuccuacucaucgccgucggauuauucuuauacugcaaagcccgcuaaggacuaguggaagcauuuuccuggcugauuaaaagaaauuacucagcuauggucaucuguuccuguuagaaggcuaugcagcauauuauauacuaugcgcauguuaugaaaugcauaauaaaaaauuuuaaaaaaucuaaaagaucuaaaaaaaaaaaaaaaaaaaaaaaaaaaaaaaaaaaaaaaaaaaaaaaaaaaaaaaaaaaaaaaaugcaucccccccccccccccccccccccccccccccaaaggcucuuuucagagccaccagaauu

SEQ ID NO: 16628 - RNA, 1920 nt, Artificial Sequence
  mRNA product Design c-3 comprising derived and/or modified sequence from HRSV(Memphis-37)__AIY60640.1__F-del_DSCav1_mut4 (opt1)
gggagaguccgcucagccagguugcagaagcggcuuagcguguguccuaaucuucucucugcguguagguaggccugugccgcaaacaagcuuaccauggagcugcccauccucaagaccaacgccaucaccacgauccuggccgcggugacccugugcuucgccagcucccagaacaucaccgaggaguucuaccagagcacgugcuccgccgucagcaagggcuaccucuccgcccugcgcaccgggugguacaccagcgugaucaccaucgagcuguccaacaucaaggagaacaagugcaacggcaccgacgccaaggugaagcucaucaagcaggagcuggacaaguacaagaacgcggucacggagcugcagcuccugaugcagagcaccccggccgccggcuccgggagcgcgaucugcuccggcaucgccgucugcaaggugcugcaccucgagggcgaggugaacaagaucaagaacgcccugcuguccaccaacaaggccgucgugagccucuccaacggggugagcguccugaccuucaaggugcuggaccucaagaacuacaucgacaagcagcugcugcccauccugaacaagcagagcugcuccaucagcaacaucgagaccgucaucgaguuccagcagaagaacaaccgccuccuggagaucacgcgggaguucagcgugaacgcgggcgugaccacccccgucuccaccuacaugcugacgaacagcgagcuccugucccugaucaacgacaugccgaucaccaacgaccagaagaagcucaugagcaacaacgugcagaucgugcgccagcaguccuacagcaucaugugcaucaucaaggaggagguccuggccuacguggugcagcugccccucuacggggucaucgacacccccugcuggaagcugcacaccagcccccugugcacgaccaacaccaaggagggcuccaacaucugccucacccggacggaccgcgggugguacugcgacaacgccggcagcguguccuucuucccgcaggccgagaccugcaagguccagagcaaccggguguucugcgacaccaugaacucccggacccugcccagcgaggugaaccucugcaacaucgacaucuucaaccccaaguacgacugcaagaucaugacguccaagaccgacgucagcuccagcgugaucaccucccugggcgccaucgugagcugcuacgggaagaccaagugcacggcgagcaacaagaaccgcggcaucaucaagaccuucuccaacgggugcgacuacgucagcaacaagggcguggacaccguguccgucggcaacacccuguacugcgugaacaagcaggagggcaagagccucuacgugaagggggagcccaucaucaacuucuacgacccgcuggucuuccccuccgacgaguucgacgccagcaucucccaggugaacgagaagaucaaccagagccuggccuucauccggaaguccgacgagcuccugcacaacgugaacgucggcaagagcaccacgaacaucaugaucaccaccaucaucaucgugaucaucgugauccugcugcuccugaucgccgucgggcuguuccucuacugcaaggcccgcugaggacuaguacuggcugcaucucccuuuccucuguccuccauccuucucccaggauggugaagggggaccugguacccagugauccccaccccaggauccuaaaucaugacuuaccugcuaauaaaaacucauuggaaaagugagaagaucuaaaaaaaaaaaaaaaaaaaaaaaaaaaaaaaaaaaaaaaaaaaaaaaaaaaaaaaaaaaaaaaaugcaucccccccccccccccccccccccccccccccaaaggcucuuuucagagccaccagaauu

SEQ ID NO: 16629 - RNA, 1920 nt, Artificial Sequence
  mRNA product Design c-3 comprising derived and/or modified sequence from HRSV(Memphis-37)__AIY60640.1__F-del_DSCav1_mut4 (opt1)
gggagaguccgcucagccagguugcagaagcggcuuagcguguguccuaaucuucucucugcguguagguaggccugugccgcaaacaagcuuaccauggagcugcccauccucaagaccaacgccaucaccacgauccuggccgcggugacccugugcuucgccagcucccagaacaucaccgaggaguucuaccagagcacgugcuccgccgucagcaagggcuaccucuccgcccugcgcaccgggugguacaccagcgugaucaccaucgagcuguccaacaucaaggagaacaagugcaacggcaccgacgccaaggugaagcucaucaagcaggagcuggacaaguacaagaacgcggucacggagcugcagcuccugaugcagagcaccccggccgccggguccggcagcgccaucugcuccgggaucgcggugugcaaggugcugcaccucgagggcgaggucaacaagaucaagaacgcccugcugagcaccaacaaggccguggugucccucagcaacggcgucuccgugcugaccuucaaggugcuggaccucaagaacuacaucgacaagcagcugcugcccauccucaacaagcagagcugcuccaucagcaacaucgagacggucaucgaguuccagcagaagaacaaccggcugcuggagaucacccgcgaguucuccgugaacgccggggugaccacccccgucagcacguacaugcucaccaacagcgagcugcugucccucaucaacgacaugcccaucaccaacgaccagaagaagcugaugagcaacaacgugcagaucgugcggcagcaguccuacagcaucaugugcaucaucaaggaggagguccuggccuacguggugcagcucccgcuguacggcgucaucgacacccccugcuggaagcugcacacgagcccccucugcaccaccaacaccaaggagggguccaacaucugccugacgcgcaccgaccggggcugguacugcgacaacgcgggguccgugagcuucuucccccaggccgagaccugcaaggugcaguccaaccgcgucuucugcgacaccaugaacagccggacgcucccguccgaggugaaccugugcaacaucgacaucuucaaccccaaguacgacugcaagaucaugaccagcaagaccgacgucuccagcuccgugaucaccagccugggcgccaucguguccugcuacggcaagacgaagugcaccgccagcaacaagaaccgggggaucaucaagaccuucuccaacggcugcgacuacgucagcaacaaggggguggacaccgugagcgucggcaacacgcucuacugcgugaacaagcaggagggcaagucccuguacgugaagggggagcccaucaucaacuucuacgacccccuggucuucccgagcgacgaguucgacgccuccaucagccaggugaacgagaagaucaaccagucccucgcguucauccgcaagagcgacgagcugcugcacaacgugaacgucggcaaguccaccaccaacaucaugaucaccaccaucaucaucgugaucaucgugauccuccugcugcucaucgccgucgggcuguuccuguacugcaaggcccggugaggacuaguacuggcugcaucucccuuuccucuguccuccauccuucucccaggauggugaagggggaccugguacccagugauccccaccccaggauccuaaaucaugacuuaccugcuaauaaaaacucauuggaaaagugagaagaucuaaaaaaaaaaaaaaaaaaaaaaaaaaaaaaaaaaaaaaaaaaaaaaaaaaaaaaaaaaaaaaaaugcaucccccccccccccccccccccccccccccccaaaggcucuuuucagagccaccagaauu

SEQ ID NO: 16630 - RNA, 1920 nt, Artificial Sequence
  mRNA product Design c-3 comprising derived and/or modified sequence from HRSV(Memphis-37)__AIY60640.1__F-del_DSCav1_mut4 (opt2)
gggagaguccgcucagccagguugcagaagcggcuuagcguguguccuaaucuucucucugcguguagguaggccugugccgcaaacaagcuuaccauggagcuccccauccucaagaccaacgccaucaccaccauccucgccgccgucacccucugcuucgccuccucccagaacaucaccgaggaguucuaccaguccaccugcuccgccgucuccaagggcuaccucuccgcccuccgcaccggcugguacaccuccgucaucaccaucgagcucuccaacaucaaggagaacaagugcaacggcaccgacgccaaggucaagcucaucaagcaggagcucgacaaguacaagaacgccgucaccgagcuccagcuccucaugcaguccacccccgccgccggcuccggcuccgccaucugcuccggcaucgccgucugcaagguccuccaccucgagggcgaggucaacaagaucaagaacgcccuccucuccaccaacaaggccgucgucucccucuccaacggcgucuccguccucaccuucaagguccucgaccucaagaacuacaucgacaagcagcuccuccccauccucaacaagcaguccugcuccaucuccaacaucgagaccgucaucgaguuccagcagaagaacaaccgccuccucgagaucacccgcgaguucuccgucaacgccggcgucaccacccccgucuccaccuacaugcucaccaacuccgagcuccucucccucaucaacgacaugcccaucaccaacgaccagaagaagcucauguccaacaacguccagaucguccgccagcaguccuacuccaucaugugcaucaucaaggaggagguccucgccuacgucguccagcucccccucuacggcgucaucgacacccccugcuggaagcuccacaccuccccccucugcaccaccaacaccaaggagggcuccaacaucugccucacccgcaccgaccgcggcugguacugcgacaacgccggcuccgucuccuucuucccccaggccgagaccugcaagguccaguccaaccgcgucuucugcgacaccaugaacucccgcacccuccccuccgaggucaaccucugcaacaucgacaucuucaaccccaaguacgacugcaagaucaugaccuccaagaccgacgucuccuccuccgucaucaccucccucggcgccaucgucuccugcuacggcaagaccaagugcaccgccuccaacaagaaccgcggcaucaucaagaccuucuccaacggcugcgacuacgucuccaacaagggcgucgacaccgucuccgucggcaacacccucuacugcgucaacaagcaggagggcaagucccucuacgucaagggcgagcccaucaucaacuucuacgacccccucgucuuccccuccgacgaguucgacgccuccaucucccaggucaacgagaagaucaaccagucccucgccuucauccgcaaguccgacgagcuccuccacaacgucaacgucggcaaguccaccaccaacaucaugaucaccaccaucaucaucgucaucaucgucauccuccuccuccucaucgccgucggccucuuccucuacugcaaggcccgcugaggacuaguacuggcugcaucucccuuuccucuguccuccauccuucucccaggauggugaagggggaccugguacccagugauccccaccccaggauccuaaaucaugacuuaccugcuaauaaaaacucauuggaaaagugagaagaucuaaaaaaaaaaaaaaaaaaaaaaaaaaaaaaaaaaaaaaaaaaaaaaaaaaaaaaaaaaaaaaaaugcaucccccccccccccccccccccccccccccccaaaggcucuuuucagagccaccagaauu

SEQ ID NO: 16631 - RNA, 1920 nt, Artificial Sequence
  mRNA product Design c-3 comprising derived and/or modified sequence from HRSV(Memphis-37)__AIY60640.1__F-del_DSCav1_mut4 (opt3)
gggagaguccgcucagccagguugcagaagcggcuuagcguguguccuaaucuucucucugcguguagguaggccugugccgcaaacaagcuuaccauggagcugcccauccucaagaccaacgccauuacaacuauacuugcugcagugacgcugugcuucgccagcucccagaauaucaccgaagaguuuuaccaaucuacauguucagcggucaguaaaggcuauuugagcgcuuuaagaacugggugguacaccuccguuauuacaaucgaacugucuaacauuaaggagaauaaaugcaacggaaccgacgccaaggugaaacuaaucaagcaggaacucgauaaguauaaaaaugcaguaacugagcugcagcuucugaugcagucgaccccugccgcugguucaggcagcgcaauauguagugggaucgccgugugcaaggucuugcaccucgagggagaagugaacaaaauuaagaaugcucugcuguccacaaacaaagccguugugucucucagcaauggcgucuccguguuaacguucaagguacuggaccuuaagaacuacaucgauaaacaauugcugccaauucuaaauaagcagucauguaguaucagcaacauagagacuguuauugaauuucagcagaaaaauaacaggcuccuggagaucacccgggaguucucugugaaugcgggugucacaacuccgguguccaccuauaugcuuacaaacucagaacuguugagccucauuaacgacaugcccaucaccaaugaucaaaagaaacugaugaguaacaaugugcagaucguccgccagcagucuuacuccauuaugugcauaaucaaggaggaaguuuuagcauaugugguacaacugccucucuacggggugauugacacgccauguuggaaacuucauacuagcccccugugcacaaccaacacuaaggagggaucgaauaucuguuugacacgaaccgaucguggcugguacugcgacaacgccggcucugucuccuuuuucccucaggcugaaacguguaaggugcagucaaauagaguguuuugcgauaccaugaacaguagaacacugccaagcgaggugaaucucugcaacauagacauuuucaaucccaaauaugauuguaagaucaugacuuccaaaaccgacgucucuagcucagugaucacaagucugggggccauuguauccugcuacggaaagacuaaauguaccgcaagcaacaagaauagggguaucauuaagacauuuucuaacggcugcgauuauguuucaaauaaagggguggacaccgucagugugggaaacacucuuuacugugucaacaagcaagagggcaaaagccuguaugugaagggugaaccuauaaucaauuucuacgacccauugguuuuuccguccgaugaguucgacgcuucuauuucgcagguuaacgagaaaaucaaucagagccucgccuuuauccggaaguccgaugaacuguuacacaacguaaaugucgggaagucaacgacaaacauuaugauaaccacuaucauuaucgugauuaucguuauacugcuacuccugaucgcggugggacuuuucuuguauugcaaagcccgcugaggacuaguacuggcugcaucucccuuuccucuguccuccauccuucucccaggauggugaagggggaccugguacccagugauccccaccccaggauccuaaaucaugacuuaccugcuaauaaaaacucauuggaaaagugagaagaucuaaaaaaaaaaaaaaaaaaaaaaaaaaaaaaaaaaaaaaaaaaaaaaaaaaaaaaaaaaaaaaaaugcaucccccccccccccccccccccccccccccccaaaggcucuuuucagagccaccagaauu

SEQ ID NO: 16632 - RNA, 1920 nt, Artificial Sequence
  mRNA product Design c-3 comprising derived and/or modified sequence from HRSV(Memphis-37)__AIY60640.1__F-del_DSCav1_mut4 (opt4)
gggagaguccgcucagccagguugcagaagcggcuuagcguguguccuaaucuucucucugcguguagguaggccugugccgcaaacaagcuuaccauggagcugcccauccugaagaccaacgccaucaccaccauccuggccgccgugacccugugcuucgccagcagccagaacaucaccgaggaguucuaccagagcaccugcagcgccgugagcaagggcuaccugagcgcccugagaaccggcugguacaccagcgugaucaccaucgagcugagcaacaucaaggagaacaagugcaacggcaccgacgccaaggugaagcugaucaagcaggagcuggacaaguacaagaacgccgugaccgagcugcagcugcugaugcagagcacccccgccgccggcagcggcagcgccaucugcagcggcaucgccgugugcaaggugcugcaccuggagggcgaggugaacaagaucaagaacgcccugcugagcaccaacaaggccguggugagccugagcaacggcgugagcgugcugaccuucaaggugcuggaccugaagaacuacaucgacaagcagcugcugcccauccugaacaagcagagcugcagcaucagcaacaucgagaccgugaucgaguuccagcagaagaacaacagacugcuggagaucaccagagaguucagcgugaacgccggcgugaccacccccgugagcaccuacaugcugaccaacagcgagcugcugagccugaucaacgacaugcccaucaccaacgaccagaagaagcugaugagcaacaacgugcagaucgugagacagcagagcuacagcaucaugugcaucaucaaggaggaggugcuggccuacguggugcagcugccccuguacggcgugaucgacacccccugcuggaagcugcacaccagcccccugugcaccaccaacaccaaggagggcagcaacaucugccugaccagaaccgacagaggcugguacugcgacaacgccggcagcgugagcuucuucccccaggccgagaccugcaaggugcagagcaacagaguguucugcgacaccaugaacagcagaacccugcccagcgaggugaaccugugcaacaucgacaucuucaaccccaaguacgacugcaagaucaugaccagcaagaccgacgugagcagcagcgugaucaccagccugggcgccaucgugagcugcuacggcaagaccaagugcaccgccagcaacaagaacagaggcaucaucaagaccuucagcaacggcugcgacuacgugagcaacaagggcguggacaccgugagcgugggcaacacccuguacugcgugaacaagcaggagggcaagagccuguacgugaagggcgagcccaucaucaacuucuacgacccccugguguuccccagcgacgaguucgacgccagcaucagccaggugaacgagaagaucaaccagagccuggccuucaucagaaagagcgacgagcugcugcacaacgugaacgugggcaagagcaccaccaacaucaugaucaccaccaucaucaucgugaucaucgugauccugcugcugcugaucgccgugggccuguuccuguacugcaaggccagaugaggacuaguacuggcugcaucucccuuuccucuguccuccauccuucucccaggauggugaagggggaccugguacccagugauccccaccccaggauccuaaaucaugacuuaccugcuaauaaaaacucauuggaaaagugagaagaucuaaaaaaaaaaaaaaaaaaaaaaaaaaaaaaaaaaaaaaaaaaaaaaaaaaaaaaaaaaaaaaaaugcaucccccccccccccccccccccccccccccccaaaggcucuuuucagagccaccagaauu

SEQ ID NO: 16633 - RNA, 1920 nt, Artificial Sequence
  mRNA product Design c-3 comprising derived and/or modified sequence from HRSV(Memphis-37)__AIY60640.1__F-del_DSCav1_mut4 (opt5)
gggagaguccgcucagccagguugcagaagcggcuuagcguguguccuaaucuucucucugcguguagguaggccugugccgcaaacaagcuuaccauggagcugcccauccucaagaccaacgccauuacaacgauccuggcugccgugacccuuugcuucgcgagcucccagaauauuacagaagaguuuuaccaaucuaccuguagcgcugucuccaaaggcuaucugucugcccucagaacagggugguacaccagcguuaucacaauugaacuguccaacaucaaggagaauaaaugcaacggaaccgacgccaaggugaaacuuaucaagcaggaacuggauaaguauaaaaaugcugugacggagcuccagcugcugaugcagucuaccccugccgcuggcagcggguccgccauuuguagcggaaucgcggucugcaaggugcuccaccuggagggcgaaguuaacaaaauuaagaaugcccuucugucuacaaacaaagcuguggucucccucagcaauggggugucuguucugaccuucaaggugcuugaccugaagaacuacaucgauaaacaacuccugccgauucugaauaagcaguccuguagcaucucuaacauugagacagucaucgaauuucagcagaaaaauaaccggcuccuggagaucacccgcgaguucuccgugaaugccggagugacgacacccgucagcaccuauaugcuuacaaacuccgaacugcucucucugauuaacgacaugccuaucaccaaugaucaaaagaaacuuaugagcaacaauguucagauugugagacagcaguccuacagcaucaugugcauuaucaaggaggaagugcuggcuuaugucgugcaacucccccuguacggcguuaucgacaccccuuguuggaaacugcauacaucuccccucugcacgaccaacacaaaggagggcuccaauauuugucugacccggacagaucgcgggugguacugcgacaacgccggaagcgugagcuuuuucccucaggcggaaaccuguaagguccagucuaauagaguguuuugcgauacgaugaacuccagaacacugccgucugagguuaaucucugcaacaucgacauuuucaaucccaaauaugauuguaagaucaugaccagcaaaaccgacguguccagcucugucauuacaucccugggcgccaucgugagcugcuacgggaagaccaaauguacagcuucuaacaagaaucggggaaucauuaagacguuuuccaacggcugcgauuaugucagcaauaaagggguggacaccguuuccgugggaaacacacuuuacugugucaacaagcaagagggcaaaucucuguaugugaagggcgaaccuaucauuaauuucuacgacccccucguuuuuccuagcgaugaguucgacgccuccaucucucaggugaacgaaaagauuaaucagagccuggcuuuuauccgcaaguccgaugagcugcuccacaacgucaauguggggaaaagcaccacaaacauuaugaucaccacgaucauuaucgugauuaucguuauucugcuucugcucaucgccgucggacuguuccuguauugcaaagccagaugaggacuaguacuggcugcaucucccuuuccucuguccuccauccuucucccaggauggugaagggggaccugguacccagugauccccaccccaggauccuaaaucaugacuuaccugcuaauaaaaacucauuggaaaagugagaagaucuaaaaaaaaaaaaaaaaaaaaaaaaaaaaaaaaaaaaaaaaaaaaaaaaaaaaaaaaaaaaaaaaugcaucccccccccccccccccccccccccccccccaaaggcucuuuucagagccaccagaauu

SEQ ID NO: 16634 - RNA, 1920 nt, Artificial Sequence
  mRNA product Design c-3 comprising derived and/or modified sequence from HRSV(Memphis-37)__AIY60640.1__F-del_DSCav1_mut4 (opt6)
gggagaguccgcucagccagguugcagaagcggcuuagcguguguccuaaucuucucucugcguguagguaggccugugccgcaaacaagcuuaccauggaacuaccaauacucaaaacaaacgcaauaacaacuauacuagccgcaguuacacucugcuucgcuucaucacaaaauaucacagaagaauuuuaccaaucuacauguucagcuguauccaaagguuaccuuucagcacuacgaacaggaugguauaccucaguaaucaccaucgaacucucgaacauaaaagaaaacaaauguaacggaaccgaugcuaaagucaagcucauaaaacaagaacuagacaaauacaaaaacgcaguaaccgaacuacaacuacuuaugcaaucaacaccagcugcaggcucaggcucagcaaucugcucaggcauagcuguaugcaaaguacuacaucuagaaggagaaguaaacaaaauaaaaaacgcauuauuaucaacaaauaaagcaguaguaucacuaucaaauggaguaucaguacucacauucaaaguacuagaucuaaaaaacuacauugacaaacaauuacuaccaauccucaacaaacaaucaugcucaauauccaacauagaaacaguaauagaauuucaacaaaaaaacaaucgacuacuagaaauaacaagagaauuuucagucaaugccggaguuacaacacccguaagcacuuacaugcuaaccaacucagaacuacuaucacuaauaaacgacaugccaauuacaaacgaccaaaaaaaacuaaugucaaauaacguacaaauaguacgucaacaaucauacucaauaaugugcauaauaaaagaagaaguccuagcauacguaguacaauuacccuuauauggcguaauagacacaccaugcuggaaacuacacacauccccacucugcaccaccaacaccaaagaaggcuccaacauaugucuaacccgaaccgacagagguugguauugugauaacgcuggcuccguaucauucuucccacaagcagaaacauguaaaguacaaucaaacagaguauucugcgauacaaugaauagcagaacacuaccaucagaaguaaacuuaugcaacaucgacaucuucaaucccaaauacgacugcaaaauaaugacauccaaaacugacguuucuucaagcguaauaacaucuuuaggagcaauaguauccugcuacggaaaaacuaaaugcacagcauccaauaaaaaccguggaauaauaaaaacauucucaaauggcugcgacuacgucucaaacaaaggcguagacaccguuagugucggaaacacacuauauugcguaaauaaacaagaaggaaaauccuuauacguaaaaggcgaaccaauaauuaacuucuaugacccccucguauuuccauccgaugaauuugacgcaucaaucucgcaaguaaacgaaaaaauaaaccaaagccuagcauucauaagaaaauccgacgaacuacuccacaauguaaauguaggaaaaucaacuaccaacauaaugauuacuacuauaauaauaguaauuauagucaucuuacuacuauuaauagcagucggauuauuccuauacugcaaagcaagauagggacuaguacuggcugcaucucccuuuccucuguccuccauccuucucccaggauggugaagggggaccugguacccagugauccccaccccaggauccuaaaucaugacuuaccugcuaauaaaaacucauuggaaaagugagaagaucuaaaaaaaaaaaaaaaaaaaaaaaaaaaaaaaaaaaaaaaaaaaaaaaaaaaaaaaaaaaaaaaaugcaucccccccccccccccccccccccccccccccaaaggcucuuuucagagccaccagaauu

SEQ ID NO: 16635 - RNA, 1920 nt, Artificial Sequence
  mRNA product Design c-3 comprising derived and/or modified sequence from HRSV(Memphis-37)__AIY60640.1__F-del_DSCav1_mut4 (opt11)
gggagaguccgcucagccagguugcagaagcggcuuagcguguguccuaaucuucucucugcguguagguaggccugugccgcaaacaagcuuaccauggagcuccccauccuaaaaaccaacgccaucaccaccauccucgccgccgucacccuaugcuucgcuucaucacaaaacaucaccgaagaauuuuaccaaucuaccugcuccgccgucuccaaaggauaucucagcgcccuacggaccggcugguacaccuccgucauaaccaucgaacucaguaacaucaaagaaaacaaaugcaacggcaccgacgccaaagucaaacuaaucaaacaagaacuagauaaauacaaaaacgcggucaccgaacuacaacuccuaaugcaaagcacccccgccgccggauccggcuccgccauaugcuccggcauugcugucugcaaaguacuacaccucgagggcgaggucaacaaaaucaaaaacgcacuacucagcacuaauaaagccguaguaucccuaucaaacggugucucagucuuaacauucaaaguacucgaccuaaagaacuacaucgacaaacaacuccuacccauccucaacaagcaguccuguucuaucucaaacaucgaaaccgucaucgaauuucaacaaaagaacaaccgccuccucgaaaucacacgcgaguucuccgucaacgcaggaguaaccacccccgucuccaccuacaugcucacaaacucggaacuccucucacuaaucaacgacaugcccaucaccaacgaccaaaagaaacucaugagcaacaacguucaaaucguccgccaacaaucauacuccaucaugugcauaaucaaagaagaaguccuagcuuacgucguccagcugccccucuacggagucaucgacacgcccugcuggaaacuacacacaagcccccucugcaccaccaacaccaaagaaggcuccaacauaugccucacacggaccgaccgcgguugguacugcgacaacgccggcuccgucuccuucuucccccaagcagaaacuugcaaaguccaauccaaccgcguauucugcgacacaaugaacagcagaacacucccuagcgaagucaaccucugcaacaucgacauauucaaccccaaauacgacugcaaaaucaugacgucaaaaaccgacgucuccagcuccguuaucaccucacucggcgccaucgucagcugcuacggcaaaacuaaaugcaccgccuccaacaaaaaccgcggcaucauuaaaaccuucagcaacggcugcgacuacgucuccaacaaaggugucgauacgguauccgucggaaacacccuauacugcgucaacaaacaagaaggcaaaucucucuacgucaaaggcgaacccauaaucaauuucuacgacccccuagucuuccccuccgaugaauuugacgccuccaucagccaagucaacgagaaaaucaaccaaucacuagccuucauccggaaauccgacgaacuccuacacaacguaaacgucggcaaauccaccaccaauauaaugaucacaaccaucaucaucguaaucaucgucauccuccuccuacucaucgccgucggauuauucuuauacugcaaagcccgcuaaggacuaguacuggcugcaucucccuuuccucuguccuccauccuucucccaggauggugaagggggaccugguacccagugauccccaccccaggauccuaaaucaugacuuaccugcuaauaaaaacucauuggaaaagugagaagaucuaaaaaaaaaaaaaaaaaaaaaaaaaaaaaaaaaaaaaaaaaaaaaaaaaaaaaaaaaaaaaaaaugcaucccccccccccccccccccccccccccccccaaaggcucuuuucagagccaccagaauu

SEQ ID NO: 16636 - RNA, 1916 nt, Artificial Sequence
  mRNA product Design c-4 comprising derived and/or modified sequence from HRSV(Memphis-37)__AIY60640.1__F-del_DSCav1_mut4 (opt1)
gggagaguccgcucagccagguugcagaagcggcuuagcguguguccuaaucuucucucugcguguagguaggccugugccgcaaacaagcuuaccauggagcugcccauccucaagaccaacgccaucaccacgauccuggccgcggugacccugugcuucgccagcucccagaacaucaccgaggaguucuaccagagcacgugcuccgccgucagcaagggcuaccucuccgcccugcgcaccgggugguacaccagcgugaucaccaucgagcuguccaacaucaaggagaacaagugcaacggcaccgacgccaaggugaagcucaucaagcaggagcuggacaaguacaagaacgcggucacggagcugcagcuccugaugcagagcaccccggccgccggcuccgggagcgcgaucugcuccggcaucgccgucugcaaggugcugcaccucgagggcgaggugaacaagaucaagaacgcccugcuguccaccaacaaggccgucgugagccucuccaacggggugagcguccugaccuucaaggugcuggaccucaagaacuacaucgacaagcagcugcugcccauccugaacaagcagagcugcuccaucagcaacaucgagaccgucaucgaguuccagcagaagaacaaccgccuccuggagaucacgcgggaguucagcgugaacgcgggcgugaccacccccgucuccaccuacaugcugacgaacagcgagcuccugucccugaucaacgacaugccgaucaccaacgaccagaagaagcucaugagcaacaacgugcagaucgugcgccagcaguccuacagcaucaugugcaucaucaaggaggagguccuggccuacguggugcagcugccccucuacggggucaucgacacccccugcuggaagcugcacaccagcccccugugcacgaccaacaccaaggagggcuccaacaucugccucacccggacggaccgcgggugguacugcgacaacgccggcagcguguccuucuucccgcaggccgagaccugcaagguccagagcaaccggguguucugcgacaccaugaacucccggacccugcccagcgaggugaaccucugcaacaucgacaucuucaaccccaaguacgacugcaagaucaugacguccaagaccgacgucagcuccagcgugaucaccucccugggcgccaucgugagcugcuacgggaagaccaagugcacggcgagcaacaagaaccgcggcaucaucaagaccuucuccaacgggugcgacuacgucagcaacaagggcguggacaccguguccgucggcaacacccuguacugcgugaacaagcaggagggcaagagccucuacgugaagggggagcccaucaucaacuucuacgacccgcuggucuuccccuccgacgaguucgacgccagcaucucccaggugaacgagaagaucaaccagagccuggccuucauccggaaguccgacgagcuccugcacaacgugaacgucggcaagagcaccacgaacaucaugaucaccaccaucaucaucgugaucaucgugauccugcugcuccugaucgccgucgggcuguuccucuacugcaaggcccgcugaggacuaguggaagcauuuuccuggcugauuaaaagaaauuacucagcuauggucaucuguuccuguuagaaggcuaugcagcauauuauauacuaugcgcauguuaugaaaugcauaauaaaaaauuuuaaaaaaucuaaaagaucuaaaaaaaaaaaaaaaaaaaaaaaaaaaaaaaaaaaaaaaaaaaaaaaaaaaaaaaaaaaaaaaaugcaucccccccccccccccccccccccccccccccaaaggcucuuuucagagccaccagaauu

SEQ ID NO: 16637 - RNA, 1916 nt, Artificial Sequence
  mRNA product Design c-4 comprising derived and/or modified sequence from HRSV(Memphis-37)__AIY60640.1__F-del_DSCav1_mut4 (opt1)
gggagaguccgcucagccagguugcagaagcggcuuagcguguguccuaaucuucucucugcguguagguaggccugugccgcaaacaagcuuaccauggagcugcccauccucaagaccaacgccaucaccacgauccuggccgcggugacccugugcuucgccagcucccagaacaucaccgaggaguucuaccagagcacgugcuccgccgucagcaagggcuaccucuccgcccugcgcaccgggugguacaccagcgugaucaccaucgagcuguccaacaucaaggagaacaagugcaacggcaccgacgccaaggugaagcucaucaagcaggagcuggacaaguacaagaacgcggucacggagcugcagcuccugaugcagagcaccccggccgccggguccggcagcgccaucugcuccgggaucgcggugugcaaggugcugcaccucgagggcgaggucaacaagaucaagaacgcccugcugagcaccaacaaggccguggugucccucagcaacggcgucuccgugcugaccuucaaggugcuggaccucaagaacuacaucgacaagcagcugcugcccauccucaacaagcagagcugcuccaucagcaacaucgagacggucaucgaguuccagcagaagaacaaccggcugcuggagaucacccgcgaguucuccgugaacgccggggugaccacccccgucagcacguacaugcucaccaacagcgagcugcugucccucaucaacgacaugcccaucaccaacgaccagaagaagcugaugagcaacaacgugcagaucgugcggcagcaguccuacagcaucaugugcaucaucaaggaggagguccuggccuacguggugcagcucccgcuguacggcgucaucgacacccccugcuggaagcugcacacgagcccccucugcaccaccaacaccaaggagggguccaacaucugccugacgcgcaccgaccggggcugguacugcgacaacgcgggguccgugagcuucuucccccaggccgagaccugcaaggugcaguccaaccgcgucuucugcgacaccaugaacagccggacgcucccguccgaggugaaccugugcaacaucgacaucuucaaccccaaguacgacugcaagaucaugaccagcaagaccgacgucuccagcuccgugaucaccagccugggcgccaucguguccugcuacggcaagacgaagugcaccgccagcaacaagaaccgggggaucaucaagaccuucuccaacggcugcgacuacgucagcaacaaggggguggacaccgugagcgucggcaacacgcucuacugcgugaacaagcaggagggcaagucccuguacgugaagggggagcccaucaucaacuucuacgacccccuggucuucccgagcgacgaguucgacgccuccaucagccaggugaacgagaagaucaaccagucccucgcguucauccgcaagagcgacgagcugcugcacaacgugaacgucggcaaguccaccaccaacaucaugaucaccaccaucaucaucgugaucaucgugauccuccugcugcucaucgccgucgggcuguuccuguacugcaaggcccggugaggacuaguggaagcauuuuccuggcugauuaaaagaaauuacucagcuauggucaucuguuccuguuagaaggcuaugcagcauauuauauacuaugcgcauguuaugaaaugcauaauaaaaaauuuuaaaaaaucuaaaagaucuaaaaaaaaaaaaaaaaaaaaaaaaaaaaaaaaaaaaaaaaaaaaaaaaaaaaaaaaaaaaaaaaugcaucccccccccccccccccccccccccccccccaaaggcucuuuucagagccaccagaauu

SEQ ID NO: 16638 - RNA, 1916 nt, Artificial Sequence
  mRNA product Design c-4 comprising derived and/or modified sequence from HRSV(Memphis-37)__AIY60640.1__F-del_DSCav1_mut4 (opt2)
gggagaguccgcucagccagguugcagaagcggcuuagcguguguccuaaucuucucucugcguguagguaggccugugccgcaaacaagcuuaccauggagcuccccauccucaagaccaacgccaucaccaccauccucgccgccgucacccucugcuucgccuccucccagaacaucaccgaggaguucuaccaguccaccugcuccgccgucuccaagggcuaccucuccgcccuccgcaccggcugguacaccuccgucaucaccaucgagcucuccaacaucaaggagaacaagugcaacggcaccgacgccaaggucaagcucaucaagcaggagcucgacaaguacaagaacgccgucaccgagcuccagcuccucaugcaguccacccccgccgccggcuccggcuccgccaucugcuccggcaucgccgucugcaagguccuccaccucgagggcgaggucaacaagaucaagaacgcccuccucuccaccaacaaggccgucgucucccucuccaacggcgucuccguccucaccuucaagguccucgaccucaagaacuacaucgacaagcagcuccuccccauccucaacaagcaguccugcuccaucuccaacaucgagaccgucaucgaguuccagcagaagaacaaccgccuccucgagaucacccgcgaguucuccgucaacgccggcgucaccacccccgucuccaccuacaugcucaccaacuccgagcuccucucccucaucaacgacaugcccaucaccaacgaccagaagaagcucauguccaacaacguccagaucguccgccagcaguccuacuccaucaugugcaucaucaaggaggagguccucgccuacgucguccagcucccccucuacggcgucaucgacacccccugcuggaagcuccacaccuccccccucugcaccaccaacaccaaggagggcuccaacaucugccucacccgcaccgaccgcggcugguacugcgacaacgccggcuccgucuccuucuucccccaggccgagaccugcaagguccaguccaaccgcgucuucugcgacaccaugaacucccgcacccuccccuccgaggucaaccucugcaacaucgacaucuucaaccccaaguacgacugcaagaucaugaccuccaagaccgacgucuccuccuccgucaucaccucccucggcgccaucgucuccugcuacggcaagaccaagugcaccgccuccaacaagaaccgcggcaucaucaagaccuucuccaacggcugcgacuacgucuccaacaagggcgucgacaccgucuccgucggcaacacccucuacugcgucaacaagcaggagggcaagucccucuacgucaagggcgagcccaucaucaacuucuacgacccccucgucuuccccuccgacgaguucgacgccuccaucucccaggucaacgagaagaucaaccagucccucgccuucauccgcaaguccgacgagcuccuccacaacgucaacgucggcaaguccaccaccaacaucaugaucaccaccaucaucaucgucaucaucgucauccuccuccuccucaucgccgucggccucuuccucuacugcaaggcccgcugaggacuaguggaagcauuuuccuggcugauuaaaagaaauuacucagcuauggucaucuguuccuguuagaaggcuaugcagcauauuauauacuaugcgcauguuaugaaaugcauaauaaaaaauuuuaaaaaaucuaaaagaucuaaaaaaaaaaaaaaaaaaaaaaaaaaaaaaaaaaaaaaaaaaaaaaaaaaaaaaaaaaaaaaaaugcaucccccccccccccccccccccccccccccccaaaggcucuuuucagagccaccagaauu

SEQ ID NO: 16639 - RNA, 1916 nt, Artificial Sequence
  mRNA product Design c-4 comprising derived and/or modified sequence from HRSV(Memphis-37)__AIY60640.1__F-del_DSCav1_mut4 (opt3)
gggagaguccgcucagccagguugcagaagcggcuuagcguguguccuaaucuucucucugcguguagguaggccugugccgcaaacaagcuuaccauggagcugcccauccucaagaccaacgccauuacaacuauacuugcugcagugacgcugugcuucgccagcucccagaauaucaccgaagaguuuuaccaaucuacauguucagcggucaguaaaggcuauuugagcgcuuuaagaacugggugguacaccuccguuauuacaaucgaacugucuaacauuaaggagaauaaaugcaacggaaccgacgccaaggugaaacuaaucaagcaggaacucgauaaguauaaaaaugcaguaacugagcugcagcuucugaugcagucgaccccugccgcugguucaggcagcgcaauauguagugggaucgccgugugcaaggucuugcaccucgagggagaagugaacaaaauuaagaaugcucugcuguccacaaacaaagccguugugucucucagcaauggcgucuccguguuaacguucaagguacuggaccuuaagaacuacaucgauaaacaauugcugccaauucuaaauaagcagucauguaguaucagcaacauagagacuguuauugaauuucagcagaaaaauaacaggcuccuggagaucacccgggaguucucugugaaugcgggugucacaacuccgguguccaccuauaugcuuacaaacucagaacuguugagccucauuaacgacaugcccaucaccaaugaucaaaagaaacugaugaguaacaaugugcagaucguccgccagcagucuuacuccauuaugugcauaaucaaggaggaaguuuuagcauaugugguacaacugccucucuacggggugauugacacgccauguuggaaacuucauacuagcccccugugcacaaccaacacuaaggagggaucgaauaucuguuugacacgaaccgaucguggcugguacugcgacaacgccggcucugucuccuuuuucccucaggcugaaacguguaaggugcagucaaauagaguguuuugcgauaccaugaacaguagaacacugccaagcgaggugaaucucugcaacauagacauuuucaaucccaaauaugauuguaagaucaugacuuccaaaaccgacgucucuagcucagugaucacaagucugggggccauuguauccugcuacggaaagacuaaauguaccgcaagcaacaagaauagggguaucauuaagacauuuucuaacggcugcgauuauguuucaaauaaagggguggacaccgucagugugggaaacacucuuuacugugucaacaagcaagagggcaaaagccuguaugugaagggugaaccuauaaucaauuucuacgacccauugguuuuuccguccgaugaguucgacgcuucuauuucgcagguuaacgagaaaaucaaucagagccucgccuuuauccggaaguccgaugaacuguuacacaacguaaaugucgggaagucaacgacaaacauuaugauaaccacuaucauuaucgugauuaucguuauacugcuacuccugaucgcggugggacuuuucuuguauugcaaagcccgcugaggacuaguggaagcauuuuccuggcugauuaaaagaaauuacucagcuauggucaucuguuccuguuagaaggcuaugcagcauauuauauacuaugcgcauguuaugaaaugcauaauaaaaaauuuuaaaaaaucuaaaagaucuaaaaaaaaaaaaaaaaaaaaaaaaaaaaaaaaaaaaaaaaaaaaaaaaaaaaaaaaaaaaaaaaugcaucccccccccccccccccccccccccccccccaaaggcucuuuucagagccaccagaauu

SEQ ID NO: 16640 - RNA, 1916 nt, Artificial Sequence
  mRNA product Design c-4 comprising derived and/or modified sequence from HRSV(Memphis-37)__AIY60640.1__F-del_DSCav1_mut4 (opt4)
gggagaguccgcucagccagguugcagaagcggcuuagcguguguccuaaucuucucucugcguguagguaggccugugccgcaaacaagcuuaccauggagcugcccauccugaagaccaacgccaucaccaccauccuggccgccgugacccugugcuucgccagcagccagaacaucaccgaggaguucuaccagagcaccugcagcgccgugagcaagggcuaccugagcgcccugagaaccggcugguacaccagcgugaucaccaucgagcugagcaacaucaaggagaacaagugcaacggcaccgacgccaaggugaagcugaucaagcaggagcuggacaaguacaagaacgccgugaccgagcugcagcugcugaugcagagcacccccgccgccggcagcggcagcgccaucugcagcggcaucgccgugugcaaggugcugcaccuggagggcgaggugaacaagaucaagaacgcccugcugagcaccaacaaggccguggugagccugagcaacggcgugagcgugcugaccuucaaggugcuggaccugaagaacuacaucgacaagcagcugcugcccauccugaacaagcagagcugcagcaucagcaacaucgagaccgugaucgaguuccagcagaagaacaacagacugcuggagaucaccagagaguucagcgugaacgccggcgugaccacccccgugagcaccuacaugcugaccaacagcgagcugcugagccugaucaacgacaugcccaucaccaacgaccagaagaagcugaugagcaacaacgugcagaucgugagacagcagagcuacagcaucaugugcaucaucaaggaggaggugcuggccuacguggugcagcugccccuguacggcgugaucgacacccccugcuggaagcugcacaccagcccccugugcaccaccaacaccaaggagggcagcaacaucugccugaccagaaccgacagaggcugguacugcgacaacgccggcagcgugagcuucuucccccaggccgagaccugcaaggugcagagcaacagaguguucugcgacaccaugaacagcagaacccugcccagcgaggugaaccugugcaacaucgacaucuucaaccccaaguacgacugcaagaucaugaccagcaagaccgacgugagcagcagcgugaucaccagccugggcgccaucgugagcugcuacggcaagaccaagugcaccgccagcaacaagaacagaggcaucaucaagaccuucagcaacggcugcgacuacgugagcaacaagggcguggacaccgugagcgugggcaacacccuguacugcgugaacaagcaggagggcaagagccuguacgugaagggcgagcccaucaucaacuucuacgacccccugguguuccccagcgacgaguucgacgccagcaucagccaggugaacgagaagaucaaccagagccuggccuucaucagaaagagcgacgagcugcugcacaacgugaacgugggcaagagcaccaccaacaucaugaucaccaccaucaucaucgugaucaucgugauccugcugcugcugaucgccgugggccuguuccuguacugcaaggccagaugaggacuaguggaagcauuuuccuggcugauuaaaagaaauuacucagcuauggucaucuguuccuguuagaaggcuaugcagcauauuauauacuaugcgcauguuaugaaaugcauaauaaaaaauuuuaaaaaaucuaaaagaucuaaaaaaaaaaaaaaaaaaaaaaaaaaaaaaaaaaaaaaaaaaaaaaaaaaaaaaaaaaaaaaaaugcaucccccccccccccccccccccccccccccccaaaggcucuuuucagagccaccagaauu

SEQ ID NO: 16641 - RNA, 1916 nt, Artificial Sequence
  mRNA product Design c-4 comprising derived and/or modified sequence from HRSV(Memphis-37)__AIY60640.1__F-del_DSCav1_mut4 (opt5)
gggagaguccgcucagccagguugcagaagcggcuuagcguguguccuaaucuucucucugcguguagguaggccugugccgcaaacaagcuuaccauggagcugcccauccucaagaccaacgccauuacaacgauccuggcugccgugacccuuugcuucgcgagcucccagaauauuacagaagaguuuuaccaaucuaccuguagcgcugucuccaaaggcuaucugucugcccucagaacagggugguacaccagcguuaucacaauugaacuguccaacaucaaggagaauaaaugcaacggaaccgacgccaaggugaaacuuaucaagcaggaacuggauaaguauaaaaaugcugugacggagcuccagcugcugaugcagucuaccccugccgcuggcagcggguccgccauuuguagcggaaucgcggucugcaaggugcuccaccuggagggcgaaguuaacaaaauuaagaaugcccuucugucuacaaacaaagcuguggucucccucagcaauggggugucuguucugaccuucaaggugcuugaccugaagaacuacaucgauaaacaacuccugccgauucugaauaagcaguccuguagcaucucuaacauugagacagucaucgaauuucagcagaaaaauaaccggcuccuggagaucacccgcgaguucuccgugaaugccggagugacgacacccgucagcaccuauaugcuuacaaacuccgaacugcucucucugauuaacgacaugccuaucaccaaugaucaaaagaaacuuaugagcaacaauguucagauugugagacagcaguccuacagcaucaugugcauuaucaaggaggaagugcuggcuuaugucgugcaacucccccuguacggcguuaucgacaccccuuguuggaaacugcauacaucuccccucugcacgaccaacacaaaggagggcuccaauauuugucugacccggacagaucgcgggugguacugcgacaacgccggaagcgugagcuuuuucccucaggcggaaaccuguaagguccagucuaauagaguguuuugcgauacgaugaacuccagaacacugccgucugagguuaaucucugcaacaucgacauuuucaaucccaaauaugauuguaagaucaugaccagcaaaaccgacguguccagcucugucauuacaucccugggcgccaucgugagcugcuacgggaagaccaaauguacagcuucuaacaagaaucggggaaucauuaagacguuuuccaacggcugcgauuaugucagcaauaaagggguggacaccguuuccgugggaaacacacuuuacugugucaacaagcaagagggcaaaucucuguaugugaagggcgaaccuaucauuaauuucuacgacccccucguuuuuccuagcgaugaguucgacgccuccaucucucaggugaacgaaaagauuaaucagagccuggcuuuuauccgcaaguccgaugagcugcuccacaacgucaauguggggaaaagcaccacaaacauuaugaucaccacgaucauuaucgugauuaucguuauucugcuucugcucaucgccgucggacuguuccuguauugcaaagccagaugaggacuaguggaagcauuuuccuggcugauuaaaagaaauuacucagcuauggucaucuguuccuguuagaaggcuaugcagcauauuauauacuaugcgcauguuaugaaaugcauaauaaaaaauuuuaaaaaaucuaaaagaucuaaaaaaaaaaaaaaaaaaaaaaaaaaaaaaaaaaaaaaaaaaaaaaaaaaaaaaaaaaaaaaaaugcaucccccccccccccccccccccccccccccccaaaggcucuuuucagagccaccagaauu

SEQ ID NO: 16642 - RNA, 1916 nt, Artificial Sequence
  mRNA product Design c-4 comprising derived and/or modified sequence from HRSV(Memphis-37)__AIY60640.1__F-del_DSCav1_mut4 (opt6)
gggagaguccgcucagccagguugcagaagcggcuuagcguguguccuaaucuucucucugcguguagguaggccugugccgcaaacaagcuuaccauggaacuaccaauacucaaaacaaacgcaauaacaacuauacuagccgcaguuacacucugcuucgcuucaucacaaaauaucacagaagaauuuuaccaaucuacauguucagcuguauccaaagguuaccuuucagcacuacgaacaggaugguauaccucaguaaucaccaucgaacucucgaacauaaaagaaaacaaauguaacggaaccgaugcuaaagucaagcucauaaaacaagaacuagacaaauacaaaaacgcaguaaccgaacuacaacuacuuaugcaaucaacaccagcugcaggcucaggcucagcaaucugcucaggcauagcuguaugcaaaguacuacaucuagaaggagaaguaaacaaaauaaaaaacgcauuauuaucaacaaauaaagcaguaguaucacuaucaaauggaguaucaguacucacauucaaaguacuagaucuaaaaaacuacauugacaaacaauuacuaccaauccucaacaaacaaucaugcucaauauccaacauagaaacaguaauagaauuucaacaaaaaaacaaucgacuacuagaaauaacaagagaauuuucagucaaugccggaguuacaacacccguaagcacuuacaugcuaaccaacucagaacuacuaucacuaauaaacgacaugccaauuacaaacgaccaaaaaaaacuaaugucaaauaacguacaaauaguacgucaacaaucauacucaauaaugugcauaauaaaagaagaaguccuagcauacguaguacaauuacccuuauauggcguaauagacacaccaugcuggaaacuacacacauccccacucugcaccaccaacaccaaagaaggcuccaacauaugucuaacccgaaccgacagagguugguauugugauaacgcuggcuccguaucauucuucccacaagcagaaacauguaaaguacaaucaaacagaguauucugcgauacaaugaauagcagaacacuaccaucagaaguaaacuuaugcaacaucgacaucuucaaucccaaauacgacugcaaaauaaugacauccaaaacugacguuucuucaagcguaauaacaucuuuaggagcaauaguauccugcuacggaaaaacuaaaugcacagcauccaauaaaaaccguggaauaauaaaaacauucucaaauggcugcgacuacgucucaaacaaaggcguagacaccguuagugucggaaacacacuauauugcguaaauaaacaagaaggaaaauccuuauacguaaaaggcgaaccaauaauuaacuucuaugacccccucguauuuccauccgaugaauuugacgcaucaaucucgcaaguaaacgaaaaaauaaaccaaagccuagcauucauaagaaaauccgacgaacuacuccacaauguaaauguaggaaaaucaacuaccaacauaaugauuacuacuauaauaauaguaauuauagucaucuuacuacuauuaauagcagucggauuauuccuauacugcaaagcaagauagggacuaguggaagcauuuuccuggcugauuaaaagaaauuacucagcuauggucaucuguuccuguuagaaggcuaugcagcauauuauauacuaugcgcauguuaugaaaugcauaauaaaaaauuuuaaaaaaucuaaaagaucuaaaaaaaaaaaaaaaaaaaaaaaaaaaaaaaaaaaaaaaaaaaaaaaaaaaaaaaaaaaaaaaaugcaucccccccccccccccccccccccccccccccaaaggcucuuuucagagccaccagaauu

SEQ ID NO: 16643 - RNA, 1916 nt, Artificial Sequence
  mRNA product Design c-4 comprising derived and/or modified sequence from HRSV(Memphis-37)__AIY60640.1__F-del_DSCav1_mut4 (opt11)
gggagaguccgcucagccagguugcagaagcggcuuagcguguguccuaaucuucucucugcguguagguaggccugugccgcaaacaagcuuaccauggagcuccccauccuaaaaaccaacgccaucaccaccauccucgccgccgucacccuaugcuucgcuucaucacaaaacaucaccgaagaauuuuaccaaucuaccugcuccgccgucuccaaaggauaucucagcgcccuacggaccggcugguacaccuccgucauaaccaucgaacucaguaacaucaaagaaaacaaaugcaacggcaccgacgccaaagucaaacuaaucaaacaagaacuagauaaauacaaaaacgcggucaccgaacuacaacuccuaaugcaaagcacccccgccgccggauccggcuccgccauaugcuccggcauugcugucugcaaaguacuacaccucgagggcgaggucaacaaaaucaaaaacgcacuacucagcacuaauaaagccguaguaucccuaucaaacggugucucagucuuaacauucaaaguacucgaccuaaagaacuacaucgacaaacaacuccuacccauccucaacaagcaguccuguucuaucucaaacaucgaaaccgucaucgaauuucaacaaaagaacaaccgccuccucgaaaucacacgcgaguucuccgucaacgcaggaguaaccacccccgucuccaccuacaugcucacaaacucggaacuccucucacuaaucaacgacaugcccaucaccaacgaccaaaagaaacucaugagcaacaacguucaaaucguccgccaacaaucauacuccaucaugugcauaaucaaagaagaaguccuagcuuacgucguccagcugccccucuacggagucaucgacacgcccugcuggaaacuacacacaagcccccucugcaccaccaacaccaaagaaggcuccaacauaugccucacacggaccgaccgcgguugguacugcgacaacgccggcuccgucuccuucuucccccaagcagaaacuugcaaaguccaauccaaccgcguauucugcgacacaaugaacagcagaacacucccuagcgaagucaaccucugcaacaucgacauauucaaccccaaauacgacugcaaaaucaugacgucaaaaaccgacgucuccagcuccguuaucaccucacucggcgccaucgucagcugcuacggcaaaacuaaaugcaccgccuccaacaaaaaccgcggcaucauuaaaaccuucagcaacggcugcgacuacgucuccaacaaaggugucgauacgguauccgucggaaacacccuauacugcgucaacaaacaagaaggcaaaucucucuacgucaaaggcgaacccauaaucaauuucuacgacccccuagucuuccccuccgaugaauuugacgccuccaucagccaagucaacgagaaaaucaaccaaucacuagccuucauccggaaauccgacgaacuccuacacaacguaaacgucggcaaauccaccaccaauauaaugaucacaaccaucaucaucguaaucaucgucauccuccuccuacucaucgccgucggauuauucuuauacugcaaagcccgcuaaggacuaguggaagcauuuuccuggcugauuaaaagaaauuacucagcuauggucaucuguuccuguuagaaggcuaugcagcauauuauauacuaugcgcauguuaugaaaugcauaauaaaaaauuuuaaaaaaucuaaaagaucuaaaaaaaaaaaaaaaaaaaaaaaaaaaaaaaaaaaaaaaaaaaaaaaaaaaaaaaaaaaaaaaaugcaucccccccccccccccccccccccccccccccaaaggcucuuuucagagccaccagaauu

SEQ ID NO: 16644 - RNA, 1834 nt, Artificial Sequence
  mRNA product Design c-5 comprising derived and/or modified sequence from HRSV(Memphis-37)__AIY60640.1__F-del_DSCav1_mut4 (opt1)
gggagagcggcucggccauuuugucccagucaguccggaggcugcggcugcagaaguaccgccugcggaguaacugcaaagaagcuuaccauggagcugcccauccucaagaccaacgccaucaccacgauccuggccgcggugacccugugcuucgccagcucccagaacaucaccgaggaguucuaccagagcacgugcuccgccgucagcaagggcuaccucuccgcccugcgcaccgggugguacaccagcgugaucaccaucgagcuguccaacaucaaggagaacaagugcaacggcaccgacgccaaggugaagcucaucaagcaggagcuggacaaguacaagaacgcggucacggagcugcagcuccugaugcagagcaccccggccgccggcuccgggagcgcgaucugcuccggcaucgccgucugcaaggugcugcaccucgagggcgaggugaacaagaucaagaacgcccugcuguccaccaacaaggccgucgugagccucuccaacggggugagcguccugaccuucaaggugcuggaccucaagaacuacaucgacaagcagcugcugcccauccugaacaagcagagcugcuccaucagcaacaucgagaccgucaucgaguuccagcagaagaacaaccgccuccuggagaucacgcgggaguucagcgugaacgcgggcgugaccacccccgucuccaccuacaugcugacgaacagcgagcuccugucccugaucaacgacaugccgaucaccaacgaccagaagaagcucaugagcaacaacgugcagaucgugcgccagcaguccuacagcaucaugugcaucaucaaggaggagguccuggccuacguggugcagcugccccucuacggggucaucgacacccccugcuggaagcugcacaccagcccccugugcacgaccaacaccaaggagggcuccaacaucugccucacccggacggaccgcgggugguacugcgacaacgccggcagcguguccuucuucccgcaggccgagaccugcaagguccagagcaaccggguguucugcgacaccaugaacucccggacccugcccagcgaggugaaccucugcaacaucgacaucuucaaccccaaguacgacugcaagaucaugacguccaagaccgacgucagcuccagcgugaucaccucccugggcgccaucgugagcugcuacgggaagaccaagugcacggcgagcaacaagaaccgcggcaucaucaagaccuucuccaacgggugcgacuacgucagcaacaagggcguggacaccguguccgucggcaacacccuguacugcgugaacaagcaggagggcaagagccucuacgugaagggggagcccaucaucaacuucuacgacccgcuggucuuccccuccgacgaguucgacgccagcaucucccaggugaacgagaagaucaaccagagccuggccuucauccggaaguccgacgagcuccugcacaacgugaacgucggcaagagcaccacgaacaucaugaucaccaccaucaucaucgugaucaucgugauccugcugcuccugaucgccgucgggcuguuccucuacugcaaggcccgcugaggacuagucccuguucccagagcccacuuuuuuuucuuuuuuugaaauaaaauagccugucuuucagaucuaaaaaaaaaaaaaaaaaaaaaaaaaaaaaaaaaaaaaaaaaaaaaaaaaaaaaaaaaaaaaaaaugcaucccccccccccccccccccccccccccccccaaaggcucuuuucagagccaccagaauu

SEQ ID NO: 16645 - RNA, 1834 nt, Artificial Sequence
  mRNA product Design c-5 comprising derived and/or modified sequence from HRSV(Memphis-37)__AIY60640.1__F-del_DSCav1_mut4 (opt1)
gggagagcggcucggccauuuugucccagucaguccggaggcugcggcugcagaaguaccgccugcggaguaacugcaaagaagcuuaccauggagcugcccauccucaagaccaacgccaucaccacgauccuggccgcggugacccugugcuucgccagcucccagaacaucaccgaggaguucuaccagagcacgugcuccgccgucagcaagggcuaccucuccgcccugcgcaccgggugguacaccagcgugaucaccaucgagcuguccaacaucaaggagaacaagugcaacggcaccgacgccaaggugaagcucaucaagcaggagcuggacaaguacaagaacgcggucacggagcugcagcuccugaugcagagcaccccggccgccggguccggcagcgccaucugcuccgggaucgcggugugcaaggugcugcaccucgagggcgaggucaacaagaucaagaacgcccugcugagcaccaacaaggccguggugucccucagcaacggcgucuccgugcugaccuucaaggugcuggaccucaagaacuacaucgacaagcagcugcugcccauccucaacaagcagagcugcuccaucagcaacaucgagacggucaucgaguuccagcagaagaacaaccggcugcuggagaucacccgcgaguucuccgugaacgccggggugaccacccccgucagcacguacaugcucaccaacagcgagcugcugucccucaucaacgacaugcccaucaccaacgaccagaagaagcugaugagcaacaacgugcagaucgugcggcagcaguccuacagcaucaugugcaucaucaaggaggagguccuggccuacguggugcagcucccgcuguacggcgucaucgacacccccugcuggaagcugcacacgagcccccucugcaccaccaacaccaaggagggguccaacaucugccugacgcgcaccgaccggggcugguacugcgacaacgcgggguccgugagcuucuucccccaggccgagaccugcaaggugcaguccaaccgcgucuucugcgacaccaugaacagccggacgcucccguccgaggugaaccugugcaacaucgacaucuucaaccccaaguacgacugcaagaucaugaccagcaagaccgacgucuccagcuccgugaucaccagccugggcgccaucguguccugcuacggcaagacgaagugcaccgccagcaacaagaaccgggggaucaucaagaccuucuccaacggcugcgacuacgucagcaacaaggggguggacaccgugagcgucggcaacacgcucuacugcgugaacaagcaggagggcaagucccuguacgugaagggggagcccaucaucaacuucuacgacccccuggucuucccgagcgacgaguucgacgccuccaucagccaggugaacgagaagaucaaccagucccucgcguucauccgcaagagcgacgagcugcugcacaacgugaacgucggcaaguccaccaccaacaucaugaucaccaccaucaucaucgugaucaucgugauccuccugcugcucaucgccgucgggcuguuccuguacugcaaggcccggugaggacuagucccuguucccagagcccacuuuuuuuucuuuuuuugaaauaaaauagccugucuuucagaucuaaaaaaaaaaaaaaaaaaaaaaaaaaaaaaaaaaaaaaaaaaaaaaaaaaaaaaaaaaaaaaaaugcaucccccccccccccccccccccccccccccccaaaggcucuuuucagagccaccagaauu

SEQ ID NO: 16646 - RNA, 1834 nt, Artificial Sequence
  mRNA product Design c-5 comprising derived and/or modified sequence from HRSV(Memphis-37)__AIY60640.1__F-del_DSCav1_mut4 (opt2)
gggagagcggcucggccauuuugucccagucaguccggaggcugcggcugcagaaguaccgccugcggaguaacugcaaagaagcuuaccauggagcuccccauccucaagaccaacgccaucaccaccauccucgccgccgucacccucugcuucgccuccucccagaacaucaccgaggaguucuaccaguccaccugcuccgccgucuccaagggcuaccucuccgcccuccgcaccggcugguacaccuccgucaucaccaucgagcucuccaacaucaaggagaacaagugcaacggcaccgacgccaaggucaagcucaucaagcaggagcucgacaaguacaagaacgccgucaccgagcuccagcuccucaugcaguccacccccgccgccggcuccggcuccgccaucugcuccggcaucgccgucugcaagguccuccaccucgagggcgaggucaacaagaucaagaacgcccuccucuccaccaacaaggccgucgucucccucuccaacggcgucuccguccucaccuucaagguccucgaccucaagaacuacaucgacaagcagcuccuccccauccucaacaagcaguccugcuccaucuccaacaucgagaccgucaucgaguuccagcagaagaacaaccgccuccucgagaucacccgcgaguucuccgucaacgccggcgucaccacccccgucuccaccuacaugcucaccaacuccgagcuccucucccucaucaacgacaugcccaucaccaacgaccagaagaagcucauguccaacaacguccagaucguccgccagcaguccuacuccaucaugugcaucaucaaggaggagguccucgccuacgucguccagcucccccucuacggcgucaucgacacccccugcuggaagcuccacaccuccccccucugcaccaccaacaccaaggagggcuccaacaucugccucacccgcaccgaccgcggcugguacugcgacaacgccggcuccgucuccuucuucccccaggccgagaccugcaagguccaguccaaccgcgucuucugcgacaccaugaacucccgcacccuccccuccgaggucaaccucugcaacaucgacaucuucaaccccaaguacgacugcaagaucaugaccuccaagaccgacgucuccuccuccgucaucaccucccucggcgccaucgucuccugcuacggcaagaccaagugcaccgccuccaacaagaaccgcggcaucaucaagaccuucuccaacggcugcgacuacgucuccaacaagggcgucgacaccgucuccgucggcaacacccucuacugcgucaacaagcaggagggcaagucccucuacgucaagggcgagcccaucaucaacuucuacgacccccucgucuuccccuccgacgaguucgacgccuccaucucccaggucaacgagaagaucaaccagucccucgccuucauccgcaaguccgacgagcuccuccacaacgucaacgucggcaaguccaccaccaacaucaugaucaccaccaucaucaucgucaucaucgucauccuccuccuccucaucgccgucggccucuuccucuacugcaaggcccgcugaggacuagucccuguucccagagcccacuuuuuuuucuuuuuuugaaauaaaauagccugucuuucagaucuaaaaaaaaaaaaaaaaaaaaaaaaaaaaaaaaaaaaaaaaaaaaaaaaaaaaaaaaaaaaaaaaugcaucccccccccccccccccccccccccccccccaaaggcucuuuucagagccaccagaauu

SEQ ID NO: 16647 - RNA, 1834 nt, Artificial Sequence
  mRNA product Design c-5 comprising derived and/or modified sequence from HRSV(Memphis-37)__AIY60640.1__F-del_DSCav1_mut4 (opt3)
gggagagcggcucggccauuuugucccagucaguccggaggcugcggcugcagaaguaccgccugcggaguaacugcaaagaagcuuaccauggagcugcccauccucaagaccaacgccauuacaacuauacuugcugcagugacgcugugcuucgccagcucccagaauaucaccgaagaguuuuaccaaucuacauguucagcggucaguaaaggcuauuugagcgcuuuaagaacugggugguacaccuccguuauuacaaucgaacugucuaacauuaaggagaauaaaugcaacggaaccgacgccaaggugaaacuaaucaagcaggaacucgauaaguauaaaaaugcaguaacugagcugcagcuucugaugcagucgaccccugccgcugguucaggcagcgcaauauguagugggaucgccgugugcaaggucuugcaccucgagggagaagugaacaaaauuaagaaugcucugcuguccacaaacaaagccguugugucucucagcaauggcgucuccguguuaacguucaagguacuggaccuuaagaacuacaucgauaaacaauugcugccaauucuaaauaagcagucauguaguaucagcaacauagagacuguuauugaauuucagcagaaaaauaacaggcuccuggagaucacccgggaguucucugugaaugcgggugucacaacuccgguguccaccuauaugcuuacaaacucagaacuguugagccucauuaacgacaugcccaucaccaaugaucaaaagaaacugaugaguaacaaugugcagaucguccgccagcagucuuacuccauuaugugcauaaucaaggaggaaguuuuagcauaugugguacaacugccucucuacggggugauugacacgccauguuggaaacuucauacuagcccccugugcacaaccaacacuaaggagggaucgaauaucuguuugacacgaaccgaucguggcugguacugcgacaacgccggcucugucuccuuuuucccucaggcugaaacguguaaggugcagucaaauagaguguuuugcgauaccaugaacaguagaacacugccaagcgaggugaaucucugcaacauagacauuuucaaucccaaauaugauuguaagaucaugacuuccaaaaccgacgucucuagcucagugaucacaagucugggggccauuguauccugcuacggaaagacuaaauguaccgcaagcaacaagaauagggguaucauuaagacauuuucuaacggcugcgauuauguuucaaauaaagggguggacaccgucagugugggaaacacucuuuacugugucaacaagcaagagggcaaaagccuguaugugaagggugaaccuauaaucaauuucuacgacccauugguuuuuccguccgaugaguucgacgcuucuauuucgcagguuaacgagaaaaucaaucagagccucgccuuuauccggaaguccgaugaacuguuacacaacguaaaugucgggaagucaacgacaaacauuaugauaaccacuaucauuaucgugauuaucguuauacugcuacuccugaucgcggugggacuuuucuuguauugcaaagcccgcugaggacuagucccuguucccagagcccacuuuuuuuucuuuuuuugaaauaaaauagccugucuuucagaucuaaaaaaaaaaaaaaaaaaaaaaaaaaaaaaaaaaaaaaaaaaaaaaaaaaaaaaaaaaaaaaaaugcaucccccccccccccccccccccccccccccccaaaggcucuuuucagagccaccagaauu

SEQ ID NO: 16648 - RNA, 1834 nt, Artificial Sequence
  mRNA product Design c-5 comprising derived and/or modified sequence from HRSV(Memphis-37)__AIY60640.1__F-del_DSCav1_mut4 (opt4)
gggagagcggcucggccauuuugucccagucaguccggaggcugcggcugcagaaguaccgccugcggaguaacugcaaagaagcuuaccauggagcugcccauccugaagaccaacgccaucaccaccauccuggccgccgugacccugugcuucgccagcagccagaacaucaccgaggaguucuaccagagcaccugcagcgccgugagcaagggcuaccugagcgcccugagaaccggcugguacaccagcgugaucaccaucgagcugagcaacaucaaggagaacaagugcaacggcaccgacgccaaggugaagcugaucaagcaggagcuggacaaguacaagaacgccgugaccgagcugcagcugcugaugcagagcacccccgccgccggcagcggcagcgccaucugcagcggcaucgccgugugcaaggugcugcaccuggagggcgaggugaacaagaucaagaacgcccugcugagcaccaacaaggccguggugagccugagcaacggcgugagcgugcugaccuucaaggugcuggaccugaagaacuacaucgacaagcagcugcugcccauccugaacaagcagagcugcagcaucagcaacaucgagaccgugaucgaguuccagcagaagaacaacagacugcuggagaucaccagagaguucagcgugaacgccggcgugaccacccccgugagcaccuacaugcugaccaacagcgagcugcugagccugaucaacgacaugcccaucaccaacgaccagaagaagcugaugagcaacaacgugcagaucgugagacagcagagcuacagcaucaugugcaucaucaaggaggaggugcuggccuacguggugcagcugccccuguacggcgugaucgacacccccugcuggaagcugcacaccagcccccugugcaccaccaacaccaaggagggcagcaacaucugccugaccagaaccgacagaggcugguacugcgacaacgccggcagcgugagcuucuucccccaggccgagaccugcaaggugcagagcaacagaguguucugcgacaccaugaacagcagaacccugcccagcgaggugaaccugugcaacaucgacaucuucaaccccaaguacgacugcaagaucaugaccagcaagaccgacgugagcagcagcgugaucaccagccugggcgccaucgugagcugcuacggcaagaccaagugcaccgccagcaacaagaacagaggcaucaucaagaccuucagcaacggcugcgacuacgugagcaacaagggcguggacaccgugagcgugggcaacacccuguacugcgugaacaagcaggagggcaagagccuguacgugaagggcgagcccaucaucaacuucuacgacccccugguguuccccagcgacgaguucgacgccagcaucagccaggugaacgagaagaucaaccagagccuggccuucaucagaaagagcgacgagcugcugcacaacgugaacgugggcaagagcaccaccaacaucaugaucaccaccaucaucaucgugaucaucgugauccugcugcugcugaucgccgugggccuguuccuguacugcaaggccagaugaggacuagucccuguucccagagcccacuuuuuuuucuuuuuuugaaauaaaauagccugucuuucagaucuaaaaaaaaaaaaaaaaaaaaaaaaaaaaaaaaaaaaaaaaaaaaaaaaaaaaaaaaaaaaaaaaugcaucccccccccccccccccccccccccccccccaaaggcucuuuucagagccaccagaauu

SEQ ID NO: 16649 - RNA, 1834 nt, Artificial Sequence
  mRNA product Design c-5 comprising derived and/or modified sequence from HRSV(Memphis-37)__AIY60640.1__F-del_DSCav1_mut4 (opt5)
gggagagcggcucggccauuuugucccagucaguccggaggcugcggcugcagaaguaccgccugcggaguaacugcaaagaagcuuaccauggagcugcccauccucaagaccaacgccauuacaacgauccuggcugccgugacccuuugcuucgcgagcucccagaauauuacagaagaguuuuaccaaucuaccuguagcgcugucuccaaaggcuaucugucugcccucagaacagggugguacaccagcguuaucacaauugaacuguccaacaucaaggagaauaaaugcaacggaaccgacgccaaggugaaacuuaucaagcaggaacuggauaaguauaaaaaugcugugacggagcuccagcugcugaugcagucuaccccugccgcuggcagcggguccgccauuuguagcggaaucgcggucugcaaggugcuccaccuggagggcgaaguuaacaaaauuaagaaugcccuucugucuacaaacaaagcuguggucucccucagcaauggggugucuguucugaccuucaaggugcuugaccugaagaacuacaucgauaaacaacuccugccgauucugaauaagcaguccuguagcaucucuaacauugagacagucaucgaauuucagcagaaaaauaaccggcuccuggagaucacccgcgaguucuccgugaaugccggagugacgacacccgucagcaccuauaugcuuacaaacuccgaacugcucucucugauuaacgacaugccuaucaccaaugaucaaaagaaacuuaugagcaacaauguucagauugugagacagcaguccuacagcaucaugugcauuaucaaggaggaagugcuggcuuaugucgugcaacucccccuguacggcguuaucgacaccccuuguuggaaacugcauacaucuccccucugcacgaccaacacaaaggagggcuccaauauuugucugacccggacagaucgcgggugguacugcgacaacgccggaagcgugagcuuuuucccucaggcggaaaccuguaagguccagucuaauagaguguuuugcgauacgaugaacuccagaacacugccgucugagguuaaucucugcaacaucgacauuuucaaucccaaauaugauuguaagaucaugaccagcaaaaccgacguguccagcucugucauuacaucccugggcgccaucgugagcugcuacgggaagaccaaauguacagcuucuaacaagaaucggggaaucauuaagacguuuuccaacggcugcgauuaugucagcaauaaagggguggacaccguuuccgugggaaacacacuuuacugugucaacaagcaagagggcaaaucucuguaugugaagggcgaaccuaucauuaauuucuacgacccccucguuuuuccuagcgaugaguucgacgccuccaucucucaggugaacgaaaagauuaaucagagccuggcuuuuauccgcaaguccgaugagcugcuccacaacgucaauguggggaaaagcaccacaaacauuaugaucaccacgaucauuaucgugauuaucguuauucugcuucugcucaucgccgucggacuguuccuguauugcaaagccagaugaggacuagucccuguucccagagcccacuuuuuuuucuuuuuuugaaauaaaauagccugucuuucagaucuaaaaaaaaaaaaaaaaaaaaaaaaaaaaaaaaaaaaaaaaaaaaaaaaaaaaaaaaaaaaaaaaugcaucccccccccccccccccccccccccccccccaaaggcucuuuucagagccaccagaauu

SEQ ID NO: 16650 - RNA, 1834 nt, Artificial Sequence
  mRNA product Design c-5 comprising derived and/or modified sequence from HRSV(Memphis-37)__AIY60640.1__F-del_DSCav1_mut4 (opt6)
gggagagcggcucggccauuuugucccagucaguccggaggcugcggcugcagaaguaccgccugcggaguaacugcaaagaagcuuaccauggaacuaccaauacucaaaacaaacgcaauaacaacuauacuagccgcaguuacacucugcuucgcuucaucacaaaauaucacagaagaauuuuaccaaucuacauguucagcuguauccaaagguuaccuuucagcacuacgaacaggaugguauaccucaguaaucaccaucgaacucucgaacauaaaagaaaacaaauguaacggaaccgaugcuaaagucaagcucauaaaacaagaacuagacaaauacaaaaacgcaguaaccgaacuacaacuacuuaugcaaucaacaccagcugcaggcucaggcucagcaaucugcucaggcauagcuguaugcaaaguacuacaucuagaaggagaaguaaacaaaauaaaaaacgcauuauuaucaacaaauaaagcaguaguaucacuaucaaauggaguaucaguacucacauucaaaguacuagaucuaaaaaacuacauugacaaacaauuacuaccaauccucaacaaacaaucaugcucaauauccaacauagaaacaguaauagaauuucaacaaaaaaacaaucgacuacuagaaauaacaagagaauuuucagucaaugccggaguuacaacacccguaagcacuuacaugcuaaccaacucagaacuacuaucacuaauaaacgacaugccaauuacaaacgaccaaaaaaaacuaaugucaaauaacguacaaauaguacgucaacaaucauacucaauaaugugcauaauaaaagaagaaguccuagcauacguaguacaauuacccuuauauggcguaauagacacaccaugcuggaaacuacacacauccccacucugcaccaccaacaccaaagaaggcuccaacauaugucuaacccgaaccgacagagguugguauugugauaacgcuggcuccguaucauucuucccacaagcagaaacauguaaaguacaaucaaacagaguauucugcgauacaaugaauagcagaacacuaccaucagaaguaaacuuaugcaacaucgacaucuucaaucccaaauacgacugcaaaauaaugacauccaaaacugacguuucuucaagcguaauaacaucuuuaggagcaauaguauccugcuacggaaaaacuaaaugcacagcauccaauaaaaaccguggaauaauaaaaacauucucaaauggcugcgacuacgucucaaacaaaggcguagacaccguuagugucggaaacacacuauauugcguaaauaaacaagaaggaaaauccuuauacguaaaaggcgaaccaauaauuaacuucuaugacccccucguauuuccauccgaugaauuugacgcaucaaucucgcaaguaaacgaaaaaauaaaccaaagccuagcauucauaagaaaauccgacgaacuacuccacaauguaaauguaggaaaaucaacuaccaacauaaugauuacuacuauaauaauaguaauuauagucaucuuacuacuauuaauagcagucggauuauuccuauacugcaaagcaagauagggacuagucccuguucccagagcccacuuuuuuuucuuuuuuugaaauaaaauagccugucuuucagaucuaaaaaaaaaaaaaaaaaaaaaaaaaaaaaaaaaaaaaaaaaaaaaaaaaaaaaaaaaaaaaaaaugcaucccccccccccccccccccccccccccccccaaaggcucuuuucagagccaccagaauu

SEQ ID NO: 16651 - RNA, 1834 nt, Artificial Sequence
  mRNA product Design c-5 comprising derived and/or modified sequence from HRSV(Memphis-37)__AIY60640.1__F-del_DSCav1_mut4 (opt11)
gggagagcggcucggccauuuugucccagucaguccggaggcugcggcugcagaaguaccgccugcggaguaacugcaaagaagcuuaccauggagcuccccauccuaaaaaccaacgccaucaccaccauccucgccgccgucacccuaugcuucgcuucaucacaaaacaucaccgaagaauuuuaccaaucuaccugcuccgccgucuccaaaggauaucucagcgcccuacggaccggcugguacaccuccgucauaaccaucgaacucaguaacaucaaagaaaacaaaugcaacggcaccgacgccaaagucaaacuaaucaaacaagaacuagauaaauacaaaaacgcggucaccgaacuacaacuccuaaugcaaagcacccccgccgccggauccggcuccgccauaugcuccggcauugcugucugcaaaguacuacaccucgagggcgaggucaacaaaaucaaaaacgcacuacucagcacuaauaaagccguaguaucccuaucaaacggugucucagucuuaacauucaaaguacucgaccuaaagaacuacaucgacaaacaacuccuacccauccucaacaagcaguccuguucuaucucaaacaucgaaaccgucaucgaauuucaacaaaagaacaaccgccuccucgaaaucacacgcgaguucuccgucaacgcaggaguaaccacccccgucuccaccuacaugcucacaaacucggaacuccucucacuaaucaacgacaugcccaucaccaacgaccaaaagaaacucaugagcaacaacguucaaaucguccgccaacaaucauacuccaucaugugcauaaucaaagaagaaguccuagcuuacgucguccagcugccccucuacggagucaucgacacgcccugcuggaaacuacacacaagcccccucugcaccaccaacaccaaagaaggcuccaacauaugccucacacggaccgaccgcgguugguacugcgacaacgccggcuccgucuccuucuucccccaagcagaaacuugcaaaguccaauccaaccgcguauucugcgacacaaugaacagcagaacacucccuagcgaagucaaccucugcaacaucgacauauucaaccccaaauacgacugcaaaaucaugacgucaaaaaccgacgucuccagcuccguuaucaccucacucggcgccaucgucagcugcuacggcaaaacuaaaugcaccgccuccaacaaaaaccgcggcaucauuaaaaccuucagcaacggcugcgacuacgucuccaacaaaggugucgauacgguauccgucggaaacacccuauacugcgucaacaaacaagaaggcaaaucucucuacgucaaaggcgaacccauaaucaauuucuacgacccccuagucuuccccuccgaugaauuugacgccuccaucagccaagucaacgagaaaaucaaccaaucacuagccuucauccggaaauccgacgaacuccuacacaacguaaacgucggcaaauccaccaccaauauaaugaucacaaccaucaucaucguaaucaucgucauccuccuccuacucaucgccgucggauuauucuuauacugcaaagcccgcuaaggacuagucccuguucccagagcccacuuuuuuuucuuuuuuugaaauaaaauagccugucuuucagaucuaaaaaaaaaaaaaaaaaaaaaaaaaaaaaaaaaaaaaaaaaaaaaaaaaaaaaaaaaaaaaaaaugcaucccccccccccccccccccccccccccccccaaaggcucuuuucagagccaccagaauu

SEQ ID NO: 16652 - RNA, 1843 nt, Artificial Sequence
  mRNA product Design d-1 comprising derived and/or modified sequence from HRSV(Memphis-37)__AIY60640.1__F-del_DSCav1_mut4 (opt1)
gggagacccgugacccggaaguuguacggcuacgcgacuuucccucccacaaacccucgcgcccuuccuuuccuacuugggcccggcagaaagcuuaccauggagcugcccauccucaagaccaacgccaucaccacgauccuggccgcggugacccugugcuucgccagcucccagaacaucaccgaggaguucuaccagagcacgugcuccgccgucagcaagggcuaccucuccgcccugcgcaccgggugguacaccagcgugaucaccaucgagcuguccaacaucaaggagaacaagugcaacggcaccgacgccaaggugaagcucaucaagcaggagcuggacaaguacaagaacgcggucacggagcugcagcuccugaugcagagcaccccggccgccggcuccgggagcgcgaucugcuccggcaucgccgucugcaaggugcugcaccucgagggcgaggugaacaagaucaagaacgcccugcuguccaccaacaaggccgucgugagccucuccaacggggugagcguccugaccuucaaggugcuggaccucaagaacuacaucgacaagcagcugcugcccauccugaacaagcagagcugcuccaucagcaacaucgagaccgucaucgaguuccagcagaagaacaaccgccuccuggagaucacgcgggaguucagcgugaacgcgggcgugaccacccccgucuccaccuacaugcugacgaacagcgagcuccugucccugaucaacgacaugccgaucaccaacgaccagaagaagcucaugagcaacaacgugcagaucgugcgccagcaguccuacagcaucaugugcaucaucaaggaggagguccuggccuacguggugcagcugccccucuacggggucaucgacacccccugcuggaagcugcacaccagcccccugugcacgaccaacaccaaggagggcuccaacaucugccucacccggacggaccgcgggugguacugcgacaacgccggcagcguguccuucuucccgcaggccgagaccugcaagguccagagcaaccggguguucugcgacaccaugaacucccggacccugcccagcgaggugaaccucugcaacaucgacaucuucaaccccaaguacgacugcaagaucaugacguccaagaccgacgucagcuccagcgugaucaccucccugggcgccaucgugagcugcuacgggaagaccaagugcacggcgagcaacaagaaccgcggcaucaucaagaccuucuccaacgggugcgacuacgucagcaacaagggcguggacaccguguccgucggcaacacccuguacugcgugaacaagcaggagggcaagagccucuacgugaagggggagcccaucaucaacuucuacgacccgcuggucuuccccuccgacgaguucgacgccagcaucucccaggugaacgagaagaucaaccagagccuggccuucauccggaaguccgacgagcuccugcacaacgugaacgucggcaagagcaccacgaacaucaugaucaccaccaucaucaucgugaucaucgugauccugcugcuccugaucgccgucgggcuguuccucuacugcaaggcccgcugaggacuagucccuguucccagagcccacuuuuuuuucuuuuuuugaaauaaaauagccugucuuucagaucuaaaaaaaaaaaaaaaaaaaaaaaaaaaaaaaaaaaaaaaaaaaaaaaaaaaaaaaaaaaaaaaaugcaucccccccccccccccccccccccccccccccaaaggcucuuuucagagccaccagaauu

SEQ ID NO: 16653 - RNA, 1843 nt, Artificial Sequence
  mRNA product Design d-1 comprising derived and/or modified sequence from HRSV(Memphis-37)__AIY60640.1__F-del_DSCav1_mut4 (opt1)
gggagacccgugacccggaaguuguacggcuacgcgacuuucccucccacaaacccucgcgcccuuccuuuccuacuugggcccggcagaaagcuuaccauggagcugcccauccucaagaccaacgccaucaccacgauccuggccgcggugacccugugcuucgccagcucccagaacaucaccgaggaguucuaccagagcacgugcuccgccgucagcaagggcuaccucuccgcccugcgcaccgggugguacaccagcgugaucaccaucgagcuguccaacaucaaggagaacaagugcaacggcaccgacgccaaggugaagcucaucaagcaggagcuggacaaguacaagaacgcggucacggagcugcagcuccugaugcagagcaccccggccgccggguccggcagcgccaucugcuccgggaucgcggugugcaaggugcugcaccucgagggcgaggucaacaagaucaagaacgcccugcugagcaccaacaaggccguggugucccucagcaacggcgucuccgugcugaccuucaaggugcuggaccucaagaacuacaucgacaagcagcugcugcccauccucaacaagcagagcugcuccaucagcaacaucgagacggucaucgaguuccagcagaagaacaaccggcugcuggagaucacccgcgaguucuccgugaacgccggggugaccacccccgucagcacguacaugcucaccaacagcgagcugcugucccucaucaacgacaugcccaucaccaacgaccagaagaagcugaugagcaacaacgugcagaucgugcggcagcaguccuacagcaucaugugcaucaucaaggaggagguccuggccuacguggugcagcucccgcuguacggcgucaucgacacccccugcuggaagcugcacacgagcccccucugcaccaccaacaccaaggagggguccaacaucugccugacgcgcaccgaccggggcugguacugcgacaacgcgggguccgugagcuucuucccccaggccgagaccugcaaggugcaguccaaccgcgucuucugcgacaccaugaacagccggacgcucccguccgaggugaaccugugcaacaucgacaucuucaaccccaaguacgacugcaagaucaugaccagcaagaccgacgucuccagcuccgugaucaccagccugggcgccaucguguccugcuacggcaagacgaagugcaccgccagcaacaagaaccgggggaucaucaagaccuucuccaacggcugcgacuacgucagcaacaaggggguggacaccgugagcgucggcaacacgcucuacugcgugaacaagcaggagggcaagucccuguacgugaagggggagcccaucaucaacuucuacgacccccuggucuucccgagcgacgaguucgacgccuccaucagccaggugaacgagaagaucaaccagucccucgcguucauccgcaagagcgacgagcugcugcacaacgugaacgucggcaaguccaccaccaacaucaugaucaccaccaucaucaucgugaucaucgugauccuccugcugcucaucgccgucgggcuguuccuguacugcaaggcccggugaggacuagucccuguucccagagcccacuuuuuuuucuuuuuuugaaauaaaauagccugucuuucagaucuaaaaaaaaaaaaaaaaaaaaaaaaaaaaaaaaaaaaaaaaaaaaaaaaaaaaaaaaaaaaaaaaugcaucccccccccccccccccccccccccccccccaaaggcucuuuucagagccaccagaauu

SEQ ID NO: 16654 - RNA, 1843 nt, Artificial Sequence
  mRNA product Design d-1 comprising derived and/or modified sequence from HRSV(Memphis-37)__AIY60640.1__F-del_DSCav1_mut4 (opt2)
gggagacccgugacccggaaguuguacggcuacgcgacuuucccucccacaaacccucgcgcccuuccuuuccuacuugggcccggcagaaagcuuaccauggagcuccccauccucaagaccaacgccaucaccaccauccucgccgccgucacccucugcuucgccuccucccagaacaucaccgaggaguucuaccaguccaccugcuccgccgucuccaagggcuaccucuccgcccuccgcaccggcugguacaccuccgucaucaccaucgagcucuccaacaucaaggagaacaagugcaacggcaccgacgccaaggucaagcucaucaagcaggagcucgacaaguacaagaacgccgucaccgagcuccagcuccucaugcaguccacccccgccgccggcuccggcuccgccaucugcuccggcaucgccgucugcaagguccuccaccucgagggcgaggucaacaagaucaagaacgcccuccucuccaccaacaaggccgucgucucccucuccaacggcgucuccguccucaccuucaagguccucgaccucaagaacuacaucgacaagcagcuccuccccauccucaacaagcaguccugcuccaucuccaacaucgagaccgucaucgaguuccagcagaagaacaaccgccuccucgagaucacccgcgaguucuccgucaacgccggcgucaccacccccgucuccaccuacaugcucaccaacuccgagcuccucucccucaucaacgacaugcccaucaccaacgaccagaagaagcucauguccaacaacguccagaucguccgccagcaguccuacuccaucaugugcaucaucaaggaggagguccucgccuacgucguccagcucccccucuacggcgucaucgacacccccugcuggaagcuccacaccuccccccucugcaccaccaacaccaaggagggcuccaacaucugccucacccgcaccgaccgcggcugguacugcgacaacgccggcuccgucuccuucuucccccaggccgagaccugcaagguccaguccaaccgcgucuucugcgacaccaugaacucccgcacccuccccuccgaggucaaccucugcaacaucgacaucuucaaccccaaguacgacugcaagaucaugaccuccaagaccgacgucuccuccuccgucaucaccucccucggcgccaucgucuccugcuacggcaagaccaagugcaccgccuccaacaagaaccgcggcaucaucaagaccuucuccaacggcugcgacuacgucuccaacaagggcgucgacaccgucuccgucggcaacacccucuacugcgucaacaagcaggagggcaagucccucuacgucaagggcgagcccaucaucaacuucuacgacccccucgucuuccccuccgacgaguucgacgccuccaucucccaggucaacgagaagaucaaccagucccucgccuucauccgcaaguccgacgagcuccuccacaacgucaacgucggcaaguccaccaccaacaucaugaucaccaccaucaucaucgucaucaucgucauccuccuccuccucaucgccgucggccucuuccucuacugcaaggcccgcugaggacuagucccuguucccagagcccacuuuuuuuucuuuuuuugaaauaaaauagccugucuuucagaucuaaaaaaaaaaaaaaaaaaaaaaaaaaaaaaaaaaaaaaaaaaaaaaaaaaaaaaaaaaaaaaaaugcaucccccccccccccccccccccccccccccccaaaggcucuuuucagagccaccagaauu

SEQ ID NO: 16655 - RNA, 1843 nt, Artificial Sequence
  mRNA product Design d-1 comprising derived and/or modified sequence from HRSV(Memphis-37)__AIY60640.1__F-del_DSCav1_mut4 (opt3)
gggagacccgugacccggaaguuguacggcuacgcgacuuucccucccacaaacccucgcgcccuuccuuuccuacuugggcccggcagaaagcuuaccauggagcugcccauccucaagaccaacgccauuacaacuauacuugcugcagugacgcugugcuucgccagcucccagaauaucaccgaagaguuuuaccaaucuacauguucagcggucaguaaaggcuauuugagcgcuuuaagaacugggugguacaccuccguuauuacaaucgaacugucuaacauuaaggagaauaaaugcaacggaaccgacgccaaggugaaacuaaucaagcaggaacucgauaaguauaaaaaugcaguaacugagcugcagcuucugaugcagucgaccccugccgcugguucaggcagcgcaauauguagugggaucgccgugugcaaggucuugcaccucgagggagaagugaacaaaauuaagaaugcucugcuguccacaaacaaagccguugugucucucagcaauggcgucuccguguuaacguucaagguacuggaccuuaagaacuacaucgauaaacaauugcugccaauucuaaauaagcagucauguaguaucagcaacauagagacuguuauugaauuucagcagaaaaauaacaggcuccuggagaucacccgggaguucucugugaaugcgggugucacaacuccgguguccaccuauaugcuuacaaacucagaacuguugagccucauuaacgacaugcccaucaccaaugaucaaaagaaacugaugaguaacaaugugcagaucguccgccagcagucuuacuccauuaugugcauaaucaaggaggaaguuuuagcauaugugguacaacugccucucuacggggugauugacacgccauguuggaaacuucauacuagcccccugugcacaaccaacacuaaggagggaucgaauaucuguuugacacgaaccgaucguggcugguacugcgacaacgccggcucugucuccuuuuucccucaggcugaaacguguaaggugcagucaaauagaguguuuugcgauaccaugaacaguagaacacugccaagcgaggugaaucucugcaacauagacauuuucaaucccaaauaugauuguaagaucaugacuuccaaaaccgacgucucuagcucagugaucacaagucugggggccauuguauccugcuacggaaagacuaaauguaccgcaagcaacaagaauagggguaucauuaagacauuuucuaacggcugcgauuauguuucaaauaaagggguggacaccgucagugugggaaacacucuuuacugugucaacaagcaagagggcaaaagccuguaugugaagggugaaccuauaaucaauuucuacgacccauugguuuuuccguccgaugaguucgacgcuucuauuucgcagguuaacgagaaaaucaaucagagccucgccuuuauccggaaguccgaugaacuguuacacaacguaaaugucgggaagucaacgacaaacauuaugauaaccacuaucauuaucgugauuaucguuauacugcuacuccugaucgcggugggacuuuucuuguauugcaaagcccgcugaggacuagucccuguucccagagcccacuuuuuuuucuuuuuuugaaauaaaauagccugucuuucagaucuaaaaaaaaaaaaaaaaaaaaaaaaaaaaaaaaaaaaaaaaaaaaaaaaaaaaaaaaaaaaaaaaugcaucccccccccccccccccccccccccccccccaaaggcucuuuucagagccaccagaauu

SEQ ID NO: 16656 - RNA, 1843 nt, Artificial Sequence
  mRNA product Design d-1 comprising derived and/or modified sequence from HRSV(Memphis-37)__AIY60640.1__F-del_DSCav1_mut4 (opt4)
gggagacccgugacccggaaguuguacggcuacgcgacuuucccucccacaaacccucgcgcccuuccuuuccuacuugggcccggcagaaagcuuaccauggagcugcccauccugaagaccaacgccaucaccaccauccuggccgccgugacccugugcuucgccagcagccagaacaucaccgaggaguucuaccagagcaccugcagcgccgugagcaagggcuaccugagcgcccugagaaccggcugguacaccagcgugaucaccaucgagcugagcaacaucaaggagaacaagugcaacggcaccgacgccaaggugaagcugaucaagcaggagcuggacaaguacaagaacgccgugaccgagcugcagcugcugaugcagagcacccccgccgccggcagcggcagcgccaucugcagcggcaucgccgugugcaaggugcugcaccuggagggcgaggugaacaagaucaagaacgcccugcugagcaccaacaaggccguggugagccugagcaacggcgugagcgugcugaccuucaaggugcuggaccugaagaacuacaucgacaagcagcugcugcccauccugaacaagcagagcugcagcaucagcaacaucgagaccgugaucgaguuccagcagaagaacaacagacugcuggagaucaccagagaguucagcgugaacgccggcgugaccacccccgugagcaccuacaugcugaccaacagcgagcugcugagccugaucaacgacaugcccaucaccaacgaccagaagaagcugaugagcaacaacgugcagaucgugagacagcagagcuacagcaucaugugcaucaucaaggaggaggugcuggccuacguggugcagcugccccuguacggcgugaucgacacccccugcuggaagcugcacaccagcccccugugcaccaccaacaccaaggagggcagcaacaucugccugaccagaaccgacagaggcugguacugcgacaacgccggcagcgugagcuucuucccccaggccgagaccugcaaggugcagagcaacagaguguucugcgacaccaugaacagcagaacccugcccagcgaggugaaccugugcaacaucgacaucuucaaccccaaguacgacugcaagaucaugaccagcaagaccgacgugagcagcagcgugaucaccagccugggcgccaucgugagcugcuacggcaagaccaagugcaccgccagcaacaagaacagaggcaucaucaagaccuucagcaacggcugcgacuacgugagcaacaagggcguggacaccgugagcgugggcaacacccuguacugcgugaacaagcaggagggcaagagccuguacgugaagggcgagcccaucaucaacuucuacgacccccugguguuccccagcgacgaguucgacgccagcaucagccaggugaacgagaagaucaaccagagccuggccuucaucagaaagagcgacgagcugcugcacaacgugaacgugggcaagagcaccaccaacaucaugaucaccaccaucaucaucgugaucaucgugauccugcugcugcugaucgccgugggccuguuccuguacugcaaggccagaugaggacuagucccuguucccagagcccacuuuuuuuucuuuuuuugaaauaaaauagccugucuuucagaucuaaaaaaaaaaaaaaaaaaaaaaaaaaaaaaaaaaaaaaaaaaaaaaaaaaaaaaaaaaaaaaaaugcaucccccccccccccccccccccccccccccccaaaggcucuuuucagagccaccagaauu

SEQ ID NO: 16657 - RNA, 1843 nt, Artificial Sequence
  mRNA product Design d-1 comprising derived and/or modified sequence from HRSV(Memphis-37)__AIY60640.1__F-del_DSCav1_mut4 (opt5)
gggagacccgugacccggaaguuguacggcuacgcgacuuucccucccacaaacccucgcgcccuuccuuuccuacuugggcccggcagaaagcuuaccauggagcugcccauccucaagaccaacgccauuacaacgauccuggcugccgugacccuuugcuucgcgagcucccagaauauuacagaagaguuuuaccaaucuaccuguagcgcugucuccaaaggcuaucugucugcccucagaacagggugguacaccagcguuaucacaauugaacuguccaacaucaaggagaauaaaugcaacggaaccgacgccaaggugaaacuuaucaagcaggaacuggauaaguauaaaaaugcugugacggagcuccagcugcugaugcagucuaccccugccgcuggcagcggguccgccauuuguagcggaaucgcggucugcaaggugcuccaccuggagggcgaaguuaacaaaauuaagaaugcccuucugucuacaaacaaagcuguggucucccucagcaauggggugucuguucugaccuucaaggugcuugaccugaagaacuacaucgauaaacaacuccugccgauucugaauaagcaguccuguagcaucucuaacauugagacagucaucgaauuucagcagaaaaauaaccggcuccuggagaucacccgcgaguucuccgugaaugccggagugacgacacccgucagcaccuauaugcuuacaaacuccgaacugcucucucugauuaacgacaugccuaucaccaaugaucaaaagaaacuuaugagcaacaauguucagauugugagacagcaguccuacagcaucaugugcauuaucaaggaggaagugcuggcuuaugucgugcaacucccccuguacggcguuaucgacaccccuuguuggaaacugcauacaucuccccucugcacgaccaacacaaaggagggcuccaauauuugucugacccggacagaucgcgggugguacugcgacaacgccggaagcgugagcuuuuucccucaggcggaaaccuguaagguccagucuaauagaguguuuugcgauacgaugaacuccagaacacugccgucugagguuaaucucugcaacaucgacauuuucaaucccaaauaugauuguaagaucaugaccagcaaaaccgacguguccagcucugucauuacaucccugggcgccaucgugagcugcuacgggaagaccaaauguacagcuucuaacaagaaucggggaaucauuaagacguuuuccaacggcugcgauuaugucagcaauaaagggguggacaccguuuccgugggaaacacacuuuacugugucaacaagcaagagggcaaaucucuguaugugaagggcgaaccuaucauuaauuucuacgacccccucguuuuuccuagcgaugaguucgacgccuccaucucucaggugaacgaaaagauuaaucagagccuggcuuuuauccgcaaguccgaugagcugcuccacaacgucaauguggggaaaagcaccacaaacauuaugaucaccacgaucauuaucgugauuaucguuauucugcuucugcucaucgccgucggacuguuccuguauugcaaagccagaugaggacuagucccuguucccagagcccacuuuuuuuucuuuuuuugaaauaaaauagccugucuuucagaucuaaaaaaaaaaaaaaaaaaaaaaaaaaaaaaaaaaaaaaaaaaaaaaaaaaaaaaaaaaaaaaaaugcaucccccccccccccccccccccccccccccccaaaggcucuuuucagagccaccagaauu

SEQ ID NO: 16658 - RNA, 1843 nt, Artificial Sequence
  mRNA product Design d-1 comprising derived and/or modified sequence from HRSV(Memphis-37)__AIY60640.1__F-del_DSCav1_mut4 (opt6)
gggagacccgugacccggaaguuguacggcuacgcgacuuucccucccacaaacccucgcgcccuuccuuuccuacuugggcccggcagaaagcuuaccauggaacuaccaauacucaaaacaaacgcaauaacaacuauacuagccgcaguuacacucugcuucgcuucaucacaaaauaucacagaagaauuuuaccaaucuacauguucagcuguauccaaagguuaccuuucagcacuacgaacaggaugguauaccucaguaaucaccaucgaacucucgaacauaaaagaaaacaaauguaacggaaccgaugcuaaagucaagcucauaaaacaagaacuagacaaauacaaaaacgcaguaaccgaacuacaacuacuuaugcaaucaacaccagcugcaggcucaggcucagcaaucugcucaggcauagcuguaugcaaaguacuacaucuagaaggagaaguaaacaaaauaaaaaacgcauuauuaucaacaaauaaagcaguaguaucacuaucaaauggaguaucaguacucacauucaaaguacuagaucuaaaaaacuacauugacaaacaauuacuaccaauccucaacaaacaaucaugcucaauauccaacauagaaacaguaauagaauuucaacaaaaaaacaaucgacuacuagaaauaacaagagaauuuucagucaaugccggaguuacaacacccguaagcacuuacaugcuaaccaacucagaacuacuaucacuaauaaacgacaugccaauuacaaacgaccaaaaaaaacuaaugucaaauaacguacaaauaguacgucaacaaucauacucaauaaugugcauaauaaaagaagaaguccuagcauacguaguacaauuacccuuauauggcguaauagacacaccaugcuggaaacuacacacauccccacucugcaccaccaacaccaaagaaggcuccaacauaugucuaacccgaaccgacagagguugguauugugauaacgcuggcuccguaucauucuucccacaagcagaaacauguaaaguacaaucaaacagaguauucugcgauacaaugaauagcagaacacuaccaucagaaguaaacuuaugcaacaucgacaucuucaaucccaaauacgacugcaaaauaaugacauccaaaacugacguuucuucaagcguaauaacaucuuuaggagcaauaguauccugcuacggaaaaacuaaaugcacagcauccaauaaaaaccguggaauaauaaaaacauucucaaauggcugcgacuacgucucaaacaaaggcguagacaccguuagugucggaaacacacuauauugcguaaauaaacaagaaggaaaauccuuauacguaaaaggcgaaccaauaauuaacuucuaugacccccucguauuuccauccgaugaauuugacgcaucaaucucgcaaguaaacgaaaaaauaaaccaaagccuagcauucauaagaaaauccgacgaacuacuccacaauguaaauguaggaaaaucaacuaccaacauaaugauuacuacuauaauaauaguaauuauagucaucuuacuacuauuaauagcagucggauuauuccuauacugcaaagcaagauagggacuagucccuguucccagagcccacuuuuuuuucuuuuuuugaaauaaaauagccugucuuucagaucuaaaaaaaaaaaaaaaaaaaaaaaaaaaaaaaaaaaaaaaaaaaaaaaaaaaaaaaaaaaaaaaaugcaucccccccccccccccccccccccccccccccaaaggcucuuuucagagccaccagaauu

SEQ ID NO: 16659 - RNA, 1843 nt, Artificial Sequence
  mRNA product Design d-1 comprising derived and/or modified sequence from HRSV(Memphis-37)__AIY60640.1__F-del_DSCav1_mut4 (opt11)
gggagacccgugacccggaaguuguacggcuacgcgacuuucccucccacaaacccucgcgcccuuccuuuccuacuugggcccggcagaaagcuuaccauggagcuccccauccuaaaaaccaacgccaucaccaccauccucgccgccgucacccuaugcuucgcuucaucacaaaacaucaccgaagaauuuuaccaaucuaccugcuccgccgucuccaaaggauaucucagcgcccuacggaccggcugguacaccuccgucauaaccaucgaacucaguaacaucaaagaaaacaaaugcaacggcaccgacgccaaagucaaacuaaucaaacaagaacuagauaaauacaaaaacgcggucaccgaacuacaacuccuaaugcaaagcacccccgccgccggauccggcuccgccauaugcuccggcauugcugucugcaaaguacuacaccucgagggcgaggucaacaaaaucaaaaacgcacuacucagcacuaauaaagccguaguaucccuaucaaacggugucucagucuuaacauucaaaguacucgaccuaaagaacuacaucgacaaacaacuccuacccauccucaacaagcaguccuguucuaucucaaacaucgaaaccgucaucgaauuucaacaaaagaacaaccgccuccucgaaaucacacgcgaguucuccgucaacgcaggaguaaccacccccgucuccaccuacaugcucacaaacucggaacuccucucacuaaucaacgacaugcccaucaccaacgaccaaaagaaacucaugagcaacaacguucaaaucguccgccaacaaucauacuccaucaugugcauaaucaaagaagaaguccuagcuuacgucguccagcugccccucuacggagucaucgacacgcccugcuggaaacuacacacaagcccccucugcaccaccaacaccaaagaaggcuccaacauaugccucacacggaccgaccgcgguugguacugcgacaacgccggcuccgucuccuucuucccccaagcagaaacuugcaaaguccaauccaaccgcguauucugcgacacaaugaacagcagaacacucccuagcgaagucaaccucugcaacaucgacauauucaaccccaaauacgacugcaaaaucaugacgucaaaaaccgacgucuccagcuccguuaucaccucacucggcgccaucgucagcugcuacggcaaaacuaaaugcaccgccuccaacaaaaaccgcggcaucauuaaaaccuucagcaacggcugcgacuacgucuccaacaaaggugucgauacgguauccgucggaaacacccuauacugcgucaacaaacaagaaggcaaaucucucuacgucaaaggcgaacccauaaucaauuucuacgacccccuagucuuccccuccgaugaauuugacgccuccaucagccaagucaacgagaaaaucaaccaaucacuagccuucauccggaaauccgacgaacuccuacacaacguaaacgucggcaaauccaccaccaauauaaugaucacaaccaucaucaucguaaucaucgucauccuccuccuacucaucgccgucggauuauucuuauacugcaaagcccgcuaaggacuagucccuguucccagagcccacuuuuuuuucuuuuuuugaaauaaaauagccugucuuucagaucuaaaaaaaaaaaaaaaaaaaaaaaaaaaaaaaaaaaaaaaaaaaaaaaaaaaaaaaaaaaaaaaaugcaucccccccccccccccccccccccccccccccaaaggcucuuuucagagccaccagaauu

SEQ ID NO: 16660 - RNA, 1898 nt, Artificial Sequence
  mRNA product Design d-2 comprising derived and/or modified sequence from HRSV(Memphis-37)__AIY60640.1__F-del_DSCav1_mut4 (opt1)
gggagagcggcucggccauuuugucccagucaguccggaggcugcggcugcagaaguaccgccugcggaguaacugcaaagaagcuuaccauggagcugcccauccucaagaccaacgccaucaccacgauccuggccgcggugacccugugcuucgccagcucccagaacaucaccgaggaguucuaccagagcacgugcuccgccgucagcaagggcuaccucuccgcccugcgcaccgggugguacaccagcgugaucaccaucgagcuguccaacaucaaggagaacaagugcaacggcaccgacgccaaggugaagcucaucaagcaggagcuggacaaguacaagaacgcggucacggagcugcagcuccugaugcagagcaccccggccgccggcuccgggagcgcgaucugcuccggcaucgccgucugcaaggugcugcaccucgagggcgaggugaacaagaucaagaacgcccugcuguccaccaacaaggccgucgugagccucuccaacggggugagcguccugaccuucaaggugcuggaccucaagaacuacaucgacaagcagcugcugcccauccugaacaagcagagcugcuccaucagcaacaucgagaccgucaucgaguuccagcagaagaacaaccgccuccuggagaucacgcgggaguucagcgugaacgcgggcgugaccacccccgucuccaccuacaugcugacgaacagcgagcuccugucccugaucaacgacaugccgaucaccaacgaccagaagaagcucaugagcaacaacgugcagaucgugcgccagcaguccuacagcaucaugugcaucaucaaggaggagguccuggccuacguggugcagcugccccucuacggggucaucgacacccccugcuggaagcugcacaccagcccccugugcacgaccaacaccaaggagggcuccaacaucugccucacccggacggaccgcgggugguacugcgacaacgccggcagcguguccuucuucccgcaggccgagaccugcaagguccagagcaaccggguguucugcgacaccaugaacucccggacccugcccagcgaggugaaccucugcaacaucgacaucuucaaccccaaguacgacugcaagaucaugacguccaagaccgacgucagcuccagcgugaucaccucccugggcgccaucgugagcugcuacgggaagaccaagugcacggcgagcaacaagaaccgcggcaucaucaagaccuucuccaacgggugcgacuacgucagcaacaagggcguggacaccguguccgucggcaacacccuguacugcgugaacaagcaggagggcaagagccucuacgugaagggggagcccaucaucaacuucuacgacccgcuggucuuccccuccgacgaguucgacgccagcaucucccaggugaacgagaagaucaaccagagccuggccuucauccggaaguccgacgagcuccugcacaacgugaacgucggcaagagcaccacgaacaucaugaucaccaccaucaucaucgugaucaucgugauccugcugcuccugaucgccgucgggcuguuccucuacugcaaggcccgcugaggacuaguaauaaggaaacuguaugaaugucugugggcaggaagugaagagauccuucuguaaagguuuuuggaauuaugucugcugaauaauaaacuuuuuugaaauaauaaaucugguagaaaaaugagaucuaaaaaaaaaaaaaaaaaaaaaaaaaaaaaaaaaaaaaaaaaaaaaaaaaaaaaaaaaaaaaaaaugcaucccccccccccccccccccccccccccccccaaaggcucuuuucagagccaccagaauu

SEQ ID NO: 16661 - RNA, 1898 nt, Artificial Sequence
  mRNA product Design d-2 comprising derived and/or modified sequence from HRSV(Memphis-37)__AIY60640.1__F-del_DSCav1_mut4 (opt1)
gggagagcggcucggccauuuugucccagucaguccggaggcugcggcugcagaaguaccgccugcggaguaacugcaaagaagcuuaccauggagcugcccauccucaagaccaacgccaucaccacgauccuggccgcggugacccugugcuucgccagcucccagaacaucaccgaggaguucuaccagagcacgugcuccgccgucagcaagggcuaccucuccgcccugcgcaccgggugguacaccagcgugaucaccaucgagcuguccaacaucaaggagaacaagugcaacggcaccgacgccaaggugaagcucaucaagcaggagcuggacaaguacaagaacgcggucacggagcugcagcuccugaugcagagcaccccggccgccggguccggcagcgccaucugcuccgggaucgcggugugcaaggugcugcaccucgagggcgaggucaacaagaucaagaacgcccugcugagcaccaacaaggccguggugucccucagcaacggcgucuccgugcugaccuucaaggugcuggaccucaagaacuacaucgacaagcagcugcugcccauccucaacaagcagagcugcuccaucagcaacaucgagacggucaucgaguuccagcagaagaacaaccggcugcuggagaucacccgcgaguucuccgugaacgccggggugaccacccccgucagcacguacaugcucaccaacagcgagcugcugucccucaucaacgacaugcccaucaccaacgaccagaagaagcugaugagcaacaacgugcagaucgugcggcagcaguccuacagcaucaugugcaucaucaaggaggagguccuggccuacguggugcagcucccgcuguacggcgucaucgacacccccugcuggaagcugcacacgagcccccucugcaccaccaacaccaaggagggguccaacaucugccugacgcgcaccgaccggggcugguacugcgacaacgcgggguccgugagcuucuucccccaggccgagaccugcaaggugcaguccaaccgcgucuucugcgacaccaugaacagccggacgcucccguccgaggugaaccugugcaacaucgacaucuucaaccccaaguacgacugcaagaucaugaccagcaagaccgacgucuccagcuccgugaucaccagccugggcgccaucguguccugcuacggcaagacgaagugcaccgccagcaacaagaaccgggggaucaucaagaccuucuccaacggcugcgacuacgucagcaacaaggggguggacaccgugagcgucggcaacacgcucuacugcgugaacaagcaggagggcaagucccuguacgugaagggggagcccaucaucaacuucuacgacccccuggucuucccgagcgacgaguucgacgccuccaucagccaggugaacgagaagaucaaccagucccucgcguucauccgcaagagcgacgagcugcugcacaacgugaacgucggcaaguccaccaccaacaucaugaucaccaccaucaucaucgugaucaucgugauccuccugcugcucaucgccgucgggcuguuccuguacugcaaggcccggugaggacuaguaauaaggaaacuguaugaaugucugugggcaggaagugaagagauccuucuguaaagguuuuuggaauuaugucugcugaauaauaaacuuuuuugaaauaauaaaucugguagaaaaaugagaucuaaaaaaaaaaaaaaaaaaaaaaaaaaaaaaaaaaaaaaaaaaaaaaaaaaaaaaaaaaaaaaaaugcaucccccccccccccccccccccccccccccccaaaggcucuuuucagagccaccagaauu

SEQ ID NO: 16662 - RNA, 1898 nt, Artificial Sequence
  mRNA product Design d-2 comprising derived and/or modified sequence from HRSV(Memphis-37)__AIY60640.1__F-del_DSCav1_mut4 (opt2)
gggagagcggcucggccauuuugucccagucaguccggaggcugcggcugcagaaguaccgccugcggaguaacugcaaagaagcuuaccauggagcuccccauccucaagaccaacgccaucaccaccauccucgccgccgucacccucugcuucgccuccucccagaacaucaccgaggaguucuaccaguccaccugcuccgccgucuccaagggcuaccucuccgcccuccgcaccggcugguacaccuccgucaucaccaucgagcucuccaacaucaaggagaacaagugcaacggcaccgacgccaaggucaagcucaucaagcaggagcucgacaaguacaagaacgccgucaccgagcuccagcuccucaugcaguccacccccgccgccggcuccggcuccgccaucugcuccggcaucgccgucugcaagguccuccaccucgagggcgaggucaacaagaucaagaacgcccuccucuccaccaacaaggccgucgucucccucuccaacggcgucuccguccucaccuucaagguccucgaccucaagaacuacaucgacaagcagcuccuccccauccucaacaagcaguccugcuccaucuccaacaucgagaccgucaucgaguuccagcagaagaacaaccgccuccucgagaucacccgcgaguucuccgucaacgccggcgucaccacccccgucuccaccuacaugcucaccaacuccgagcuccucucccucaucaacgacaugcccaucaccaacgaccagaagaagcucauguccaacaacguccagaucguccgccagcaguccuacuccaucaugugcaucaucaaggaggagguccucgccuacgucguccagcucccccucuacggcgucaucgacacccccugcuggaagcuccacaccuccccccucugcaccaccaacaccaaggagggcuccaacaucugccucacccgcaccgaccgcggcugguacugcgacaacgccggcuccgucuccuucuucccccaggccgagaccugcaagguccaguccaaccgcgucuucugcgacaccaugaacucccgcacccuccccuccgaggucaaccucugcaacaucgacaucuucaaccccaaguacgacugcaagaucaugaccuccaagaccgacgucuccuccuccgucaucaccucccucggcgccaucgucuccugcuacggcaagaccaagugcaccgccuccaacaagaaccgcggcaucaucaagaccuucuccaacggcugcgacuacgucuccaacaagggcgucgacaccgucuccgucggcaacacccucuacugcgucaacaagcaggagggcaagucccucuacgucaagggcgagcccaucaucaacuucuacgacccccucgucuuccccuccgacgaguucgacgccuccaucucccaggucaacgagaagaucaaccagucccucgccuucauccgcaaguccgacgagcuccuccacaacgucaacgucggcaaguccaccaccaacaucaugaucaccaccaucaucaucgucaucaucgucauccuccuccuccucaucgccgucggccucuuccucuacugcaaggcccgcugaggacuaguaauaaggaaacuguaugaaugucugugggcaggaagugaagagauccuucuguaaagguuuuuggaauuaugucugcugaauaauaaacuuuuuugaaauaauaaaucugguagaaaaaugagaucuaaaaaaaaaaaaaaaaaaaaaaaaaaaaaaaaaaaaaaaaaaaaaaaaaaaaaaaaaaaaaaaaugcaucccccccccccccccccccccccccccccccaaaggcucuuuucagagccaccagaauu

SEQ ID NO: 16663 - RNA, 1898 nt, Artificial Sequence
  mRNA product Design d-2 comprising derived and/or modified sequence from HRSV(Memphis-37)__AIY60640.1__F-del_DSCav1_mut4 (opt3)
gggagagcggcucggccauuuugucccagucaguccggaggcugcggcugcagaaguaccgccugcggaguaacugcaaagaagcuuaccauggagcugcccauccucaagaccaacgccauuacaacuauacuugcugcagugacgcugugcuucgccagcucccagaauaucaccgaagaguuuuaccaaucuacauguucagcggucaguaaaggcuauuugagcgcuuuaagaacugggugguacaccuccguuauuacaaucgaacugucuaacauuaaggagaauaaaugcaacggaaccgacgccaaggugaaacuaaucaagcaggaacucgauaaguauaaaaaugcaguaacugagcugcagcuucugaugcagucgaccccugccgcugguucaggcagcgcaauauguagugggaucgccgugugcaaggucuugcaccucgagggagaagugaacaaaauuaagaaugcucugcuguccacaaacaaagccguugugucucucagcaauggcgucuccguguuaacguucaagguacuggaccuuaagaacuacaucgauaaacaauugcugccaauucuaaauaagcagucauguaguaucagcaacauagagacuguuauugaauuucagcagaaaaauaacaggcuccuggagaucacccgggaguucucugugaaugcgggugucacaacuccgguguccaccuauaugcuuacaaacucagaacuguugagccucauuaacgacaugcccaucaccaaugaucaaaagaaacugaugaguaacaaugugcagaucguccgccagcagucuuacuccauuaugugcauaaucaaggaggaaguuuuagcauaugugguacaacugccucucuacggggugauugacacgccauguuggaaacuucauacuagcccccugugcacaaccaacacuaaggagggaucgaauaucuguuugacacgaaccgaucguggcugguacugcgacaacgccggcucugucuccuuuuucccucaggcugaaacguguaaggugcagucaaauagaguguuuugcgauaccaugaacaguagaacacugccaagcgaggugaaucucugcaacauagacauuuucaaucccaaauaugauuguaagaucaugacuuccaaaaccgacgucucuagcucagugaucacaagucugggggccauuguauccugcuacggaaagacuaaauguaccgcaagcaacaagaauagggguaucauuaagacauuuucuaacggcugcgauuauguuucaaauaaagggguggacaccgucagugugggaaacacucuuuacugugucaacaagcaagagggcaaaagccuguaugugaagggugaaccuauaaucaauuucuacgacccauugguuuuuccguccgaugaguucgacgcuucuauuucgcagguuaacgagaaaaucaaucagagccucgccuuuauccggaaguccgaugaacuguuacacaacguaaaugucgggaagucaacgacaaacauuaugauaaccacuaucauuaucgugauuaucguuauacugcuacuccugaucgcggugggacuuuucuuguauugcaaagcccgcugaggacuaguaauaaggaaacuguaugaaugucugugggcaggaagugaagagauccuucuguaaagguuuuuggaauuaugucugcugaauaauaaacuuuuuugaaauaauaaaucugguagaaaaaugagaucuaaaaaaaaaaaaaaaaaaaaaaaaaaaaaaaaaaaaaaaaaaaaaaaaaaaaaaaaaaaaaaaaugcaucccccccccccccccccccccccccccccccaaaggcucuuuucagagccaccagaauu

SEQ ID NO: 16664 - RNA, 1898 nt, Artificial Sequence
  mRNA product Design d-2 comprising derived and/or modified sequence from HRSV(Memphis-37)__AIY60640.1__F-del_DSCav1_mut4 (opt4)
gggagagcggcucggccauuuugucccagucaguccggaggcugcggcugcagaaguaccgccugcggaguaacugcaaagaagcuuaccauggagcugcccauccugaagaccaacgccaucaccaccauccuggccgccgugacccugugcuucgccagcagccagaacaucaccgaggaguucuaccagagcaccugcagcgccgugagcaagggcuaccugagcgcccugagaaccggcugguacaccagcgugaucaccaucgagcugagcaacaucaaggagaacaagugcaacggcaccgacgccaaggugaagcugaucaagcaggagcuggacaaguacaagaacgccgugaccgagcugcagcugcugaugcagagcacccccgccgccggcagcggcagcgccaucugcagcggcaucgccgugugcaaggugcugcaccuggagggcgaggugaacaagaucaagaacgcccugcugagcaccaacaaggccguggugagccugagcaacggcgugagcgugcugaccuucaaggugcuggaccugaagaacuacaucgacaagcagcugcugcccauccugaacaagcagagcugcagcaucagcaacaucgagaccgugaucgaguuccagcagaagaacaacagacugcuggagaucaccagagaguucagcgugaacgccggcgugaccacccccgugagcaccuacaugcugaccaacagcgagcugcugagccugaucaacgacaugcccaucaccaacgaccagaagaagcugaugagcaacaacgugcagaucgugagacagcagagcuacagcaucaugugcaucaucaaggaggaggugcuggccuacguggugcagcugccccuguacggcgugaucgacacccccugcuggaagcugcacaccagcccccugugcaccaccaacaccaaggagggcagcaacaucugccugaccagaaccgacagaggcugguacugcgacaacgccggcagcgugagcuucuucccccaggccgagaccugcaaggugcagagcaacagaguguucugcgacaccaugaacagcagaacccugcccagcgaggugaaccugugcaacaucgacaucuucaaccccaaguacgacugcaagaucaugaccagcaagaccgacgugagcagcagcgugaucaccagccugggcgccaucgugagcugcuacggcaagaccaagugcaccgccagcaacaagaacagaggcaucaucaagaccuucagcaacggcugcgacuacgugagcaacaagggcguggacaccgugagcgugggcaacacccuguacugcgugaacaagcaggagggcaagagccuguacgugaagggcgagcccaucaucaacuucuacgacccccugguguuccccagcgacgaguucgacgccagcaucagccaggugaacgagaagaucaaccagagccuggccuucaucagaaagagcgacgagcugcugcacaacgugaacgugggcaagagcaccaccaacaucaugaucaccaccaucaucaucgugaucaucgugauccugcugcugcugaucgccgugggccuguuccuguacugcaaggccagaugaggacuaguaauaaggaaacuguaugaaugucugugggcaggaagugaagagauccuucuguaaagguuuuuggaauuaugucugcugaauaauaaacuuuuuugaaauaauaaaucugguagaaaaaugagaucuaaaaaaaaaaaaaaaaaaaaaaaaaaaaaaaaaaaaaaaaaaaaaaaaaaaaaaaaaaaaaaaaugcaucccccccccccccccccccccccccccccccaaaggcucuuuucagagccaccagaauu

SEQ ID NO: 16665 - RNA, 1898 nt, Artificial Sequence
  mRNA product Design d-2 comprising derived and/or modified sequence from HRSV(Memphis-37)__AIY60640.1__F-del_DSCav1_mut4 (opt5)
gggagagcggcucggccauuuugucccagucaguccggaggcugcggcugcagaaguaccgccugcggaguaacugcaaagaagcuuaccauggagcugcccauccucaagaccaacgccauuacaacgauccuggcugccgugacccuuugcuucgcgagcucccagaauauuacagaagaguuuuaccaaucuaccuguagcgcugucuccaaaggcuaucugucugcccucagaacagggugguacaccagcguuaucacaauugaacuguccaacaucaaggagaauaaaugcaacggaaccgacgccaaggugaaacuuaucaagcaggaacuggauaaguauaaaaaugcugugacggagcuccagcugcugaugcagucuaccccugccgcuggcagcggguccgccauuuguagcggaaucgcggucugcaaggugcuccaccuggagggcgaaguuaacaaaauuaagaaugcccuucugucuacaaacaaagcuguggucucccucagcaauggggugucuguucugaccuucaaggugcuugaccugaagaacuacaucgauaaacaacuccugccgauucugaauaagcaguccuguagcaucucuaacauugagacagucaucgaauuucagcagaaaaauaaccggcuccuggagaucacccgcgaguucuccgugaaugccggagugacgacacccgucagcaccuauaugcuuacaaacuccgaacugcucucucugauuaacgacaugccuaucaccaaugaucaaaagaaacuuaugagcaacaauguucagauugugagacagcaguccuacagcaucaugugcauuaucaaggaggaagugcuggcuuaugucgugcaacucccccuguacggcguuaucgacaccccuuguuggaaacugcauacaucuccccucugcacgaccaacacaaaggagggcuccaauauuugucugacccggacagaucgcgggugguacugcgacaacgccggaagcgugagcuuuuucccucaggcggaaaccuguaagguccagucuaauagaguguuuugcgauacgaugaacuccagaacacugccgucugagguuaaucucugcaacaucgacauuuucaaucccaaauaugauuguaagaucaugaccagcaaaaccgacguguccagcucugucauuacaucccugggcgccaucgugagcugcuacgggaagaccaaauguacagcuucuaacaagaaucggggaaucauuaagacguuuuccaacggcugcgauuaugucagcaauaaagggguggacaccguuuccgugggaaacacacuuuacugugucaacaagcaagagggcaaaucucuguaugugaagggcgaaccuaucauuaauuucuacgacccccucguuuuuccuagcgaugaguucgacgccuccaucucucaggugaacgaaaagauuaaucagagccuggcuuuuauccgcaaguccgaugagcugcuccacaacgucaauguggggaaaagcaccacaaacauuaugaucaccacgaucauuaucgugauuaucguuauucugcuucugcucaucgccgucggacuguuccuguauugcaaagccagaugaggacuaguaauaaggaaacuguaugaaugucugugggcaggaagugaagagauccuucuguaaagguuuuuggaauuaugucugcugaauaauaaacuuuuuugaaauaauaaaucugguagaaaaaugagaucuaaaaaaaaaaaaaaaaaaaaaaaaaaaaaaaaaaaaaaaaaaaaaaaaaaaaaaaaaaaaaaaaugcaucccccccccccccccccccccccccccccccaaaggcucuuuucagagccaccagaauu

SEQ ID NO: 16666 - RNA, 1898 nt, Artificial Sequence
  mRNA product Design d-2 comprising derived and/or modified sequence from HRSV(Memphis-37)__AIY60640.1__F-del_DSCav1_mut4 (opt6)
gggagagcggcucggccauuuugucccagucaguccggaggcugcggcugcagaaguaccgccugcggaguaacugcaaagaagcuuaccauggaacuaccaauacucaaaacaaacgcaauaacaacuauacuagccgcaguuacacucugcuucgcuucaucacaaaauaucacagaagaauuuuaccaaucuacauguucagcuguauccaaagguuaccuuucagcacuacgaacaggaugguauaccucaguaaucaccaucgaacucucgaacauaaaagaaaacaaauguaacggaaccgaugcuaaagucaagcucauaaaacaagaacuagacaaauacaaaaacgcaguaaccgaacuacaacuacuuaugcaaucaacaccagcugcaggcucaggcucagcaaucugcucaggcauagcuguaugcaaaguacuacaucuagaaggagaaguaaacaaaauaaaaaacgcauuauuaucaacaaauaaagcaguaguaucacuaucaaauggaguaucaguacucacauucaaaguacuagaucuaaaaaacuacauugacaaacaauuacuaccaauccucaacaaacaaucaugcucaauauccaacauagaaacaguaauagaauuucaacaaaaaaacaaucgacuacuagaaauaacaagagaauuuucagucaaugccggaguuacaacacccguaagcacuuacaugcuaaccaacucagaacuacuaucacuaauaaacgacaugccaauuacaaacgaccaaaaaaaacuaaugucaaauaacguacaaauaguacgucaacaaucauacucaauaaugugcauaauaaaagaagaaguccuagcauacguaguacaauuacccuuauauggcguaauagacacaccaugcuggaaacuacacacauccccacucugcaccaccaacaccaaagaaggcuccaacauaugucuaacccgaaccgacagagguugguauugugauaacgcuggcuccguaucauucuucccacaagcagaaacauguaaaguacaaucaaacagaguauucugcgauacaaugaauagcagaacacuaccaucagaaguaaacuuaugcaacaucgacaucuucaaucccaaauacgacugcaaaauaaugacauccaaaacugacguuucuucaagcguaauaacaucuuuaggagcaauaguauccugcuacggaaaaacuaaaugcacagcauccaauaaaaaccguggaauaauaaaaacauucucaaauggcugcgacuacgucucaaacaaaggcguagacaccguuagugucggaaacacacuauauugcguaaauaaacaagaaggaaaauccuuauacguaaaaggcgaaccaauaauuaacuucuaugacccccucguauuuccauccgaugaauuugacgcaucaaucucgcaaguaaacgaaaaaauaaaccaaagccuagcauucauaagaaaauccgacgaacuacuccacaauguaaauguaggaaaaucaacuaccaacauaaugauuacuacuauaauaauaguaauuauagucaucuuacuacuauuaauagcagucggauuauuccuauacugcaaagcaagauagggacuaguaauaaggaaacuguaugaaugucugugggcaggaagugaagagauccuucuguaaagguuuuuggaauuaugucugcugaauaauaaacuuuuuugaaauaauaaaucugguagaaaaaugagaucuaaaaaaaaaaaaaaaaaaaaaaaaaaaaaaaaaaaaaaaaaaaaaaaaaaaaaaaaaaaaaaaaugcaucccccccccccccccccccccccccccccccaaaggcucuuuucagagccaccagaauu

SEQ ID NO: 16667 - RNA, 1898 nt, Artificial Sequence
  mRNA product Design d-2 comprising derived and/or modified sequence from HRSV(Memphis-37)__AIY60640.1__F-del_DSCav1_mut4 (opt11)
gggagagcggcucggccauuuugucccagucaguccggaggcugcggcugcagaaguaccgccugcggaguaacugcaaagaagcuuaccauggagcuccccauccuaaaaaccaacgccaucaccaccauccucgccgccgucacccuaugcuucgcuucaucacaaaacaucaccgaagaauuuuaccaaucuaccugcuccgccgucuccaaaggauaucucagcgcccuacggaccggcugguacaccuccgucauaaccaucgaacucaguaacaucaaagaaaacaaaugcaacggcaccgacgccaaagucaaacuaaucaaacaagaacuagauaaauacaaaaacgcggucaccgaacuacaacuccuaaugcaaagcacccccgccgccggauccggcuccgccauaugcuccggcauugcugucugcaaaguacuacaccucgagggcgaggucaacaaaaucaaaaacgcacuacucagcacuaauaaagccguaguaucccuaucaaacggugucucagucuuaacauucaaaguacucgaccuaaagaacuacaucgacaaacaacuccuacccauccucaacaagcaguccuguucuaucucaaacaucgaaaccgucaucgaauuucaacaaaagaacaaccgccuccucgaaaucacacgcgaguucuccgucaacgcaggaguaaccacccccgucuccaccuacaugcucacaaacucggaacuccucucacuaaucaacgacaugcccaucaccaacgaccaaaagaaacucaugagcaacaacguucaaaucguccgccaacaaucauacuccaucaugugcauaaucaaagaagaaguccuagcuuacgucguccagcugccccucuacggagucaucgacacgcccugcuggaaacuacacacaagcccccucugcaccaccaacaccaaagaaggcuccaacauaugccucacacggaccgaccgcgguugguacugcgacaacgccggcuccgucuccuucuucccccaagcagaaacuugcaaaguccaauccaaccgcguauucugcgacacaaugaacagcagaacacucccuagcgaagucaaccucugcaacaucgacauauucaaccccaaauacgacugcaaaaucaugacgucaaaaaccgacgucuccagcuccguuaucaccucacucggcgccaucgucagcugcuacggcaaaacuaaaugcaccgccuccaacaaaaaccgcggcaucauuaaaaccuucagcaacggcugcgacuacgucuccaacaaaggugucgauacgguauccgucggaaacacccuauacugcgucaacaaacaagaaggcaaaucucucuacgucaaaggcgaacccauaaucaauuucuacgacccccuagucuuccccuccgaugaauuugacgccuccaucagccaagucaacgagaaaaucaaccaaucacuagccuucauccggaaauccgacgaacuccuacacaacguaaacgucggcaaauccaccaccaauauaaugaucacaaccaucaucaucguaaucaucgucauccuccuccuacucaucgccgucggauuauucuuauacugcaaagcccgcuaaggacuaguaauaaggaaacuguaugaaugucugugggcaggaagugaagagauccuucuguaaagguuuuuggaauuaugucugcugaauaauaaacuuuuuugaaauaauaaaucugguagaaaaaugagaucuaaaaaaaaaaaaaaaaaaaaaaaaaaaaaaaaaaaaaaaaaaaaaaaaaaaaaaaaaaaaaaaaugcaucccccccccccccccccccccccccccccccaaaggcucuuuucagagccaccagaauu

SEQ ID NO: 16668 - RNA, 2214 nt, Artificial Sequence
  mRNA product Design d-3 comprising derived and/or modified sequence from HRSV(Memphis-37)__AIY60640.1__F-del_DSCav1_mut4 (opt1)
gggagagggcgcuuggcuugcaaggacccugagcugcggcauugaagcacacccaacccaacucgacugaagucagccucacugaaccggaucugagaaucuucucucucugggcuugccagggcucuccgaaccuagcuagcauccucuucaauuccaacuagaaagcuuaccauggagcugcccauccucaagaccaacgccaucaccacgauccuggccgcggugacccugugcuucgccagcucccagaacaucaccgaggaguucuaccagagcacgugcuccgccgucagcaagggcuaccucuccgcccugcgcaccgggugguacaccagcgugaucaccaucgagcuguccaacaucaaggagaacaagugcaacggcaccgacgccaaggugaagcucaucaagcaggagcuggacaaguacaagaacgcggucacggagcugcagcuccugaugcagagcaccccggccgccggcuccgggagcgcgaucugcuccggcaucgccgucugcaaggugcugcaccucgagggcgaggugaacaagaucaagaacgcccugcuguccaccaacaaggccgucgugagccucuccaacggggugagcguccugaccuucaaggugcuggaccucaagaacuacaucgacaagcagcugcugcccauccugaacaagcagagcugcuccaucagcaacaucgagaccgucaucgaguuccagcagaagaacaaccgccuccuggagaucacgcgggaguucagcgugaacgcgggcgugaccacccccgucuccaccuacaugcugacgaacagcgagcuccugucccugaucaacgacaugccgaucaccaacgaccagaagaagcucaugagcaacaacgugcagaucgugcgccagcaguccuacagcaucaugugcaucaucaaggaggagguccuggccuacguggugcagcugccccucuacggggucaucgacacccccugcuggaagcugcacaccagcccccugugcacgaccaacaccaaggagggcuccaacaucugccucacccggacggaccgcgggugguacugcgacaacgccggcagcguguccuucuucccgcaggccgagaccugcaagguccagagcaaccggguguucugcgacaccaugaacucccggacccugcccagcgaggugaaccucugcaacaucgacaucuucaaccccaaguacgacugcaagaucaugacguccaagaccgacgucagcuccagcgugaucaccucccugggcgccaucgugagcugcuacgggaagaccaagugcacggcgagcaacaagaaccgcggcaucaucaagaccuucuccaacgggugcgacuacgucagcaacaagggcguggacaccguguccgucggcaacacccuguacugcgugaacaagcaggagggcaagagccucuacgugaagggggagcccaucaucaacuucuacgacccgcuggucuuccccuccgacgaguucgacgccagcaucucccaggugaacgagaagaucaaccagagccuggccuucauccggaaguccgacgagcuccugcacaacgugaacgucggcaagagcaccacgaacaucaugaucaccaccaucaucaucgugaucaucgugauccugcugcuccugaucgccgucgggcuguuccucuacugcaaggcccgcugaggacuagugaagggaacacccaaauuuaauucagccuuaagcacaauuaauuaagagugaaacguaauuguacaagcaguuggucacccaccauagggcaugaucaacaccgcaaccuuuccuuuuucccccagugauucugaaaaaccccucuucccuucagcuugcuuagauguuccaaauuuaguaagcuuaaggcggccuacagaagaaaaagaaaaaaaaggccacaaaaguucccucucacuuucaguaaauaaaauaaaagcagcaacagaaauaaagaaauaaaugaaauucaaaaugaaauaaauauuguguugugcagcauuaaaaaaucaauaaaaauuaaaaaugagcaagaucuaaaaaaaaaaaaaaaaaaaaaaaaaaaaaaaaaaaaaaaaaaaaaaaaaaaaaaaaaaaaaaaaugcaucccccccccccccccccccccccccccccccaaaggcucuuuucagagccaccagaauu

SEQ ID NO: 16669 - RNA, 2214 nt, Artificial Sequence
  mRNA product Design d-3 comprising derived and/or modified sequence from HRSV(Memphis-37)__AIY60640.1__F-del_DSCav1_mut4 (opt1)
gggagagggcgcuuggcuugcaaggacccugagcugcggcauugaagcacacccaacccaacucgacugaagucagccucacugaaccggaucugagaaucuucucucucugggcuugccagggcucuccgaaccuagcuagcauccucuucaauuccaacuagaaagcuuaccauggagcugcccauccucaagaccaacgccaucaccacgauccuggccgcggugacccugugcuucgccagcucccagaacaucaccgaggaguucuaccagagcacgugcuccgccgucagcaagggcuaccucuccgcccugcgcaccgggugguacaccagcgugaucaccaucgagcuguccaacaucaaggagaacaagugcaacggcaccgacgccaaggugaagcucaucaagcaggagcuggacaaguacaagaacgcggucacggagcugcagcuccugaugcagagcaccccggccgccggguccggcagcgccaucugcuccgggaucgcggugugcaaggugcugcaccucgagggcgaggucaacaagaucaagaacgcccugcugagcaccaacaaggccguggugucccucagcaacggcgucuccgugcugaccuucaaggugcuggaccucaagaacuacaucgacaagcagcugcugcccauccucaacaagcagagcugcuccaucagcaacaucgagacggucaucgaguuccagcagaagaacaaccggcugcuggagaucacccgcgaguucuccgugaacgccggggugaccacccccgucagcacguacaugcucaccaacagcgagcugcugucccucaucaacgacaugcccaucaccaacgaccagaagaagcugaugagcaacaacgugcagaucgugcggcagcaguccuacagcaucaugugcaucaucaaggaggagguccuggccuacguggugcagcucccgcuguacggcgucaucgacacccccugcuggaagcugcacacgagcccccucugcaccaccaacaccaaggagggguccaacaucugccugacgcgcaccgaccggggcugguacugcgacaacgcgggguccgugagcuucuucccccaggccgagaccugcaaggugcaguccaaccgcgucuucugcgacaccaugaacagccggacgcucccguccgaggugaaccugugcaacaucgacaucuucaaccccaaguacgacugcaagaucaugaccagcaagaccgacgucuccagcuccgugaucaccagccugggcgccaucguguccugcuacggcaagacgaagugcaccgccagcaacaagaaccgggggaucaucaagaccuucuccaacggcugcgacuacgucagcaacaaggggguggacaccgugagcgucggcaacacgcucuacugcgugaacaagcaggagggcaagucccuguacgugaagggggagcccaucaucaacuucuacgacccccuggucuucccgagcgacgaguucgacgccuccaucagccaggugaacgagaagaucaaccagucccucgcguucauccgcaagagcgacgagcugcugcacaacgugaacgucggcaaguccaccaccaacaucaugaucaccaccaucaucaucgugaucaucgugauccuccugcugcucaucgccgucgggcuguuccuguacugcaaggcccggugaggacuagugaagggaacacccaaauuuaauucagccuuaagcacaauuaauuaagagugaaacguaauuguacaagcaguuggucacccaccauagggcaugaucaacaccgcaaccuuuccuuuuucccccagugauucugaaaaaccccucuucccuucagcuugcuuagauguuccaaauuuaguaagcuuaaggcggccuacagaagaaaaagaaaaaaaaggccacaaaaguucccucucacuuucaguaaauaaaauaaaagcagcaacagaaauaaagaaauaaaugaaauucaaaaugaaauaaauauuguguugugcagcauuaaaaaaucaauaaaaauuaaaaaugagcaagaucuaaaaaaaaaaaaaaaaaaaaaaaaaaaaaaaaaaaaaaaaaaaaaaaaaaaaaaaaaaaaaaaaugcaucccccccccccccccccccccccccccccccaaaggcucuuuucagagccaccagaauu

SEQ ID NO: 16670 - RNA, 2214 nt, Artificial Sequence
  mRNA product Design d-3 comprising derived and/or modified sequence from HRSV(Memphis-37)__AIY60640.1__F-del_DSCav1_mut4 (opt2)
gggagagggcgcuuggcuugcaaggacccugagcugcggcauugaagcacacccaacccaacucgacugaagucagccucacugaaccggaucugagaaucuucucucucugggcuugccagggcucuccgaaccuagcuagcauccucuucaauuccaacuagaaagcuuaccauggagcuccccauccucaagaccaacgccaucaccaccauccucgccgccgucacccucugcuucgccuccucccagaacaucaccgaggaguucuaccaguccaccugcuccgccgucuccaagggcuaccucuccgcccuccgcaccggcugguacaccuccgucaucaccaucgagcucuccaacaucaaggagaacaagugcaacggcaccgacgccaaggucaagcucaucaagcaggagcucgacaaguacaagaacgccgucaccgagcuccagcuccucaugcaguccacccccgccgccggcuccggcuccgccaucugcuccggcaucgccgucugcaagguccuccaccucgagggcgaggucaacaagaucaagaacgcccuccucuccaccaacaaggccgucgucucccucuccaacggcgucuccguccucaccuucaagguccucgaccucaagaacuacaucgacaagcagcuccuccccauccucaacaagcaguccugcuccaucuccaacaucgagaccgucaucgaguuccagcagaagaacaaccgccuccucgagaucacccgcgaguucuccgucaacgccggcgucaccacccccgucuccaccuacaugcucaccaacuccgagcuccucucccucaucaacgacaugcccaucaccaacgaccagaagaagcucauguccaacaacguccagaucguccgccagcaguccuacuccaucaugugcaucaucaaggaggagguccucgccuacgucguccagcucccccucuacggcgucaucgacacccccugcuggaagcuccacaccuccccccucugcaccaccaacaccaaggagggcuccaacaucugccucacccgcaccgaccgcggcugguacugcgacaacgccggcuccgucuccuucuucccccaggccgagaccugcaagguccaguccaaccgcgucuucugcgacaccaugaacucccgcacccuccccuccgaggucaaccucugcaacaucgacaucuucaaccccaaguacgacugcaagaucaugaccuccaagaccgacgucuccuccuccgucaucaccucccucggcgccaucgucuccugcuacggcaagaccaagugcaccgccuccaacaagaaccgcggcaucaucaagaccuucuccaacggcugcgacuacgucuccaacaagggcgucgacaccgucuccgucggcaacacccucuacugcgucaacaagcaggagggcaagucccucuacgucaagggcgagcccaucaucaacuucuacgacccccucgucuuccccuccgacgaguucgacgccuccaucucccaggucaacgagaagaucaaccagucccucgccuucauccgcaaguccgacgagcuccuccacaacgucaacgucggcaaguccaccaccaacaucaugaucaccaccaucaucaucgucaucaucgucauccuccuccuccucaucgccgucggccucuuccucuacugcaaggcccgcugaggacuagugaagggaacacccaaauuuaauucagccuuaagcacaauuaauuaagagugaaacguaauuguacaagcaguuggucacccaccauagggcaugaucaacaccgcaaccuuuccuuuuucccccagugauucugaaaaaccccucuucccuucagcuugcuuagauguuccaaauuuaguaagcuuaaggcggccuacagaagaaaaagaaaaaaaaggccacaaaaguucccucucacuuucaguaaauaaaauaaaagcagcaacagaaauaaagaaauaaaugaaauucaaaaugaaauaaauauuguguugugcagcauuaaaaaaucaauaaaaauuaaaaaugagcaagaucuaaaaaaaaaaaaaaaaaaaaaaaaaaaaaaaaaaaaaaaaaaaaaaaaaaaaaaaaaaaaaaaaugcaucccccccccccccccccccccccccccccccaaaggcucuuuucagagccaccagaauu

SEQ ID NO: 16671 - RNA, 2214 nt, Artificial Sequence
  mRNA product Design d-3 comprising derived and/or modified sequence from HRSV(Memphis-37)__AIY60640.1__F-del_DSCav1_mut4 (opt3)
gggagagggcgcuuggcuugcaaggacccugagcugcggcauugaagcacacccaacccaacucgacugaagucagccucacugaaccggaucugagaaucuucucucucugggcuugccagggcucuccgaaccuagcuagcauccucuucaauuccaacuagaaagcuuaccauggagcugcccauccucaagaccaacgccauuacaacuauacuugcugcagugacgcugugcuucgccagcucccagaauaucaccgaagaguuuuaccaaucuacauguucagcggucaguaaaggcuauuugagcgcuuuaagaacugggugguacaccuccguuauuacaaucgaacugucuaacauuaaggagaauaaaugcaacggaaccgacgccaaggugaaacuaaucaagcaggaacucgauaaguauaaaaaugcaguaacugagcugcagcuucugaugcagucgaccccugccgcugguucaggcagcgcaauauguagugggaucgccgugugcaaggucuugcaccucgagggagaagugaacaaaauuaagaaugcucugcuguccacaaacaaagccguugugucucucagcaauggcgucuccguguuaacguucaagguacuggaccuuaagaacuacaucgauaaacaauugcugccaauucuaaauaagcagucauguaguaucagcaacauagagacuguuauugaauuucagcagaaaaauaacaggcuccuggagaucacccgggaguucucugugaaugcgggugucacaacuccgguguccaccuauaugcuuacaaacucagaacuguugagccucauuaacgacaugcccaucaccaaugaucaaaagaaacugaugaguaacaaugugcagaucguccgccagcagucuuacuccauuaugugcauaaucaaggaggaaguuuuagcauaugugguacaacugccucucuacggggugauugacacgccauguuggaaacuucauacuagcccccugugcacaaccaacacuaaggagggaucgaauaucuguuugacacgaaccgaucguggcugguacugcgacaacgccggcucugucuccuuuuucccucaggcugaaacguguaaggugcagucaaauagaguguuuugcgauaccaugaacaguagaacacugccaagcgaggugaaucucugcaacauagacauuuucaaucccaaauaugauuguaagaucaugacuuccaaaaccgacgucucuagcucagugaucacaagucugggggccauuguauccugcuacggaaagacuaaauguaccgcaagcaacaagaauagggguaucauuaagacauuuucuaacggcugcgauuauguuucaaauaaagggguggacaccgucagugugggaaacacucuuuacugugucaacaagcaagagggcaaaagccuguaugugaagggugaaccuauaaucaauuucuacgacccauugguuuuuccguccgaugaguucgacgcuucuauuucgcagguuaacgagaaaaucaaucagagccucgccuuuauccggaaguccgaugaacuguuacacaacguaaaugucgggaagucaacgacaaacauuaugauaaccacuaucauuaucgugauuaucguuauacugcuacuccugaucgcggugggacuuuucuuguauugcaaagcccgcugaggacuagugaagggaacacccaaauuuaauucagccuuaagcacaauuaauuaagagugaaacguaauuguacaagcaguuggucacccaccauagggcaugaucaacaccgcaaccuuuccuuuuucccccagugauucugaaaaaccccucuucccuucagcuugcuuagauguuccaaauuuaguaagcuuaaggcggccuacagaagaaaaagaaaaaaaaggccacaaaaguucccucucacuuucaguaaauaaaauaaaagcagcaacagaaauaaagaaauaaaugaaauucaaaaugaaauaaauauuguguugugcagcauuaaaaaaucaauaaaaauuaaaaaugagcaagaucuaaaaaaaaaaaaaaaaaaaaaaaaaaaaaaaaaaaaaaaaaaaaaaaaaaaaaaaaaaaaaaaaugcaucccccccccccccccccccccccccccccccaaaggcucuuuucagagccaccagaauu

SEQ ID NO: 16672 - RNA, 2214 nt, Artificial Sequence
  mRNA product Design d-3 comprising derived and/or modified sequence from HRSV(Memphis-37)__AIY60640.1__F-del_DSCav1_mut4 (opt4)
gggagagggcgcuuggcuugcaaggacccugagcugcggcauugaagcacacccaacccaacucgacugaagucagccucacugaaccggaucugagaaucuucucucucugggcuugccagggcucuccgaaccuagcuagcauccucuucaauuccaacuagaaagcuuaccauggagcugcccauccugaagaccaacgccaucaccaccauccuggccgccgugacccugugcuucgccagcagccagaacaucaccgaggaguucuaccagagcaccugcagcgccgugagcaagggcuaccugagcgcccugagaaccggcugguacaccagcgugaucaccaucgagcugagcaacaucaaggagaacaagugcaacggcaccgacgccaaggugaagcugaucaagcaggagcuggacaaguacaagaacgccgugaccgagcugcagcugcugaugcagagcacccccgccgccggcagcggcagcgccaucugcagcggcaucgccgugugcaaggugcugcaccuggagggcgaggugaacaagaucaagaacgcccugcugagcaccaacaaggccguggugagccugagcaacggcgugagcgugcugaccuucaaggugcuggaccugaagaacuacaucgacaagcagcugcugcccauccugaacaagcagagcugcagcaucagcaacaucgagaccgugaucgaguuccagcagaagaacaacagacugcuggagaucaccagagaguucagcgugaacgccggcgugaccacccccgugagcaccuacaugcugaccaacagcgagcugcugagccugaucaacgacaugcccaucaccaacgaccagaagaagcugaugagcaacaacgugcagaucgugagacagcagagcuacagcaucaugugcaucaucaaggaggaggugcuggccuacguggugcagcugccccuguacggcgugaucgacacccccugcuggaagcugcacaccagcccccugugcaccaccaacaccaaggagggcagcaacaucugccugaccagaaccgacagaggcugguacugcgacaacgccggcagcgugagcuucuucccccaggccgagaccugcaaggugcagagcaacagaguguucugcgacaccaugaacagcagaacccugcccagcgaggugaaccugugcaacaucgacaucuucaaccccaaguacgacugcaagaucaugaccagcaagaccgacgugagcagcagcgugaucaccagccugggcgccaucgugagcugcuacggcaagaccaagugcaccgccagcaacaagaacagaggcaucaucaagaccuucagcaacggcugcgacuacgugagcaacaagggcguggacaccgugagcgugggcaacacccuguacugcgugaacaagcaggagggcaagagccuguacgugaagggcgagcccaucaucaacuucuacgacccccugguguuccccagcgacgaguucgacgccagcaucagccaggugaacgagaagaucaaccagagccuggccuucaucagaaagagcgacgagcugcugcacaacgugaacgugggcaagagcaccaccaacaucaugaucaccaccaucaucaucgugaucaucgugauccugcugcugcugaucgccgugggccuguuccuguacugcaaggccagaugaggacuagugaagggaacacccaaauuuaauucagccuuaagcacaauuaauuaagagugaaacguaauuguacaagcaguuggucacccaccauagggcaugaucaacaccgcaaccuuuccuuuuucccccagugauucugaaaaaccccucuucccuucagcuugcuuagauguuccaaauuuaguaagcuuaaggcggccuacagaagaaaaagaaaaaaaaggccacaaaaguucccucucacuuucaguaaauaaaauaaaagcagcaacagaaauaaagaaauaaaugaaauucaaaaugaaauaaauauuguguugugcagcauuaaaaaaucaauaaaaauuaaaaaugagcaagaucuaaaaaaaaaaaaaaaaaaaaaaaaaaaaaaaaaaaaaaaaaaaaaaaaaaaaaaaaaaaaaaaaugcaucccccccccccccccccccccccccccccccaaaggcucuuuucagagccaccagaauu

SEQ ID NO: 16673 - RNA, 2214 nt, Artificial Sequence
  mRNA product Design d-3 comprising derived and/or modified sequence from HRSV(Memphis-37)__AIY60640.1__F-del_DSCav1_mut4 (opt5)
gggagagggcgcuuggcuugcaaggacccugagcugcggcauugaagcacacccaacccaacucgacugaagucagccucacugaaccggaucugagaaucuucucucucugggcuugccagggcucuccgaaccuagcuagcauccucuucaauuccaacuagaaagcuuaccauggagcugcccauccucaagaccaacgccauuacaacgauccuggcugccgugacccuuugcuucgcgagcucccagaauauuacagaagaguuuuaccaaucuaccuguagcgcugucuccaaaggcuaucugucugcccucagaacagggugguacaccagcguuaucacaauugaacuguccaacaucaaggagaauaaaugcaacggaaccgacgccaaggugaaacuuaucaagcaggaacuggauaaguauaaaaaugcugugacggagcuccagcugcugaugcagucuaccccugccgcuggcagcggguccgccauuuguagcggaaucgcggucugcaaggugcuccaccuggagggcgaaguuaacaaaauuaagaaugcccuucugucuacaaacaaagcuguggucucccucagcaauggggugucuguucugaccuucaaggugcuugaccugaagaacuacaucgauaaacaacuccugccgauucugaauaagcaguccuguagcaucucuaacauugagacagucaucgaauuucagcagaaaaauaaccggcuccuggagaucacccgcgaguucuccgugaaugccggagugacgacacccgucagcaccuauaugcuuacaaacuccgaacugcucucucugauuaacgacaugccuaucaccaaugaucaaaagaaacuuaugagcaacaauguucagauugugagacagcaguccuacagcaucaugugcauuaucaaggaggaagugcuggcuuaugucgugcaacucccccuguacggcguuaucgacaccccuuguuggaaacugcauacaucuccccucugcacgaccaacacaaaggagggcuccaauauuugucugacccggacagaucgcgggugguacugcgacaacgccggaagcgugagcuuuuucccucaggcggaaaccuguaagguccagucuaauagaguguuuugcgauacgaugaacuccagaacacugccgucugagguuaaucucugcaacaucgacauuuucaaucccaaauaugauuguaagaucaugaccagcaaaaccgacguguccagcucugucauuacaucccugggcgccaucgugagcugcuacgggaagaccaaauguacagcuucuaacaagaaucggggaaucauuaagacguuuuccaacggcugcgauuaugucagcaauaaagggguggacaccguuuccgugggaaacacacuuuacugugucaacaagcaagagggcaaaucucuguaugugaagggcgaaccuaucauuaauuucuacgacccccucguuuuuccuagcgaugaguucgacgccuccaucucucaggugaacgaaaagauuaaucagagccuggcuuuuauccgcaaguccgaugagcugcuccacaacgucaauguggggaaaagcaccacaaacauuaugaucaccacgaucauuaucgugauuaucguuauucugcuucugcucaucgccgucggacuguuccuguauugcaaagccagaugaggacuagugaagggaacacccaaauuuaauucagccuuaagcacaauuaauuaagagugaaacguaauuguacaagcaguuggucacccaccauagggcaugaucaacaccgcaaccuuuccuuuuucccccagugauucugaaaaaccccucuucccuucagcuugcuuagauguuccaaauuuaguaagcuuaaggcggccuacagaagaaaaagaaaaaaaaggccacaaaaguucccucucacuuucaguaaauaaaauaaaagcagcaacagaaauaaagaaauaaaugaaauucaaaaugaaauaaauauuguguugugcagcauuaaaaaaucaauaaaaauuaaaaaugagcaagaucuaaaaaaaaaaaaaaaaaaaaaaaaaaaaaaaaaaaaaaaaaaaaaaaaaaaaaaaaaaaaaaaaugcaucccccccccccccccccccccccccccccccaaaggcucuuuucagagccaccagaauu

SEQ ID NO: 16674 - RNA, 2214 nt, Artificial Sequence
  mRNA product Design d-3 comprising derived and/or modified sequence from HRSV(Memphis-37)__AIY60640.1__F-del_DSCav1_mut4 (opt6)
gggagagggcgcuuggcuugcaaggacccugagcugcggcauugaagcacacccaacccaacucgacugaagucagccucacugaaccggaucugagaaucuucucucucugggcuugccagggcucuccgaaccuagcuagcauccucuucaauuccaacuagaaagcuuaccauggaacuaccaauacucaaaacaaacgcaauaacaacuauacuagccgcaguuacacucugcuucgcuucaucacaaaauaucacagaagaauuuuaccaaucuacauguucagcuguauccaaagguuaccuuucagcacuacgaacaggaugguauaccucaguaaucaccaucgaacucucgaacauaaaagaaaacaaauguaacggaaccgaugcuaaagucaagcucauaaaacaagaacuagacaaauacaaaaacgcaguaaccgaacuacaacuacuuaugcaaucaacaccagcugcaggcucaggcucagcaaucugcucaggcauagcuguaugcaaaguacuacaucuagaaggagaaguaaacaaaauaaaaaacgcauuauuaucaacaaauaaagcaguaguaucacuaucaaauggaguaucaguacucacauucaaaguacuagaucuaaaaaacuacauugacaaacaauuacuaccaauccucaacaaacaaucaugcucaauauccaacauagaaacaguaauagaauuucaacaaaaaaacaaucgacuacuagaaauaacaagagaauuuucagucaaugccggaguuacaacacccguaagcacuuacaugcuaaccaacucagaacuacuaucacuaauaaacgacaugccaauuacaaacgaccaaaaaaaacuaaugucaaauaacguacaaauaguacgucaacaaucauacucaauaaugugcauaauaaaagaagaaguccuagcauacguaguacaauuacccuuauauggcguaauagacacaccaugcuggaaacuacacacauccccacucugcaccaccaacaccaaagaaggcuccaacauaugucuaacccgaaccgacagagguugguauugugauaacgcuggcuccguaucauucuucccacaagcagaaacauguaaaguacaaucaaacagaguauucugcgauacaaugaauagcagaacacuaccaucagaaguaaacuuaugcaacaucgacaucuucaaucccaaauacgacugcaaaauaaugacauccaaaacugacguuucuucaagcguaauaacaucuuuaggagcaauaguauccugcuacggaaaaacuaaaugcacagcauccaauaaaaaccguggaauaauaaaaacauucucaaauggcugcgacuacgucucaaacaaaggcguagacaccguuagugucggaaacacacuauauugcguaaauaaacaagaaggaaaauccuuauacguaaaaggcgaaccaauaauuaacuucuaugacccccucguauuuccauccgaugaauuugacgcaucaaucucgcaaguaaacgaaaaaauaaaccaaagccuagcauucauaagaaaauccgacgaacuacuccacaauguaaauguaggaaaaucaacuaccaacauaaugauuacuacuauaauaauaguaauuauagucaucuuacuacuauuaauagcagucggauuauuccuauacugcaaagcaagauagggacuagugaagggaacacccaaauuuaauucagccuuaagcacaauuaauuaagagugaaacguaauuguacaagcaguuggucacccaccauagggcaugaucaacaccgcaaccuuuccuuuuucccccagugauucugaaaaaccccucuucccuucagcuugcuuagauguuccaaauuuaguaagcuuaaggcggccuacagaagaaaaagaaaaaaaaggccacaaaaguucccucucacuuucaguaaauaaaauaaaagcagcaacagaaauaaagaaauaaaugaaauucaaaaugaaauaaauauuguguugugcagcauuaaaaaaucaauaaaaauuaaaaaugagcaagaucuaaaaaaaaaaaaaaaaaaaaaaaaaaaaaaaaaaaaaaaaaaaaaaaaaaaaaaaaaaaaaaaaugcaucccccccccccccccccccccccccccccccaaaggcucuuuucagagccaccagaauu

SEQ ID NO: 16675 - RNA, 2214 nt, Artificial Sequence
  mRNA product Design d-3 comprising derived and/or modified sequence from HRSV(Memphis-37)__AIY60640.1__F-del_DSCav1_mut4 (opt11)
gggagagggcgcuuggcuugcaaggacccugagcugcggcauugaagcacacccaacccaacucgacugaagucagccucacugaaccggaucugagaaucuucucucucugggcuugccagggcucuccgaaccuagcuagcauccucuucaauuccaacuagaaagcuuaccauggagcuccccauccuaaaaaccaacgccaucaccaccauccucgccgccgucacccuaugcuucgcuucaucacaaaacaucaccgaagaauuuuaccaaucuaccugcuccgccgucuccaaaggauaucucagcgcccuacggaccggcugguacaccuccgucauaaccaucgaacucaguaacaucaaagaaaacaaaugcaacggcaccgacgccaaagucaaacuaaucaaacaagaacuagauaaauacaaaaacgcggucaccgaacuacaacuccuaaugcaaagcacccccgccgccggauccggcuccgccauaugcuccggcauugcugucugcaaaguacuacaccucgagggcgaggucaacaaaaucaaaaacgcacuacucagcacuaauaaagccguaguaucccuaucaaacggugucucagucuuaacauucaaaguacucgaccuaaagaacuacaucgacaaacaacuccuacccauccucaacaagcaguccuguucuaucucaaacaucgaaaccgucaucgaauuucaacaaaagaacaaccgccuccucgaaaucacacgcgaguucuccgucaacgcaggaguaaccacccccgucuccaccuacaugcucacaaacucggaacuccucucacuaaucaacgacaugcccaucaccaacgaccaaaagaaacucaugagcaacaacguucaaaucguccgccaacaaucauacuccaucaugugcauaaucaaagaagaaguccuagcuuacgucguccagcugccccucuacggagucaucgacacgcccugcuggaaacuacacacaagcccccucugcaccaccaacaccaaagaaggcuccaacauaugccucacacggaccgaccgcgguugguacugcgacaacgccggcuccgucuccuucuucccccaagcagaaacuugcaaaguccaauccaaccgcguauucugcgacacaaugaacagcagaacacucccuagcgaagucaaccucugcaacaucgacauauucaaccccaaauacgacugcaaaaucaugacgucaaaaaccgacgucuccagcuccguuaucaccucacucggcgccaucgucagcugcuacggcaaaacuaaaugcaccgccuccaacaaaaaccgcggcaucauuaaaaccuucagcaacggcugcgacuacgucuccaacaaaggugucgauacgguauccgucggaaacacccuauacugcgucaacaaacaagaaggcaaaucucucuacgucaaaggcgaacccauaaucaauuucuacgacccccuagucuuccccuccgaugaauuugacgccuccaucagccaagucaacgagaaaaucaaccaaucacuagccuucauccggaaauccgacgaacuccuacacaacguaaacgucggcaaauccaccaccaauauaaugaucacaaccaucaucaucguaaucaucgucauccuccuccuacucaucgccgucggauuauucuuauacugcaaagcccgcuaaggacuagugaagggaacacccaaauuuaauucagccuuaagcacaauuaauuaagagugaaacguaauuguacaagcaguuggucacccaccauagggcaugaucaacaccgcaaccuuuccuuuuucccccagugauucugaaaaaccccucuucccuucagcuugcuuagauguuccaaauuuaguaagcuuaaggcggccuacagaagaaaaagaaaaaaaaggccacaaaaguucccucucacuuucaguaaauaaaauaaaagcagcaacagaaauaaagaaauaaaugaaauucaaaaugaaauaaauauuguguugugcagcauuaaaaaaucaauaaaaauuaaaaaugagcaagaucuaaaaaaaaaaaaaaaaaaaaaaaaaaaaaaaaaaaaaaaaaaaaaaaaaaaaaaaaaaaaaaaaugcaucccccccccccccccccccccccccccccccaaaggcucuuuucagagccaccagaauu

SEQ ID NO: 16676 - RNA, 1897 nt, Artificial Sequence
  mRNA product Design d-4 comprising derived and/or modified sequence from HRSV(Memphis-37)__AIY60640.1__F-del_DSCav1_mut4 (opt1)
gggagagucccgcagucggcguccagcggcucugcuuguucgugugugugucguugcaggccuuauucaagcuuaccauggagcugcccauccucaagaccaacgccaucaccacgauccuggccgcggugacccugugcuucgccagcucccagaacaucaccgaggaguucuaccagagcacgugcuccgccgucagcaagggcuaccucuccgcccugcgcaccgggugguacaccagcgugaucaccaucgagcuguccaacaucaaggagaacaagugcaacggcaccgacgccaaggugaagcucaucaagcaggagcuggacaaguacaagaacgcggucacggagcugcagcuccugaugcagagcaccccggccgccggcuccgggagcgcgaucugcuccggcaucgccgucugcaaggugcugcaccucgagggcgaggugaacaagaucaagaacgcccugcuguccaccaacaaggccgucgugagccucuccaacggggugagcguccugaccuucaaggugcuggaccucaagaacuacaucgacaagcagcugcugcccauccugaacaagcagagcugcuccaucagcaacaucgagaccgucaucgaguuccagcagaagaacaaccgccuccuggagaucacgcgggaguucagcgugaacgcgggcgugaccacccccgucuccaccuacaugcugacgaacagcgagcuccugucccugaucaacgacaugccgaucaccaacgaccagaagaagcucaugagcaacaacgugcagaucgugcgccagcaguccuacagcaucaugugcaucaucaaggaggagguccuggccuacguggugcagcugccccucuacggggucaucgacacccccugcuggaagcugcacaccagcccccugugcacgaccaacaccaaggagggcuccaacaucugccucacccggacggaccgcgggugguacugcgacaacgccggcagcguguccuucuucccgcaggccgagaccugcaagguccagagcaaccggguguucugcgacaccaugaacucccggacccugcccagcgaggugaaccucugcaacaucgacaucuucaaccccaaguacgacugcaagaucaugacguccaagaccgacgucagcuccagcgugaucaccucccugggcgccaucgugagcugcuacgggaagaccaagugcacggcgagcaacaagaaccgcggcaucaucaagaccuucuccaacgggugcgacuacgucagcaacaagggcguggacaccguguccgucggcaacacccuguacugcgugaacaagcaggagggcaagagccucuacgugaagggggagcccaucaucaacuucuacgacccgcuggucuuccccuccgacgaguucgacgccagcaucucccaggugaacgagaagaucaaccagagccuggccuucauccggaaguccgacgagcuccugcacaacgugaacgucggcaagagcaccacgaacaucaugaucaccaccaucaucaucgugaucaucgugauccugcugcuccugaucgccgucgggcuguuccucuacugcaaggcccgcugaggacuaguggaagcauuuuccuggcugauuaaaagaaauuacucagcuauggucaucuguuccuguuagaaggcuaugcagcauauuauauacuaugcgcauguuaugaaaugcauaauaaaaaauuuuaaaaaaucuaaaagaucuaaaaaaaaaaaaaaaaaaaaaaaaaaaaaaaaaaaaaaaaaaaaaaaaaaaaaaaaaaaaaaaaugcaucccccccccccccccccccccccccccccccaaaggcucuuuucagagccaccagaauu

SEQ ID NO: 16677 - RNA, 1897 nt, Artificial Sequence
  mRNA product Design d-4 comprising derived and/or modified sequence from HRSV(Memphis-37)__AIY60640.1__F-del_DSCav1_mut4 (opt1)
gggagagucccgcagucggcguccagcggcucugcuuguucgugugugugucguugcaggccuuauucaagcuuaccauggagcugcccauccucaagaccaacgccaucaccacgauccuggccgcggugacccugugcuucgccagcucccagaacaucaccgaggaguucuaccagagcacgugcuccgccgucagcaagggcuaccucuccgcccugcgcaccgggugguacaccagcgugaucaccaucgagcuguccaacaucaaggagaacaagugcaacggcaccgacgccaaggugaagcucaucaagcaggagcuggacaaguacaagaacgcggucacggagcugcagcuccugaugcagagcaccccggccgccggguccggcagcgccaucugcuccgggaucgcggugugcaaggugcugcaccucgagggcgaggucaacaagaucaagaacgcccugcugagcaccaacaaggccguggugucccucagcaacggcgucuccgugcugaccuucaaggugcuggaccucaagaacuacaucgacaagcagcugcugcccauccucaacaagcagagcugcuccaucagcaacaucgagacggucaucgaguuccagcagaagaacaaccggcugcuggagaucacccgcgaguucuccgugaacgccggggugaccacccccgucagcacguacaugcucaccaacagcgagcugcugucccucaucaacgacaugcccaucaccaacgaccagaagaagcugaugagcaacaacgugcagaucgugcggcagcaguccuacagcaucaugugcaucaucaaggaggagguccuggccuacguggugcagcucccgcuguacggcgucaucgacacccccugcuggaagcugcacacgagcccccucugcaccaccaacaccaaggagggguccaacaucugccugacgcgcaccgaccggggcugguacugcgacaacgcgggguccgugagcuucuucccccaggccgagaccugcaaggugcaguccaaccgcgucuucugcgacaccaugaacagccggacgcucccguccgaggugaaccugugcaacaucgacaucuucaaccccaaguacgacugcaagaucaugaccagcaagaccgacgucuccagcuccgugaucaccagccugggcgccaucguguccugcuacggcaagacgaagugcaccgccagcaacaagaaccgggggaucaucaagaccuucuccaacggcugcgacuacgucagcaacaaggggguggacaccgugagcgucggcaacacgcucuacugcgugaacaagcaggagggcaagucccuguacgugaagggggagcccaucaucaacuucuacgacccccuggucuucccgagcgacgaguucgacgccuccaucagccaggugaacgagaagaucaaccagucccucgcguucauccgcaagagcgacgagcugcugcacaacgugaacgucggcaaguccaccaccaacaucaugaucaccaccaucaucaucgugaucaucgugauccuccugcugcucaucgccgucgggcuguuccuguacugcaaggcccggugaggacuaguggaagcauuuuccuggcugauuaaaagaaauuacucagcuauggucaucuguuccuguuagaaggcuaugcagcauauuauauacuaugcgcauguuaugaaaugcauaauaaaaaauuuuaaaaaaucuaaaagaucuaaaaaaaaaaaaaaaaaaaaaaaaaaaaaaaaaaaaaaaaaaaaaaaaaaaaaaaaaaaaaaaaugcaucccccccccccccccccccccccccccccccaaaggcucuuuucagagccaccagaauu

SEQ ID NO: 16678 - RNA, 1897 nt, Artificial Sequence
  mRNA product Design d-4 comprising derived and/or modified sequence from HRSV(Memphis-37)__AIY60640.1__F-del_DSCav1_mut4 (opt2)
gggagagucccgcagucggcguccagcggcucugcuuguucgugugugugucguugcaggccuuauucaagcuuaccauggagcuccccauccucaagaccaacgccaucaccaccauccucgccgccgucacccucugcuucgccuccucccagaacaucaccgaggaguucuaccaguccaccugcuccgccgucuccaagggcuaccucuccgcccuccgcaccggcugguacaccuccgucaucaccaucgagcucuccaacaucaaggagaacaagugcaacggcaccgacgccaaggucaagcucaucaagcaggagcucgacaaguacaagaacgccgucaccgagcuccagcuccucaugcaguccacccccgccgccggcuccggcuccgccaucugcuccggcaucgccgucugcaagguccuccaccucgagggcgaggucaacaagaucaagaacgcccuccucuccaccaacaaggccgucgucucccucuccaacggcgucuccguccucaccuucaagguccucgaccucaagaacuacaucgacaagcagcuccuccccauccucaacaagcaguccugcuccaucuccaacaucgagaccgucaucgaguuccagcagaagaacaaccgccuccucgagaucacccgcgaguucuccgucaacgccggcgucaccacccccgucuccaccuacaugcucaccaacuccgagcuccucucccucaucaacgacaugcccaucaccaacgaccagaagaagcucauguccaacaacguccagaucguccgccagcaguccuacuccaucaugugcaucaucaaggaggagguccucgccuacgucguccagcucccccucuacggcgucaucgacacccccugcuggaagcuccacaccuccccccucugcaccaccaacaccaaggagggcuccaacaucugccucacccgcaccgaccgcggcugguacugcgacaacgccggcuccgucuccuucuucccccaggccgagaccugcaagguccaguccaaccgcgucuucugcgacaccaugaacucccgcacccuccccuccgaggucaaccucugcaacaucgacaucuucaaccccaaguacgacugcaagaucaugaccuccaagaccgacgucuccuccuccgucaucaccucccucggcgccaucgucuccugcuacggcaagaccaagugcaccgccuccaacaagaaccgcggcaucaucaagaccuucuccaacggcugcgacuacgucuccaacaagggcgucgacaccgucuccgucggcaacacccucuacugcgucaacaagcaggagggcaagucccucuacgucaagggcgagcccaucaucaacuucuacgacccccucgucuuccccuccgacgaguucgacgccuccaucucccaggucaacgagaagaucaaccagucccucgccuucauccgcaaguccgacgagcuccuccacaacgucaacgucggcaaguccaccaccaacaucaugaucaccaccaucaucaucgucaucaucgucauccuccuccuccucaucgccgucggccucuuccucuacugcaaggcccgcugaggacuaguggaagcauuuuccuggcugauuaaaagaaauuacucagcuauggucaucuguuccuguuagaaggcuaugcagcauauuauauacuaugcgcauguuaugaaaugcauaauaaaaaauuuuaaaaaaucuaaaagaucuaaaaaaaaaaaaaaaaaaaaaaaaaaaaaaaaaaaaaaaaaaaaaaaaaaaaaaaaaaaaaaaaugcaucccccccccccccccccccccccccccccccaaaggcucuuuucagagccaccagaauu

SEQ ID NO: 16679 - RNA, 1897 nt, Artificial Sequence
  mRNA product Design d-4 comprising derived and/or modified sequence from HRSV(Memphis-37)__AIY60640.1__F-del_DSCav1_mut4 (opt3)
gggagagucccgcagucggcguccagcggcucugcuuguucgugugugugucguugcaggccuuauucaagcuuaccauggagcugcccauccucaagaccaacgccauuacaacuauacuugcugcagugacgcugugcuucgccagcucccagaauaucaccgaagaguuuuaccaaucuacauguucagcggucaguaaaggcuauuugagcgcuuuaagaacugggugguacaccuccguuauuacaaucgaacugucuaacauuaaggagaauaaaugcaacggaaccgacgccaaggugaaacuaaucaagcaggaacucgauaaguauaaaaaugcaguaacugagcugcagcuucugaugcagucgaccccugccgcugguucaggcagcgcaauauguagugggaucgccgugugcaaggucuugcaccucgagggagaagugaacaaaauuaagaaugcucugcuguccacaaacaaagccguugugucucucagcaauggcgucuccguguuaacguucaagguacuggaccuuaagaacuacaucgauaaacaauugcugccaauucuaaauaagcagucauguaguaucagcaacauagagacuguuauugaauuucagcagaaaaauaacaggcuccuggagaucacccgggaguucucugugaaugcgggugucacaacuccgguguccaccuauaugcuuacaaacucagaacuguugagccucauuaacgacaugcccaucaccaaugaucaaaagaaacugaugaguaacaaugugcagaucguccgccagcagucuuacuccauuaugugcauaaucaaggaggaaguuuuagcauaugugguacaacugccucucuacggggugauugacacgccauguuggaaacuucauacuagcccccugugcacaaccaacacuaaggagggaucgaauaucuguuugacacgaaccgaucguggcugguacugcgacaacgccggcucugucuccuuuuucccucaggcugaaacguguaaggugcagucaaauagaguguuuugcgauaccaugaacaguagaacacugccaagcgaggugaaucucugcaacauagacauuuucaaucccaaauaugauuguaagaucaugacuuccaaaaccgacgucucuagcucagugaucacaagucugggggccauuguauccugcuacggaaagacuaaauguaccgcaagcaacaagaauagggguaucauuaagacauuuucuaacggcugcgauuauguuucaaauaaagggguggacaccgucagugugggaaacacucuuuacugugucaacaagcaagagggcaaaagccuguaugugaagggugaaccuauaaucaauuucuacgacccauugguuuuuccguccgaugaguucgacgcuucuauuucgcagguuaacgagaaaaucaaucagagccucgccuuuauccggaaguccgaugaacuguuacacaacguaaaugucgggaagucaacgacaaacauuaugauaaccacuaucauuaucgugauuaucguuauacugcuacuccugaucgcggugggacuuuucuuguauugcaaagcccgcugaggacuaguggaagcauuuuccuggcugauuaaaagaaauuacucagcuauggucaucuguuccuguuagaaggcuaugcagcauauuauauacuaugcgcauguuaugaaaugcauaauaaaaaauuuuaaaaaaucuaaaagaucuaaaaaaaaaaaaaaaaaaaaaaaaaaaaaaaaaaaaaaaaaaaaaaaaaaaaaaaaaaaaaaaaugcaucccccccccccccccccccccccccccccccaaaggcucuuuucagagccaccagaauu

SEQ ID NO: 16680 - RNA, 1897 nt, Artificial Sequence
  mRNA product Design d-4 comprising derived and/or modified sequence from HRSV(Memphis-37)__AIY60640.1__F-del_DSCav1_mut4 (opt4)
gggagagucccgcagucggcguccagcggcucugcuuguucgugugugugucguugcaggccuuauucaagcuuaccauggagcugcccauccugaagaccaacgccaucaccaccauccuggccgccgugacccugugcuucgccagcagccagaacaucaccgaggaguucuaccagagcaccugcagcgccgugagcaagggcuaccugagcgcccugagaaccggcugguacaccagcgugaucaccaucgagcugagcaacaucaaggagaacaagugcaacggcaccgacgccaaggugaagcugaucaagcaggagcuggacaaguacaagaacgccgugaccgagcugcagcugcugaugcagagcacccccgccgccggcagcggcagcgccaucugcagcggcaucgccgugugcaaggugcugcaccuggagggcgaggugaacaagaucaagaacgcccugcugagcaccaacaaggccguggugagccugagcaacggcgugagcgugcugaccuucaaggugcuggaccugaagaacuacaucgacaagcagcugcugcccauccugaacaagcagagcugcagcaucagcaacaucgagaccgugaucgaguuccagcagaagaacaacagacugcuggagaucaccagagaguucagcgugaacgccggcgugaccacccccgugagcaccuacaugcugaccaacagcgagcugcugagccugaucaacgacaugcccaucaccaacgaccagaagaagcugaugagcaacaacgugcagaucgugagacagcagagcuacagcaucaugugcaucaucaaggaggaggugcuggccuacguggugcagcugccccuguacggcgugaucgacacccccugcuggaagcugcacaccagcccccugugcaccaccaacaccaaggagggcagcaacaucugccugaccagaaccgacagaggcugguacugcgacaacgccggcagcgugagcuucuucccccaggccgagaccugcaaggugcagagcaacagaguguucugcgacaccaugaacagcagaacccugcccagcgaggugaaccugugcaacaucgacaucuucaaccccaaguacgacugcaagaucaugaccagcaagaccgacgugagcagcagcgugaucaccagccugggcgccaucgugagcugcuacggcaagaccaagugcaccgccagcaacaagaacagaggcaucaucaagaccuucagcaacggcugcgacuacgugagcaacaagggcguggacaccgugagcgugggcaacacccuguacugcgugaacaagcaggagggcaagagccuguacgugaagggcgagcccaucaucaacuucuacgacccccugguguuccccagcgacgaguucgacgccagcaucagccaggugaacgagaagaucaaccagagccuggccuucaucagaaagagcgacgagcugcugcacaacgugaacgugggcaagagcaccaccaacaucaugaucaccaccaucaucaucgugaucaucgugauccugcugcugcugaucgccgugggccuguuccuguacugcaaggccagaugaggacuaguggaagcauuuuccuggcugauuaaaagaaauuacucagcuauggucaucuguuccuguuagaaggcuaugcagcauauuauauacuaugcgcauguuaugaaaugcauaauaaaaaauuuuaaaaaaucuaaaagaucuaaaaaaaaaaaaaaaaaaaaaaaaaaaaaaaaaaaaaaaaaaaaaaaaaaaaaaaaaaaaaaaaugcaucccccccccccccccccccccccccccccccaaaggcucuuuucagagccaccagaauu

SEQ ID NO: 16681 - RNA, 1897 nt, Artificial Sequence
  mRNA product Design d-4 comprising derived and/or modified sequence from HRSV(Memphis-37)__AIY60640.1__F-del_DSCav1_mut4 (opt5)
gggagagucccgcagucggcguccagcggcucugcuuguucgugugugugucguugcaggccuuauucaagcuuaccauggagcugcccauccucaagaccaacgccauuacaacgauccuggcugccgugacccuuugcuucgcgagcucccagaauauuacagaagaguuuuaccaaucuaccuguagcgcugucuccaaaggcuaucugucugcccucagaacagggugguacaccagcguuaucacaauugaacuguccaacaucaaggagaauaaaugcaacggaaccgacgccaaggugaaacuuaucaagcaggaacuggauaaguauaaaaaugcugugacggagcuccagcugcugaugcagucuaccccugccgcuggcagcggguccgccauuuguagcggaaucgcggucugcaaggugcuccaccuggagggcgaaguuaacaaaauuaagaaugcccuucugucuacaaacaaagcuguggucucccucagcaauggggugucuguucugaccuucaaggugcuugaccugaagaacuacaucgauaaacaacuccugccgauucugaauaagcaguccuguagcaucucuaacauugagacagucaucgaauuucagcagaaaaauaaccggcuccuggagaucacccgcgaguucuccgugaaugccggagugacgacacccgucagcaccuauaugcuuacaaacuccgaacugcucucucugauuaacgacaugccuaucaccaaugaucaaaagaaacuuaugagcaacaauguucagauugugagacagcaguccuacagcaucaugugcauuaucaaggaggaagugcuggcuuaugucgugcaacucccccuguacggcguuaucgacaccccuuguuggaaacugcauacaucuccccucugcacgaccaacacaaaggagggcuccaauauuugucugacccggacagaucgcgggugguacugcgacaacgccggaagcgugagcuuuuucccucaggcggaaaccuguaagguccagucuaauagaguguuuugcgauacgaugaacuccagaacacugccgucugagguuaaucucugcaacaucgacauuuucaaucccaaauaugauuguaagaucaugaccagcaaaaccgacguguccagcucugucauuacaucccugggcgccaucgugagcugcuacgggaagaccaaauguacagcuucuaacaagaaucggggaaucauuaagacguuuuccaacggcugcgauuaugucagcaauaaagggguggacaccguuuccgugggaaacacacuuuacugugucaacaagcaagagggcaaaucucuguaugugaagggcgaaccuaucauuaauuucuacgacccccucguuuuuccuagcgaugaguucgacgccuccaucucucaggugaacgaaaagauuaaucagagccuggcuuuuauccgcaaguccgaugagcugcuccacaacgucaauguggggaaaagcaccacaaacauuaugaucaccacgaucauuaucgugauuaucguuauucugcuucugcucaucgccgucggacuguuccuguauugcaaagccagaugaggacuaguggaagcauuuuccuggcugauuaaaagaaauuacucagcuauggucaucuguuccuguuagaaggcuaugcagcauauuauauacuaugcgcauguuaugaaaugcauaauaaaaaauuuuaaaaaaucuaaaagaucuaaaaaaaaaaaaaaaaaaaaaaaaaaaaaaaaaaaaaaaaaaaaaaaaaaaaaaaaaaaaaaaaugcaucccccccccccccccccccccccccccccccaaaggcucuuuucagagccaccagaauu

SEQ ID NO: 16682 - RNA, 1897 nt, Artificial Sequence
  mRNA product Design d-4 comprising derived and/or modified sequence from HRSV(Memphis-37)__AIY60640.1__F-del_DSCav1_mut4 (opt6)
gggagagucccgcagucggcguccagcggcucugcuuguucgugugugugucguugcaggccuuauucaagcuuaccauggaacuaccaauacucaaaacaaacgcaauaacaacuauacuagccgcaguuacacucugcuucgcuucaucacaaaauaucacagaagaauuuuaccaaucuacauguucagcuguauccaaagguuaccuuucagcacuacgaacaggaugguauaccucaguaaucaccaucgaacucucgaacauaaaagaaaacaaauguaacggaaccgaugcuaaagucaagcucauaaaacaagaacuagacaaauacaaaaacgcaguaaccgaacuacaacuacuuaugcaaucaacaccagcugcaggcucaggcucagcaaucugcucaggcauagcuguaugcaaaguacuacaucuagaaggagaaguaaacaaaauaaaaaacgcauuauuaucaacaaauaaagcaguaguaucacuaucaaauggaguaucaguacucacauucaaaguacuagaucuaaaaaacuacauugacaaacaauuacuaccaauccucaacaaacaaucaugcucaauauccaacauagaaacaguaauagaauuucaacaaaaaaacaaucgacuacuagaaauaacaagagaauuuucagucaaugccggaguuacaacacccguaagcacuuacaugcuaaccaacucagaacuacuaucacuaauaaacgacaugccaauuacaaacgaccaaaaaaaacuaaugucaaauaacguacaaauaguacgucaacaaucauacucaauaaugugcauaauaaaagaagaaguccuagcauacguaguacaauuacccuuauauggcguaauagacacaccaugcuggaaacuacacacauccccacucugcaccaccaacaccaaagaaggcuccaacauaugucuaacccgaaccgacagagguugguauugugauaacgcuggcuccguaucauucuucccacaagcagaaacauguaaaguacaaucaaacagaguauucugcgauacaaugaauagcagaacacuaccaucagaaguaaacuuaugcaacaucgacaucuucaaucccaaauacgacugcaaaauaaugacauccaaaacugacguuucuucaagcguaauaacaucuuuaggagcaauaguauccugcuacggaaaaacuaaaugcacagcauccaauaaaaaccguggaauaauaaaaacauucucaaauggcugcgacuacgucucaaacaaaggcguagacaccguuagugucggaaacacacuauauugcguaaauaaacaagaaggaaaauccuuauacguaaaaggcgaaccaauaauuaacuucuaugacccccucguauuuccauccgaugaauuugacgcaucaaucucgcaaguaaacgaaaaaauaaaccaaagccuagcauucauaagaaaauccgacgaacuacuccacaauguaaauguaggaaaaucaacuaccaacauaaugauuacuacuauaauaauaguaauuauagucaucuuacuacuauuaauagcagucggauuauuccuauacugcaaagcaagauagggacuaguggaagcauuuuccuggcugauuaaaagaaauuacucagcuauggucaucuguuccuguuagaaggcuaugcagcauauuauauacuaugcgcauguuaugaaaugcauaauaaaaaauuuuaaaaaaucuaaaagaucuaaaaaaaaaaaaaaaaaaaaaaaaaaaaaaaaaaaaaaaaaaaaaaaaaaaaaaaaaaaaaaaaugcaucccccccccccccccccccccccccccccccaaaggcucuuuucagagccaccagaauu

SEQ ID NO: 16683 - RNA, 1897 nt, Artificial Sequence
  mRNA product Design d-4 comprising derived and/or modified sequence from HRSV(Memphis-37)__AIY60640.1__F-del_DSCav1_mut4 (opt11)
gggagagucccgcagucggcguccagcggcucugcuuguucgugugugugucguugcaggccuuauucaagcuuaccauggagcuccccauccuaaaaaccaacgccaucaccaccauccucgccgccgucacccuaugcuucgcuucaucacaaaacaucaccgaagaauuuuaccaaucuaccugcuccgccgucuccaaaggauaucucagcgcccuacggaccggcugguacaccuccgucauaaccaucgaacucaguaacaucaaagaaaacaaaugcaacggcaccgacgccaaagucaaacuaaucaaacaagaacuagauaaauacaaaaacgcggucaccgaacuacaacuccuaaugcaaagcacccccgccgccggauccggcuccgccauaugcuccggcauugcugucugcaaaguacuacaccucgagggcgaggucaacaaaaucaaaaacgcacuacucagcacuaauaaagccguaguaucccuaucaaacggugucucagucuuaacauucaaaguacucgaccuaaagaacuacaucgacaaacaacuccuacccauccucaacaagcaguccuguucuaucucaaacaucgaaaccgucaucgaauuucaacaaaagaacaaccgccuccucgaaaucacacgcgaguucuccgucaacgcaggaguaaccacccccgucuccaccuacaugcucacaaacucggaacuccucucacuaaucaacgacaugcccaucaccaacgaccaaaagaaacucaugagcaacaacguucaaaucguccgccaacaaucauacuccaucaugugcauaaucaaagaagaaguccuagcuuacgucguccagcugccccucuacggagucaucgacacgcccugcuggaaacuacacacaagcccccucugcaccaccaacaccaaagaaggcuccaacauaugccucacacggaccgaccgcgguugguacugcgacaacgccggcuccgucuccuucuucccccaagcagaaacuugcaaaguccaauccaaccgcguauucugcgacacaaugaacagcagaacacucccuagcgaagucaaccucugcaacaucgacauauucaaccccaaauacgacugcaaaaucaugacgucaaaaaccgacgucuccagcuccguuaucaccucacucggcgccaucgucagcugcuacggcaaaacuaaaugcaccgccuccaacaaaaaccgcggcaucauuaaaaccuucagcaacggcugcgacuacgucuccaacaaaggugucgauacgguauccgucggaaacacccuauacugcgucaacaaacaagaaggcaaaucucucuacgucaaaggcgaacccauaaucaauuucuacgacccccuagucuuccccuccgaugaauuugacgccuccaucagccaagucaacgagaaaaucaaccaaucacuagccuucauccggaaauccgacgaacuccuacacaacguaaacgucggcaaauccaccaccaauauaaugaucacaaccaucaucaucguaaucaucgucauccuccuccuacucaucgccgucggauuauucuuauacugcaaagcccgcuaaggacuaguggaagcauuuuccuggcugauuaaaagaaauuacucagcuauggucaucuguuccuguuagaaggcuaugcagcauauuauauacuaugcgcauguuaugaaaugcauaauaaaaaauuuuaaaaaaucuaaaagaucuaaaaaaaaaaaaaaaaaaaaaaaaaaaaaaaaaaaaaaaaaaaaaaaaaaaaaaaaaaaaaaaaugcaucccccccccccccccccccccccccccccccaaaggcucuuuucagagccaccagaauu

SEQ ID NO: 16684 - RNA, 1994 nt, Artificial Sequence
  mRNA product Design d-5 comprising derived and/or modified sequence from HRSV(Memphis-37)__AIY60640.1__F-del_DSCav1_mut4 (opt1)
gggagagggcgcuuggcuugcaaggacccugagcugcggcauugaagcacacccaacccaacucgacugaagucagccucacugaaccggaucugagaaucuucucucucugggcuugccagggcucuccgaaccuagcuagcauccucuucaauuccaacuagaaagcuuaccauggagcugcccauccucaagaccaacgccaucaccacgauccuggccgcggugacccugugcuucgccagcucccagaacaucaccgaggaguucuaccagagcacgugcuccgccgucagcaagggcuaccucuccgcccugcgcaccgggugguacaccagcgugaucaccaucgagcuguccaacaucaaggagaacaagugcaacggcaccgacgccaaggugaagcucaucaagcaggagcuggacaaguacaagaacgcggucacggagcugcagcuccugaugcagagcaccccggccgccggcuccgggagcgcgaucugcuccggcaucgccgucugcaaggugcugcaccucgagggcgaggugaacaagaucaagaacgcccugcuguccaccaacaaggccgucgugagccucuccaacggggugagcguccugaccuucaaggugcuggaccucaagaacuacaucgacaagcagcugcugcccauccugaacaagcagagcugcuccaucagcaacaucgagaccgucaucgaguuccagcagaagaacaaccgccuccuggagaucacgcgggaguucagcgugaacgcgggcgugaccacccccgucuccaccuacaugcugacgaacagcgagcuccugucccugaucaacgacaugccgaucaccaacgaccagaagaagcucaugagcaacaacgugcagaucgugcgccagcaguccuacagcaucaugugcaucaucaaggaggagguccuggccuacguggugcagcugccccucuacggggucaucgacacccccugcuggaagcugcacaccagcccccugugcacgaccaacaccaaggagggcuccaacaucugccucacccggacggaccgcgggugguacugcgacaacgccggcagcguguccuucuucccgcaggccgagaccugcaagguccagagcaaccggguguucugcgacaccaugaacucccggacccugcccagcgaggugaaccucugcaacaucgacaucuucaaccccaaguacgacugcaagaucaugacguccaagaccgacgucagcuccagcgugaucaccucccugggcgccaucgugagcugcuacgggaagaccaagugcacggcgagcaacaagaaccgcggcaucaucaagaccuucuccaacgggugcgacuacgucagcaacaagggcguggacaccguguccgucggcaacacccuguacugcgugaacaagcaggagggcaagagccucuacgugaagggggagcccaucaucaacuucuacgacccgcuggucuuccccuccgacgaguucgacgccagcaucucccaggugaacgagaagaucaaccagagccuggccuucauccggaaguccgacgagcuccugcacaacgugaacgucggcaagagcaccacgaacaucaugaucaccaccaucaucaucgugaucaucgugauccugcugcuccugaucgccgucgggcuguuccucuacugcaaggcccgcugaggacuaguggaagcauuuuccuggcugauuaaaagaaauuacucagcuauggucaucuguuccuguuagaaggcuaugcagcauauuauauacuaugcgcauguuaugaaaugcauaauaaaaaauuuuaaaaaaucuaaaagaucuaaaaaaaaaaaaaaaaaaaaaaaaaaaaaaaaaaaaaaaaaaaaaaaaaaaaaaaaaaaaaaaaugcaucccccccccccccccccccccccccccccccaaaggcucuuuucagagccaccagaauu

SEQ ID NO: 16685 - RNA, 1994 nt, Artificial Sequence
  mRNA product Design d-5 comprising derived and/or modified sequence from HRSV(Memphis-37)__AIY60640.1__F-del_DSCav1_mut4 (opt1)
gggagagggcgcuuggcuugcaaggacccugagcugcggcauugaagcacacccaacccaacucgacugaagucagccucacugaaccggaucugagaaucuucucucucugggcuugccagggcucuccgaaccuagcuagcauccucuucaauuccaacuagaaagcuuaccauggagcugcccauccucaagaccaacgccaucaccacgauccuggccgcggugacccugugcuucgccagcucccagaacaucaccgaggaguucuaccagagcacgugcuccgccgucagcaagggcuaccucuccgcccugcgcaccgggugguacaccagcgugaucaccaucgagcuguccaacaucaaggagaacaagugcaacggcaccgacgccaaggugaagcucaucaagcaggagcuggacaaguacaagaacgcggucacggagcugcagcuccugaugcagagcaccccggccgccggguccggcagcgccaucugcuccgggaucgcggugugcaaggugcugcaccucgagggcgaggucaacaagaucaagaacgcccugcugagcaccaacaaggccguggugucccucagcaacggcgucuccgugcugaccuucaaggugcuggaccucaagaacuacaucgacaagcagcugcugcccauccucaacaagcagagcugcuccaucagcaacaucgagacggucaucgaguuccagcagaagaacaaccggcugcuggagaucacccgcgaguucuccgugaacgccggggugaccacccccgucagcacguacaugcucaccaacagcgagcugcugucccucaucaacgacaugcccaucaccaacgaccagaagaagcugaugagcaacaacgugcagaucgugcggcagcaguccuacagcaucaugugcaucaucaaggaggagguccuggccuacguggugcagcucccgcuguacggcgucaucgacacccccugcuggaagcugcacacgagcccccucugcaccaccaacaccaaggagggguccaacaucugccugacgcgcaccgaccggggcugguacugcgacaacgcgggguccgugagcuucuucccccaggccgagaccugcaaggugcaguccaaccgcgucuucugcgacaccaugaacagccggacgcucccguccgaggugaaccugugcaacaucgacaucuucaaccccaaguacgacugcaagaucaugaccagcaagaccgacgucuccagcuccgugaucaccagccugggcgccaucguguccugcuacggcaagacgaagugcaccgccagcaacaagaaccgggggaucaucaagaccuucuccaacggcugcgacuacgucagcaacaaggggguggacaccgugagcgucggcaacacgcucuacugcgugaacaagcaggagggcaagucccuguacgugaagggggagcccaucaucaacuucuacgacccccuggucuucccgagcgacgaguucgacgccuccaucagccaggugaacgagaagaucaaccagucccucgcguucauccgcaagagcgacgagcugcugcacaacgugaacgucggcaaguccaccaccaacaucaugaucaccaccaucaucaucgugaucaucgugauccuccugcugcucaucgccgucgggcuguuccuguacugcaaggcccggugaggacuaguggaagcauuuuccuggcugauuaaaagaaauuacucagcuauggucaucuguuccuguuagaaggcuaugcagcauauuauauacuaugcgcauguuaugaaaugcauaauaaaaaauuuuaaaaaaucuaaaagaucuaaaaaaaaaaaaaaaaaaaaaaaaaaaaaaaaaaaaaaaaaaaaaaaaaaaaaaaaaaaaaaaaugcaucccccccccccccccccccccccccccccccaaaggcucuuuucagagccaccagaauu

SEQ ID NO: 16686 - RNA, 1994 nt, Artificial Sequence
  mRNA product Design d-5 comprising derived and/or modified sequence from HRSV(Memphis-37)__AIY60640.1__F-del_DSCav1_mut4 (opt2)
gggagagggcgcuuggcuugcaaggacccugagcugcggcauugaagcacacccaacccaacucgacugaagucagccucacugaaccggaucugagaaucuucucucucugggcuugccagggcucuccgaaccuagcuagcauccucuucaauuccaacuagaaagcuuaccauggagcuccccauccucaagaccaacgccaucaccaccauccucgccgccgucacccucugcuucgccuccucccagaacaucaccgaggaguucuaccaguccaccugcuccgccgucuccaagggcuaccucuccgcccuccgcaccggcugguacaccuccgucaucaccaucgagcucuccaacaucaaggagaacaagugcaacggcaccgacgccaaggucaagcucaucaagcaggagcucgacaaguacaagaacgccgucaccgagcuccagcuccucaugcaguccacccccgccgccggcuccggcuccgccaucugcuccggcaucgccgucugcaagguccuccaccucgagggcgaggucaacaagaucaagaacgcccuccucuccaccaacaaggccgucgucucccucuccaacggcgucuccguccucaccuucaagguccucgaccucaagaacuacaucgacaagcagcuccuccccauccucaacaagcaguccugcuccaucuccaacaucgagaccgucaucgaguuccagcagaagaacaaccgccuccucgagaucacccgcgaguucuccgucaacgccggcgucaccacccccgucuccaccuacaugcucaccaacuccgagcuccucucccucaucaacgacaugcccaucaccaacgaccagaagaagcucauguccaacaacguccagaucguccgccagcaguccuacuccaucaugugcaucaucaaggaggagguccucgccuacgucguccagcucccccucuacggcgucaucgacacccccugcuggaagcuccacaccuccccccucugcaccaccaacaccaaggagggcuccaacaucugccucacccgcaccgaccgcggcugguacugcgacaacgccggcuccgucuccuucuucccccaggccgagaccugcaagguccaguccaaccgcgucuucugcgacaccaugaacucccgcacccuccccuccgaggucaaccucugcaacaucgacaucuucaaccccaaguacgacugcaagaucaugaccuccaagaccgacgucuccuccuccgucaucaccucccucggcgccaucgucuccugcuacggcaagaccaagugcaccgccuccaacaagaaccgcggcaucaucaagaccuucuccaacggcugcgacuacgucuccaacaagggcgucgacaccgucuccgucggcaacacccucuacugcgucaacaagcaggagggcaagucccucuacgucaagggcgagcccaucaucaacuucuacgacccccucgucuuccccuccgacgaguucgacgccuccaucucccaggucaacgagaagaucaaccagucccucgccuucauccgcaaguccgacgagcuccuccacaacgucaacgucggcaaguccaccaccaacaucaugaucaccaccaucaucaucgucaucaucgucauccuccuccuccucaucgccgucggccucuuccucuacugcaaggcccgcugaggacuaguggaagcauuuuccuggcugauuaaaagaaauuacucagcuauggucaucuguuccuguuagaaggcuaugcagcauauuauauacuaugcgcauguuaugaaaugcauaauaaaaaauuuuaaaaaaucuaaaagaucuaaaaaaaaaaaaaaaaaaaaaaaaaaaaaaaaaaaaaaaaaaaaaaaaaaaaaaaaaaaaaaaaugcaucccccccccccccccccccccccccccccccaaaggcucuuuucagagccaccagaauu

SEQ ID NO: 16687 - RNA, 1994 nt, Artificial Sequence
  mRNA product Design d-5 comprising derived and/or modified sequence from HRSV(Memphis-37)__AIY60640.1__F-del_DSCav1_mut4 (opt3)
gggagagggcgcuuggcuugcaaggacccugagcugcggcauugaagcacacccaacccaacucgacugaagucagccucacugaaccggaucugagaaucuucucucucugggcuugccagggcucuccgaaccuagcuagcauccucuucaauuccaacuagaaagcuuaccauggagcugcccauccucaagaccaacgccauuacaacuauacuugcugcagugacgcugugcuucgccagcucccagaauaucaccgaagaguuuuaccaaucuacauguucagcggucaguaaaggcuauuugagcgcuuuaagaacugggugguacaccuccguuauuacaaucgaacugucuaacauuaaggagaauaaaugcaacggaaccgacgccaaggugaaacuaaucaagcaggaacucgauaaguauaaaaaugcaguaacugagcugcagcuucugaugcagucgaccccugccgcugguucaggcagcgcaauauguagugggaucgccgugugcaaggucuugcaccucgagggagaagugaacaaaauuaagaaugcucugcuguccacaaacaaagccguugugucucucagcaauggcgucuccguguuaacguucaagguacuggaccuuaagaacuacaucgauaaacaauugcugccaauucuaaauaagcagucauguaguaucagcaacauagagacuguuauugaauuucagcagaaaaauaacaggcuccuggagaucacccgggaguucucugugaaugcgggugucacaacuccgguguccaccuauaugcuuacaaacucagaacuguugagccucauuaacgacaugcccaucaccaaugaucaaaagaaacugaugaguaacaaugugcagaucguccgccagcagucuuacuccauuaugugcauaaucaaggaggaaguuuuagcauaugugguacaacugccucucuacggggugauugacacgccauguuggaaacuucauacuagcccccugugcacaaccaacacuaaggagggaucgaauaucuguuugacacgaaccgaucguggcugguacugcgacaacgccggcucugucuccuuuuucccucaggcugaaacguguaaggugcagucaaauagaguguuuugcgauaccaugaacaguagaacacugccaagcgaggugaaucucugcaacauagacauuuucaaucccaaauaugauuguaagaucaugacuuccaaaaccgacgucucuagcucagugaucacaagucugggggccauuguauccugcuacggaaagacuaaauguaccgcaagcaacaagaauagggguaucauuaagacauuuucuaacggcugcgauuauguuucaaauaaagggguggacaccgucagugugggaaacacucuuuacugugucaacaagcaagagggcaaaagccuguaugugaagggugaaccuauaaucaauuucuacgacccauugguuuuuccguccgaugaguucgacgcuucuauuucgcagguuaacgagaaaaucaaucagagccucgccuuuauccggaaguccgaugaacuguuacacaacguaaaugucgggaagucaacgacaaacauuaugauaaccacuaucauuaucgugauuaucguuauacugcuacuccugaucgcggugggacuuuucuuguauugcaaagcccgcugaggacuaguggaagcauuuuccuggcugauuaaaagaaauuacucagcuauggucaucuguuccuguuagaaggcuaugcagcauauuauauacuaugcgcauguuaugaaaugcauaauaaaaaauuuuaaaaaaucuaaaagaucuaaaaaaaaaaaaaaaaaaaaaaaaaaaaaaaaaaaaaaaaaaaaaaaaaaaaaaaaaaaaaaaaugcaucccccccccccccccccccccccccccccccaaaggcucuuuucagagccaccagaauu

SEQ ID NO: 16688 - RNA, 1994 nt, Artificial Sequence
  mRNA product Design d-5 comprising derived and/or modified sequence from HRSV(Memphis-37)__AIY60640.1__F-del_DSCav1_mut4 (opt4)
gggagagggcgcuuggcuugcaaggacccugagcugcggcauugaagcacacccaacccaacucgacugaagucagccucacugaaccggaucugagaaucuucucucucugggcuugccagggcucuccgaaccuagcuagcauccucuucaauuccaacuagaaagcuuaccauggagcugcccauccugaagaccaacgccaucaccaccauccuggccgccgugacccugugcuucgccagcagccagaacaucaccgaggaguucuaccagagcaccugcagcgccgugagcaagggcuaccugagcgcccugagaaccggcugguacaccagcgugaucaccaucgagcugagcaacaucaaggagaacaagugcaacggcaccgacgccaaggugaagcugaucaagcaggagcuggacaaguacaagaacgccgugaccgagcugcagcugcugaugcagagcacccccgccgccggcagcggcagcgccaucugcagcggcaucgccgugugcaaggugcugcaccuggagggcgaggugaacaagaucaagaacgcccugcugagcaccaacaaggccguggugagccugagcaacggcgugagcgugcugaccuucaaggugcuggaccugaagaacuacaucgacaagcagcugcugcccauccugaacaagcagagcugcagcaucagcaacaucgagaccgugaucgaguuccagcagaagaacaacagacugcuggagaucaccagagaguucagcgugaacgccggcgugaccacccccgugagcaccuacaugcugaccaacagcgagcugcugagccugaucaacgacaugcccaucaccaacgaccagaagaagcugaugagcaacaacgugcagaucgugagacagcagagcuacagcaucaugugcaucaucaaggaggaggugcuggccuacguggugcagcugccccuguacggcgugaucgacacccccugcuggaagcugcacaccagcccccugugcaccaccaacaccaaggagggcagcaacaucugccugaccagaaccgacagaggcugguacugcgacaacgccggcagcgugagcuucuucccccaggccgagaccugcaaggugcagagcaacagaguguucugcgacaccaugaacagcagaacccugcccagcgaggugaaccugugcaacaucgacaucuucaaccccaaguacgacugcaagaucaugaccagcaagaccgacgugagcagcagcgugaucaccagccugggcgccaucgugagcugcuacggcaagaccaagugcaccgccagcaacaagaacagaggcaucaucaagaccuucagcaacggcugcgacuacgugagcaacaagggcguggacaccgugagcgugggcaacacccuguacugcgugaacaagcaggagggcaagagccuguacgugaagggcgagcccaucaucaacuucuacgacccccugguguuccccagcgacgaguucgacgccagcaucagccaggugaacgagaagaucaaccagagccuggccuucaucagaaagagcgacgagcugcugcacaacgugaacgugggcaagagcaccaccaacaucaugaucaccaccaucaucaucgugaucaucgugauccugcugcugcugaucgccgugggccuguuccuguacugcaaggccagaugaggacuaguggaagcauuuuccuggcugauuaaaagaaauuacucagcuauggucaucuguuccuguuagaaggcuaugcagcauauuauauacuaugcgcauguuaugaaaugcauaauaaaaaauuuuaaaaaaucuaaaagaucuaaaaaaaaaaaaaaaaaaaaaaaaaaaaaaaaaaaaaaaaaaaaaaaaaaaaaaaaaaaaaaaaugcaucccccccccccccccccccccccccccccccaaaggcucuuuucagagccaccagaauu

SEQ ID NO: 16689 - RNA, 1994 nt, Artificial Sequence
  mRNA product Design d-5 comprising derived and/or modified sequence from HRSV(Memphis-37)__AIY60640.1__F-del_DSCav1_mut4 (opt5)
gggagagggcgcuuggcuugcaaggacccugagcugcggcauugaagcacacccaacccaacucgacugaagucagccucacugaaccggaucugagaaucuucucucucugggcuugccagggcucuccgaaccuagcuagcauccucuucaauuccaacuagaaagcuuaccauggagcugcccauccucaagaccaacgccauuacaacgauccuggcugccgugacccuuugcuucgcgagcucccagaauauuacagaagaguuuuaccaaucuaccuguagcgcugucuccaaaggcuaucugucugcccucagaacagggugguacaccagcguuaucacaauugaacuguccaacaucaaggagaauaaaugcaacggaaccgacgccaaggugaaacuuaucaagcaggaacuggauaaguauaaaaaugcugugacggagcuccagcugcugaugcagucuaccccugccgcuggcagcggguccgccauuuguagcggaaucgcggucugcaaggugcuccaccuggagggcgaaguuaacaaaauuaagaaugcccuucugucuacaaacaaagcuguggucucccucagcaauggggugucuguucugaccuucaaggugcuugaccugaagaacuacaucgauaaacaacuccugccgauucugaauaagcaguccuguagcaucucuaacauugagacagucaucgaauuucagcagaaaaauaaccggcuccuggagaucacccgcgaguucuccgugaaugccggagugacgacacccgucagcaccuauaugcuuacaaacuccgaacugcucucucugauuaacgacaugccuaucaccaaugaucaaaagaaacuuaugagcaacaauguucagauugugagacagcaguccuacagcaucaugugcauuaucaaggaggaagugcuggcuuaugucgugcaacucccccuguacggcguuaucgacaccccuuguuggaaacugcauacaucuccccucugcacgaccaacacaaaggagggcuccaauauuugucugacccggacagaucgcgggugguacugcgacaacgccggaagcgugagcuuuuucccucaggcggaaaccuguaagguccagucuaauagaguguuuugcgauacgaugaacuccagaacacugccgucugagguuaaucucugcaacaucgacauuuucaaucccaaauaugauuguaagaucaugaccagcaaaaccgacguguccagcucugucauuacaucccugggcgccaucgugagcugcuacgggaagaccaaauguacagcuucuaacaagaaucggggaaucauuaagacguuuuccaacggcugcgauuaugucagcaauaaagggguggacaccguuuccgugggaaacacacuuuacugugucaacaagcaagagggcaaaucucuguaugugaagggcgaaccuaucauuaauuucuacgacccccucguuuuuccuagcgaugaguucgacgccuccaucucucaggugaacgaaaagauuaaucagagccuggcuuuuauccgcaaguccgaugagcugcuccacaacgucaauguggggaaaagcaccacaaacauuaugaucaccacgaucauuaucgugauuaucguuauucugcuucugcucaucgccgucggacuguuccuguauugcaaagccagaugaggacuaguggaagcauuuuccuggcugauuaaaagaaauuacucagcuauggucaucuguuccuguuagaaggcuaugcagcauauuauauacuaugcgcauguuaugaaaugcauaauaaaaaauuuuaaaaaaucuaaaagaucuaaaaaaaaaaaaaaaaaaaaaaaaaaaaaaaaaaaaaaaaaaaaaaaaaaaaaaaaaaaaaaaaugcaucccccccccccccccccccccccccccccccaaaggcucuuuucagagccaccagaauu

SEQ ID NO: 16690 - RNA, 1994 nt, Artificial Sequence
  mRNA product Design d-5 comprising derived and/or modified sequence from HRSV(Memphis-37)__AIY60640.1__F-del_DSCav1_mut4 (opt6)
gggagagggcgcuuggcuugcaaggacccugagcugcggcauugaagcacacccaacccaacucgacugaagucagccucacugaaccggaucugagaaucuucucucucugggcuugccagggcucuccgaaccuagcuagcauccucuucaauuccaacuagaaagcuuaccauggaacuaccaauacucaaaacaaacgcaauaacaacuauacuagccgcaguuacacucugcuucgcuucaucacaaaauaucacagaagaauuuuaccaaucuacauguucagcuguauccaaagguuaccuuucagcacuacgaacaggaugguauaccucaguaaucaccaucgaacucucgaacauaaaagaaaacaaauguaacggaaccgaugcuaaagucaagcucauaaaacaagaacuagacaaauacaaaaacgcaguaaccgaacuacaacuacuuaugcaaucaacaccagcugcaggcucaggcucagcaaucugcucaggcauagcuguaugcaaaguacuacaucuagaaggagaaguaaacaaaauaaaaaacgcauuauuaucaacaaauaaagcaguaguaucacuaucaaauggaguaucaguacucacauucaaaguacuagaucuaaaaaacuacauugacaaacaauuacuaccaauccucaacaaacaaucaugcucaauauccaacauagaaacaguaauagaauuucaacaaaaaaacaaucgacuacuagaaauaacaagagaauuuucagucaaugccggaguuacaacacccguaagcacuuacaugcuaaccaacucagaacuacuaucacuaauaaacgacaugccaauuacaaacgaccaaaaaaaacuaaugucaaauaacguacaaauaguacgucaacaaucauacucaauaaugugcauaauaaaagaagaaguccuagcauacguaguacaauuacccuuauauggcguaauagacacaccaugcuggaaacuacacacauccccacucugcaccaccaacaccaaagaaggcuccaacauaugucuaacccgaaccgacagagguugguauugugauaacgcuggcuccguaucauucuucccacaagcagaaacauguaaaguacaaucaaacagaguauucugcgauacaaugaauagcagaacacuaccaucagaaguaaacuuaugcaacaucgacaucuucaaucccaaauacgacugcaaaauaaugacauccaaaacugacguuucuucaagcguaauaacaucuuuaggagcaauaguauccugcuacggaaaaacuaaaugcacagcauccaauaaaaaccguggaauaauaaaaacauucucaaauggcugcgacuacgucucaaacaaaggcguagacaccguuagugucggaaacacacuauauugcguaaauaaacaagaaggaaaauccuuauacguaaaaggcgaaccaauaauuaacuucuaugacccccucguauuuccauccgaugaauuugacgcaucaaucucgcaaguaaacgaaaaaauaaaccaaagccuagcauucauaagaaaauccgacgaacuacuccacaauguaaauguaggaaaaucaacuaccaacauaaugauuacuacuauaauaauaguaauuauagucaucuuacuacuauuaauagcagucggauuauuccuauacugcaaagcaagauagggacuaguggaagcauuuuccuggcugauuaaaagaaauuacucagcuauggucaucuguuccuguuagaaggcuaugcagcauauuauauacuaugcgcauguuaugaaaugcauaauaaaaaauuuuaaaaaaucuaaaagaucuaaaaaaaaaaaaaaaaaaaaaaaaaaaaaaaaaaaaaaaaaaaaaaaaaaaaaaaaaaaaaaaaugcaucccccccccccccccccccccccccccccccaaaggcucuuuucagagccaccagaauu

SEQ ID NO: 16691 - RNA, 1994 nt, Artificial Sequence
  mRNA product Design d-5 comprising derived and/or modified sequence from HRSV(Memphis-37)__AIY60640.1__F-del_DSCav1_mut4 (opt11)
gggagagggcgcuuggcuugcaaggacccugagcugcggcauugaagcacacccaacccaacucgacugaagucagccucacugaaccggaucugagaaucuucucucucugggcuugccagggcucuccgaaccuagcuagcauccucuucaauuccaacuagaaagcuuaccauggagcuccccauccuaaaaaccaacgccaucaccaccauccucgccgccgucacccuaugcuucgcuucaucacaaaacaucaccgaagaauuuuaccaaucuaccugcuccgccgucuccaaaggauaucucagcgcccuacggaccggcugguacaccuccgucauaaccaucgaacucaguaacaucaaagaaaacaaaugcaacggcaccgacgccaaagucaaacuaaucaaacaagaacuagauaaauacaaaaacgcggucaccgaacuacaacuccuaaugcaaagcacccccgccgccggauccggcuccgccauaugcuccggcauugcugucugcaaaguacuacaccucgagggcgaggucaacaaaaucaaaaacgcacuacucagcacuaauaaagccguaguaucccuaucaaacggugucucagucuuaacauucaaaguacucgaccuaaagaacuacaucgacaaacaacuccuacccauccucaacaagcaguccuguucuaucucaaacaucgaaaccgucaucgaauuucaacaaaagaacaaccgccuccucgaaaucacacgcgaguucuccgucaacgcaggaguaaccacccccgucuccaccuacaugcucacaaacucggaacuccucucacuaaucaacgacaugcccaucaccaacgaccaaaagaaacucaugagcaacaacguucaaaucguccgccaacaaucauacuccaucaugugcauaaucaaagaagaaguccuagcuuacgucguccagcugccccucuacggagucaucgacacgcccugcuggaaacuacacacaagcccccucugcaccaccaacaccaaagaaggcuccaacauaugccucacacggaccgaccgcgguugguacugcgacaacgccggcuccgucuccuucuucccccaagcagaaacuugcaaaguccaauccaaccgcguauucugcgacacaaugaacagcagaacacucccuagcgaagucaaccucugcaacaucgacauauucaaccccaaauacgacugcaaaaucaugacgucaaaaaccgacgucuccagcuccguuaucaccucacucggcgccaucgucagcugcuacggcaaaacuaaaugcaccgccuccaacaaaaaccgcggcaucauuaaaaccuucagcaacggcugcgacuacgucuccaacaaaggugucgauacgguauccgucggaaacacccuauacugcgucaacaaacaagaaggcaaaucucucuacgucaaaggcgaacccauaaucaauuucuacgacccccuagucuuccccuccgaugaauuugacgccuccaucagccaagucaacgagaaaaucaaccaaucacuagccuucauccggaaauccgacgaacuccuacacaacguaaacgucggcaaauccaccaccaauauaaugaucacaaccaucaucaucguaaucaucgucauccuccuccuacucaucgccgucggauuauucuuauacugcaaagcccgcuaaggacuaguggaagcauuuuccuggcugauuaaaagaaauuacucagcuauggucaucuguuccuguuagaaggcuaugcagcauauuauauacuaugcgcauguuaugaaaugcauaauaaaaaauuuuaaaaaaucuaaaagaucuaaaaaaaaaaaaaaaaaaaaaaaaaaaaaaaaaaaaaaaaaaaaaaaaaaaaaaaaaaaaaaaaugcaucccccccccccccccccccccccccccccccaaaggcucuuuucagagccaccagaauu

SEQ ID NO: 16692 - RNA, 1874 nt, Artificial Sequence
  mRNA product Design e-1 comprising derived and/or modified sequence from HRSV(Memphis-37)__AIY60640.1__F-del_DSCav1_mut4 (opt1)
gggagaauauaagcguuggcggagcgucgguuguagcacucugcgcgcccgcucuucugcugcuguuugucuacuuccuccugcuuccccgccgccgccgccgccaucaagcuuaccauggagcugcccauccucaagaccaacgccaucaccacgauccuggccgcggugacccugugcuucgccagcucccagaacaucaccgaggaguucuaccagagcacgugcuccgccgucagcaagggcuaccucuccgcccugcgcaccgggugguacaccagcgugaucaccaucgagcuguccaacaucaaggagaacaagugcaacggcaccgacgccaaggugaagcucaucaagcaggagcuggacaaguacaagaacgcggucacggagcugcagcuccugaugcagagcaccccggccgccggcuccgggagcgcgaucugcuccggcaucgccgucugcaaggugcugcaccucgagggcgaggugaacaagaucaagaacgcccugcuguccaccaacaaggccgucgugagccucuccaacggggugagcguccugaccuucaaggugcuggaccucaagaacuacaucgacaagcagcugcugcccauccugaacaagcagagcugcuccaucagcaacaucgagaccgucaucgaguuccagcagaagaacaaccgccuccuggagaucacgcgggaguucagcgugaacgcgggcgugaccacccccgucuccaccuacaugcugacgaacagcgagcuccugucccugaucaacgacaugccgaucaccaacgaccagaagaagcucaugagcaacaacgugcagaucgugcgccagcaguccuacagcaucaugugcaucaucaaggaggagguccuggccuacguggugcagcugccccucuacggggucaucgacacccccugcuggaagcugcacaccagcccccugugcacgaccaacaccaaggagggcuccaacaucugccucacccggacggaccgcgggugguacugcgacaacgccggcagcguguccuucuucccgcaggccgagaccugcaagguccagagcaaccggguguucugcgacaccaugaacucccggacccugcccagcgaggugaaccucugcaacaucgacaucuucaaccccaaguacgacugcaagaucaugacguccaagaccgacgucagcuccagcgugaucaccucccugggcgccaucgugagcugcuacgggaagaccaagugcacggcgagcaacaagaaccgcggcaucaucaagaccuucuccaacgggugcgacuacgucagcaacaagggcguggacaccguguccgucggcaacacccuguacugcgugaacaagcaggagggcaagagccucuacgugaagggggagcccaucaucaacuucuacgacccgcuggucuuccccuccgacgaguucgacgccagcaucucccaggugaacgagaagaucaaccagagccuggccuucauccggaaguccgacgagcuccugcacaacgugaacgucggcaagagcaccacgaacaucaugaucaccaccaucaucaucgugaucaucgugauccugcugcuccugaucgccgucgggcuguuccucuacugcaaggcccgcugaggacuaguguccaccugucccuccugggcugcuggauugucucguuuuccugccaaauaaacaggaucagcgcuuuacagaucuaaaaaaaaaaaaaaaaaaaaaaaaaaaaaaaaaaaaaaaaaaaaaaaaaaaaaaaaaaaaaaaaugcaucccccccccccccccccccccccccccccccaaaggcucuuuucagagccaccagaauu

SEQ ID NO: 16693 - RNA, 1874 nt, Artificial Sequence
  mRNA product Design e-1 comprising derived and/or modified sequence from HRSV(Memphis-37)__AIY60640.1__F-del_DSCav1_mut4 (opt1)
gggagaauauaagcguuggcggagcgucgguuguagcacucugcgcgcccgcucuucugcugcuguuugucuacuuccuccugcuuccccgccgccgccgccgccaucaagcuuaccauggagcugcccauccucaagaccaacgccaucaccacgauccuggccgcggugacccugugcuucgccagcucccagaacaucaccgaggaguucuaccagagcacgugcuccgccgucagcaagggcuaccucuccgcccugcgcaccgggugguacaccagcgugaucaccaucgagcuguccaacaucaaggagaacaagugcaacggcaccgacgccaaggugaagcucaucaagcaggagcuggacaaguacaagaacgcggucacggagcugcagcuccugaugcagagcaccccggccgccggguccggcagcgccaucugcuccgggaucgcggugugcaaggugcugcaccucgagggcgaggucaacaagaucaagaacgcccugcugagcaccaacaaggccguggugucccucagcaacggcgucuccgugcugaccuucaaggugcuggaccucaagaacuacaucgacaagcagcugcugcccauccucaacaagcagagcugcuccaucagcaacaucgagacggucaucgaguuccagcagaagaacaaccggcugcuggagaucacccgcgaguucuccgugaacgccggggugaccacccccgucagcacguacaugcucaccaacagcgagcugcugucccucaucaacgacaugcccaucaccaacgaccagaagaagcugaugagcaacaacgugcagaucgugcggcagcaguccuacagcaucaugugcaucaucaaggaggagguccuggccuacguggugcagcucccgcuguacggcgucaucgacacccccugcuggaagcugcacacgagcccccucugcaccaccaacaccaaggagggguccaacaucugccugacgcgcaccgaccggggcugguacugcgacaacgcgggguccgugagcuucuucccccaggccgagaccugcaaggugcaguccaaccgcgucuucugcgacaccaugaacagccggacgcucccguccgaggugaaccugugcaacaucgacaucuucaaccccaaguacgacugcaagaucaugaccagcaagaccgacgucuccagcuccgugaucaccagccugggcgccaucguguccugcuacggcaagacgaagugcaccgccagcaacaagaaccgggggaucaucaagaccuucuccaacggcugcgacuacgucagcaacaaggggguggacaccgugagcgucggcaacacgcucuacugcgugaacaagcaggagggcaagucccuguacgugaagggggagcccaucaucaacuucuacgacccccuggucuucccgagcgacgaguucgacgccuccaucagccaggugaacgagaagaucaaccagucccucgcguucauccgcaagagcgacgagcugcugcacaacgugaacgucggcaaguccaccaccaacaucaugaucaccaccaucaucaucgugaucaucgugauccuccugcugcucaucgccgucgggcuguuccuguacugcaaggcccggugaggacuaguguccaccugucccuccugggcugcuggauugucucguuuuccugccaaauaaacaggaucagcgcuuuacagaucuaaaaaaaaaaaaaaaaaaaaaaaaaaaaaaaaaaaaaaaaaaaaaaaaaaaaaaaaaaaaaaaaugcaucccccccccccccccccccccccccccccccaaaggcucuuuucagagccaccagaauu

SEQ ID NO: 16694 - RNA, 1874 nt, Artificial Sequence
  mRNA product Design e-1 comprising derived and/or modified sequence from HRSV(Memphis-37)__AIY60640.1__F-del_DSCav1_mut4 (opt2)
gggagaauauaagcguuggcggagcgucgguuguagcacucugcgcgcccgcucuucugcugcuguuugucuacuuccuccugcuuccccgccgccgccgccgccaucaagcuuaccauggagcuccccauccucaagaccaacgccaucaccaccauccucgccgccgucacccucugcuucgccuccucccagaacaucaccgaggaguucuaccaguccaccugcuccgccgucuccaagggcuaccucuccgcccuccgcaccggcugguacaccuccgucaucaccaucgagcucuccaacaucaaggagaacaagugcaacggcaccgacgccaaggucaagcucaucaagcaggagcucgacaaguacaagaacgccgucaccgagcuccagcuccucaugcaguccacccccgccgccggcuccggcuccgccaucugcuccggcaucgccgucugcaagguccuccaccucgagggcgaggucaacaagaucaagaacgcccuccucuccaccaacaaggccgucgucucccucuccaacggcgucuccguccucaccuucaagguccucgaccucaagaacuacaucgacaagcagcuccuccccauccucaacaagcaguccugcuccaucuccaacaucgagaccgucaucgaguuccagcagaagaacaaccgccuccucgagaucacccgcgaguucuccgucaacgccggcgucaccacccccgucuccaccuacaugcucaccaacuccgagcuccucucccucaucaacgacaugcccaucaccaacgaccagaagaagcucauguccaacaacguccagaucguccgccagcaguccuacuccaucaugugcaucaucaaggaggagguccucgccuacgucguccagcucccccucuacggcgucaucgacacccccugcuggaagcuccacaccuccccccucugcaccaccaacaccaaggagggcuccaacaucugccucacccgcaccgaccgcggcugguacugcgacaacgccggcuccgucuccuucuucccccaggccgagaccugcaagguccaguccaaccgcgucuucugcgacaccaugaacucccgcacccuccccuccgaggucaaccucugcaacaucgacaucuucaaccccaaguacgacugcaagaucaugaccuccaagaccgacgucuccuccuccgucaucaccucccucggcgccaucgucuccugcuacggcaagaccaagugcaccgccuccaacaagaaccgcggcaucaucaagaccuucuccaacggcugcgacuacgucuccaacaagggcgucgacaccgucuccgucggcaacacccucuacugcgucaacaagcaggagggcaagucccucuacgucaagggcgagcccaucaucaacuucuacgacccccucgucuuccccuccgacgaguucgacgccuccaucucccaggucaacgagaagaucaaccagucccucgccuucauccgcaaguccgacgagcuccuccacaacgucaacgucggcaaguccaccaccaacaucaugaucaccaccaucaucaucgucaucaucgucauccuccuccuccucaucgccgucggccucuuccucuacugcaaggcccgcugaggacuaguguccaccugucccuccugggcugcuggauugucucguuuuccugccaaauaaacaggaucagcgcuuuacagaucuaaaaaaaaaaaaaaaaaaaaaaaaaaaaaaaaaaaaaaaaaaaaaaaaaaaaaaaaaaaaaaaaugcaucccccccccccccccccccccccccccccccaaaggcucuuuucagagccaccagaauu

SEQ ID NO: 16695 - RNA, 1874 nt, Artificial Sequence
  mRNA product Design e-1 comprising derived and/or modified sequence from HRSV(Memphis-37)__AIY60640.1__F-del_DSCav1_mut4 (opt3)
gggagaauauaagcguuggcggagcgucgguuguagcacucugcgcgcccgcucuucugcugcuguuugucuacuuccuccugcuuccccgccgccgccgccgccaucaagcuuaccauggagcugcccauccucaagaccaacgccauuacaacuauacuugcugcagugacgcugugcuucgccagcucccagaauaucaccgaagaguuuuaccaaucuacauguucagcggucaguaaaggcuauuugagcgcuuuaagaacugggugguacaccuccguuauuacaaucgaacugucuaacauuaaggagaauaaaugcaacggaaccgacgccaaggugaaacuaaucaagcaggaacucgauaaguauaaaaaugcaguaacugagcugcagcuucugaugcagucgaccccugccgcugguucaggcagcgcaauauguagugggaucgccgugugcaaggucuugcaccucgagggagaagugaacaaaauuaagaaugcucugcuguccacaaacaaagccguugugucucucagcaauggcgucuccguguuaacguucaagguacuggaccuuaagaacuacaucgauaaacaauugcugccaauucuaaauaagcagucauguaguaucagcaacauagagacuguuauugaauuucagcagaaaaauaacaggcuccuggagaucacccgggaguucucugugaaugcgggugucacaacuccgguguccaccuauaugcuuacaaacucagaacuguugagccucauuaacgacaugcccaucaccaaugaucaaaagaaacugaugaguaacaaugugcagaucguccgccagcagucuuacuccauuaugugcauaaucaaggaggaaguuuuagcauaugugguacaacugccucucuacggggugauugacacgccauguuggaaacuucauacuagcccccugugcacaaccaacacuaaggagggaucgaauaucuguuugacacgaaccgaucguggcugguacugcgacaacgccggcucugucuccuuuuucccucaggcugaaacguguaaggugcagucaaauagaguguuuugcgauaccaugaacaguagaacacugccaagcgaggugaaucucugcaacauagacauuuucaaucccaaauaugauuguaagaucaugacuuccaaaaccgacgucucuagcucagugaucacaagucugggggccauuguauccugcuacggaaagacuaaauguaccgcaagcaacaagaauagggguaucauuaagacauuuucuaacggcugcgauuauguuucaaauaaagggguggacaccgucagugugggaaacacucuuuacugugucaacaagcaagagggcaaaagccuguaugugaagggugaaccuauaaucaauuucuacgacccauugguuuuuccguccgaugaguucgacgcuucuauuucgcagguuaacgagaaaaucaaucagagccucgccuuuauccggaaguccgaugaacuguuacacaacguaaaugucgggaagucaacgacaaacauuaugauaaccacuaucauuaucgugauuaucguuauacugcuacuccugaucgcggugggacuuuucuuguauugcaaagcccgcugaggacuaguguccaccugucccuccugggcugcuggauugucucguuuuccugccaaauaaacaggaucagcgcuuuacagaucuaaaaaaaaaaaaaaaaaaaaaaaaaaaaaaaaaaaaaaaaaaaaaaaaaaaaaaaaaaaaaaaaugcaucccccccccccccccccccccccccccccccaaaggcucuuuucagagccaccagaauu

SEQ ID NO: 16696 - RNA, 1874 nt, Artificial Sequence
  mRNA product Design e-1 comprising derived and/or modified sequence from HRSV(Memphis-37)__AIY60640.1__F-del_DSCav1_mut4 (opt4)
gggagaauauaagcguuggcggagcgucgguuguagcacucugcgcgcccgcucuucugcugcuguuugucuacuuccuccugcuuccccgccgccgccgccgccaucaagcuuaccauggagcugcccauccugaagaccaacgccaucaccaccauccuggccgccgugacccugugcuucgccagcagccagaacaucaccgaggaguucuaccagagcaccugcagcgccgugagcaagggcuaccugagcgcccugagaaccggcugguacaccagcgugaucaccaucgagcugagcaacaucaaggagaacaagugcaacggcaccgacgccaaggugaagcugaucaagcaggagcuggacaaguacaagaacgccgugaccgagcugcagcugcugaugcagagcacccccgccgccggcagcggcagcgccaucugcagcggcaucgccgugugcaaggugcugcaccuggagggcgaggugaacaagaucaagaacgcccugcugagcaccaacaaggccguggugagccugagcaacggcgugagcgugcugaccuucaaggugcuggaccugaagaacuacaucgacaagcagcugcugcccauccugaacaagcagagcugcagcaucagcaacaucgagaccgugaucgaguuccagcagaagaacaacagacugcuggagaucaccagagaguucagcgugaacgccggcgugaccacccccgugagcaccuacaugcugaccaacagcgagcugcugagccugaucaacgacaugcccaucaccaacgaccagaagaagcugaugagcaacaacgugcagaucgugagacagcagagcuacagcaucaugugcaucaucaaggaggaggugcuggccuacguggugcagcugccccuguacggcgugaucgacacccccugcuggaagcugcacaccagcccccugugcaccaccaacaccaaggagggcagcaacaucugccugaccagaaccgacagaggcugguacugcgacaacgccggcagcgugagcuucuucccccaggccgagaccugcaaggugcagagcaacagaguguucugcgacaccaugaacagcagaacccugcccagcgaggugaaccugugcaacaucgacaucuucaaccccaaguacgacugcaagaucaugaccagcaagaccgacgugagcagcagcgugaucaccagccugggcgccaucgugagcugcuacggcaagaccaagugcaccgccagcaacaagaacagaggcaucaucaagaccuucagcaacggcugcgacuacgugagcaacaagggcguggacaccgugagcgugggcaacacccuguacugcgugaacaagcaggagggcaagagccuguacgugaagggcgagcccaucaucaacuucuacgacccccugguguuccccagcgacgaguucgacgccagcaucagccaggugaacgagaagaucaaccagagccuggccuucaucagaaagagcgacgagcugcugcacaacgugaacgugggcaagagcaccaccaacaucaugaucaccaccaucaucaucgugaucaucgugauccugcugcugcugaucgccgugggccuguuccuguacugcaaggccagaugaggacuaguguccaccugucccuccugggcugcuggauugucucguuuuccugccaaauaaacaggaucagcgcuuuacagaucuaaaaaaaaaaaaaaaaaaaaaaaaaaaaaaaaaaaaaaaaaaaaaaaaaaaaaaaaaaaaaaaaugcaucccccccccccccccccccccccccccccccaaaggcucuuuucagagccaccagaauu

SEQ ID NO: 16697 - RNA, 1874 nt, Artificial Sequence
  mRNA product Design e-1 comprising derived and/or modified sequence from HRSV(Memphis-37)__AIY60640.1__F-del_DSCav1_mut4 (opt5)
gggagaauauaagcguuggcggagcgucgguuguagcacucugcgcgcccgcucuucugcugcuguuugucuacuuccuccugcuuccccgccgccgccgccgccaucaagcuuaccauggagcugcccauccucaagaccaacgccauuacaacgauccuggcugccgugacccuuugcuucgcgagcucccagaauauuacagaagaguuuuaccaaucuaccuguagcgcugucuccaaaggcuaucugucugcccucagaacagggugguacaccagcguuaucacaauugaacuguccaacaucaaggagaauaaaugcaacggaaccgacgccaaggugaaacuuaucaagcaggaacuggauaaguauaaaaaugcugugacggagcuccagcugcugaugcagucuaccccugccgcuggcagcggguccgccauuuguagcggaaucgcggucugcaaggugcuccaccuggagggcgaaguuaacaaaauuaagaaugcccuucugucuacaaacaaagcuguggucucccucagcaauggggugucuguucugaccuucaaggugcuugaccugaagaacuacaucgauaaacaacuccugccgauucugaauaagcaguccuguagcaucucuaacauugagacagucaucgaauuucagcagaaaaauaaccggcuccuggagaucacccgcgaguucuccgugaaugccggagugacgacacccgucagcaccuauaugcuuacaaacuccgaacugcucucucugauuaacgacaugccuaucaccaaugaucaaaagaaacuuaugagcaacaauguucagauugugagacagcaguccuacagcaucaugugcauuaucaaggaggaagugcuggcuuaugucgugcaacucccccuguacggcguuaucgacaccccuuguuggaaacugcauacaucuccccucugcacgaccaacacaaaggagggcuccaauauuugucugacccggacagaucgcgggugguacugcgacaacgccggaagcgugagcuuuuucccucaggcggaaaccuguaagguccagucuaauagaguguuuugcgauacgaugaacuccagaacacugccgucugagguuaaucucugcaacaucgacauuuucaaucccaaauaugauuguaagaucaugaccagcaaaaccgacguguccagcucugucauuacaucccugggcgccaucgugagcugcuacgggaagaccaaauguacagcuucuaacaagaaucggggaaucauuaagacguuuuccaacggcugcgauuaugucagcaauaaagggguggacaccguuuccgugggaaacacacuuuacugugucaacaagcaagagggcaaaucucuguaugugaagggcgaaccuaucauuaauuucuacgacccccucguuuuuccuagcgaugaguucgacgccuccaucucucaggugaacgaaaagauuaaucagagccuggcuuuuauccgcaaguccgaugagcugcuccacaacgucaauguggggaaaagcaccacaaacauuaugaucaccacgaucauuaucgugauuaucguuauucugcuucugcucaucgccgucggacuguuccuguauugcaaagccagaugaggacuaguguccaccugucccuccugggcugcuggauugucucguuuuccugccaaauaaacaggaucagcgcuuuacagaucuaaaaaaaaaaaaaaaaaaaaaaaaaaaaaaaaaaaaaaaaaaaaaaaaaaaaaaaaaaaaaaaaugcaucccccccccccccccccccccccccccccccaaaggcucuuuucagagccaccagaauu

SEQ ID NO: 16698 - RNA, 1874 nt, Artificial Sequence
  mRNA product Design e-1 comprising derived and/or modified sequence from HRSV(Memphis-37)__AIY60640.1__F-del_DSCav1_mut4 (opt6)
gggagaauauaagcguuggcggagcgucgguuguagcacucugcgcgcccgcucuucugcugcuguuugucuacuuccuccugcuuccccgccgccgccgccgccaucaagcuuaccauggaacuaccaauacucaaaacaaacgcaauaacaacuauacuagccgcaguuacacucugcuucgcuucaucacaaaauaucacagaagaauuuuaccaaucuacauguucagcuguauccaaagguuaccuuucagcacuacgaacaggaugguauaccucaguaaucaccaucgaacucucgaacauaaaagaaaacaaauguaacggaaccgaugcuaaagucaagcucauaaaacaagaacuagacaaauacaaaaacgcaguaaccgaacuacaacuacuuaugcaaucaacaccagcugcaggcucaggcucagcaaucugcucaggcauagcuguaugcaaaguacuacaucuagaaggagaaguaaacaaaauaaaaaacgcauuauuaucaacaaauaaagcaguaguaucacuaucaaauggaguaucaguacucacauucaaaguacuagaucuaaaaaacuacauugacaaacaauuacuaccaauccucaacaaacaaucaugcucaauauccaacauagaaacaguaauagaauuucaacaaaaaaacaaucgacuacuagaaauaacaagagaauuuucagucaaugccggaguuacaacacccguaagcacuuacaugcuaaccaacucagaacuacuaucacuaauaaacgacaugccaauuacaaacgaccaaaaaaaacuaaugucaaauaacguacaaauaguacgucaacaaucauacucaauaaugugcauaauaaaagaagaaguccuagcauacguaguacaauuacccuuauauggcguaauagacacaccaugcuggaaacuacacacauccccacucugcaccaccaacaccaaagaaggcuccaacauaugucuaacccgaaccgacagagguugguauugugauaacgcuggcuccguaucauucuucccacaagcagaaacauguaaaguacaaucaaacagaguauucugcgauacaaugaauagcagaacacuaccaucagaaguaaacuuaugcaacaucgacaucuucaaucccaaauacgacugcaaaauaaugacauccaaaacugacguuucuucaagcguaauaacaucuuuaggagcaauaguauccugcuacggaaaaacuaaaugcacagcauccaauaaaaaccguggaauaauaaaaacauucucaaauggcugcgacuacgucucaaacaaaggcguagacaccguuagugucggaaacacacuauauugcguaaauaaacaagaaggaaaauccuuauacguaaaaggcgaaccaauaauuaacuucuaugacccccucguauuuccauccgaugaauuugacgcaucaaucucgcaaguaaacgaaaaaauaaaccaaagccuagcauucauaagaaaauccgacgaacuacuccacaauguaaauguaggaaaaucaacuaccaacauaaugauuacuacuauaauaauaguaauuauagucaucuuacuacuauuaauagcagucggauuauuccuauacugcaaagcaagauagggacuaguguccaccugucccuccugggcugcuggauugucucguuuuccugccaaauaaacaggaucagcgcuuuacagaucuaaaaaaaaaaaaaaaaaaaaaaaaaaaaaaaaaaaaaaaaaaaaaaaaaaaaaaaaaaaaaaaaugcaucccccccccccccccccccccccccccccccaaaggcucuuuucagagccaccagaauu

SEQ ID NO: 16699 - RNA, 1874 nt, Artificial Sequence
  mRNA product Design e-1 comprising derived and/or modified sequence from HRSV(Memphis-37)__AIY60640.1__F-del_DSCav1_mut4 (opt11)
gggagaauauaagcguuggcggagcgucgguuguagcacucugcgcgcccgcucuucugcugcuguuugucuacuuccuccugcuuccccgccgccgccgccgccaucaagcuuaccauggagcuccccauccuaaaaaccaacgccaucaccaccauccucgccgccgucacccuaugcuucgcuucaucacaaaacaucaccgaagaauuuuaccaaucuaccugcuccgccgucuccaaaggauaucucagcgcccuacggaccggcugguacaccuccgucauaaccaucgaacucaguaacaucaaagaaaacaaaugcaacggcaccgacgccaaagucaaacuaaucaaacaagaacuagauaaauacaaaaacgcggucaccgaacuacaacuccuaaugcaaagcacccccgccgccggauccggcuccgccauaugcuccggcauugcugucugcaaaguacuacaccucgagggcgaggucaacaaaaucaaaaacgcacuacucagcacuaauaaagccguaguaucccuaucaaacggugucucagucuuaacauucaaaguacucgaccuaaagaacuacaucgacaaacaacuccuacccauccucaacaagcaguccuguucuaucucaaacaucgaaaccgucaucgaauuucaacaaaagaacaaccgccuccucgaaaucacacgcgaguucuccgucaacgcaggaguaaccacccccgucuccaccuacaugcucacaaacucggaacuccucucacuaaucaacgacaugcccaucaccaacgaccaaaagaaacucaugagcaacaacguucaaaucguccgccaacaaucauacuccaucaugugcauaaucaaagaagaaguccuagcuuacgucguccagcugccccucuacggagucaucgacacgcccugcuggaaacuacacacaagcccccucugcaccaccaacaccaaagaaggcuccaacauaugccucacacggaccgaccgcgguugguacugcgacaacgccggcuccgucuccuucuucccccaagcagaaacuugcaaaguccaauccaaccgcguauucugcgacacaaugaacagcagaacacucccuagcgaagucaaccucugcaacaucgacauauucaaccccaaauacgacugcaaaaucaugacgucaaaaaccgacgucuccagcuccguuaucaccucacucggcgccaucgucagcugcuacggcaaaacuaaaugcaccgccuccaacaaaaaccgcggcaucauuaaaaccuucagcaacggcugcgacuacgucuccaacaaaggugucgauacgguauccgucggaaacacccuauacugcgucaacaaacaagaaggcaaaucucucuacgucaaaggcgaacccauaaucaauuucuacgacccccuagucuuccccuccgaugaauuugacgccuccaucagccaagucaacgagaaaaucaaccaaucacuagccuucauccggaaauccgacgaacuccuacacaacguaaacgucggcaaauccaccaccaauauaaugaucacaaccaucaucaucguaaucaucgucauccuccuccuacucaucgccgucggauuauucuuauacugcaaagcccgcuaaggacuaguguccaccugucccuccugggcugcuggauugucucguuuuccugccaaauaaacaggaucagcgcuuuacagaucuaaaaaaaaaaaaaaaaaaaaaaaaaaaaaaaaaaaaaaaaaaaaaaaaaaaaaaaaaaaaaaaaugcaucccccccccccccccccccccccccccccccaaaggcucuuuucagagccaccagaauu

SEQ ID NO: 16700 - RNA, 1856 nt, Artificial Sequence
  mRNA product Design e-2 comprising derived and/or modified sequence from HRSV(Memphis-37)__AIY60640.1__F-del_DSCav1_mut4 (opt1)
gggagacccgugacccggaaguuguacggcuacgcgacuuucccucccacaaacccucgcgcccuuccuuuccuacuugggcccggcagaaagcuuaccauggagcugcccauccucaagaccaacgccaucaccacgauccuggccgcggugacccugugcuucgccagcucccagaacaucaccgaggaguucuaccagagcacgugcuccgccgucagcaagggcuaccucuccgcccugcgcaccgggugguacaccagcgugaucaccaucgagcuguccaacaucaaggagaacaagugcaacggcaccgacgccaaggugaagcucaucaagcaggagcuggacaaguacaagaacgcggucacggagcugcagcuccugaugcagagcaccccggccgccggcuccgggagcgcgaucugcuccggcaucgccgucugcaaggugcugcaccucgagggcgaggugaacaagaucaagaacgcccugcuguccaccaacaaggccgucgugagccucuccaacggggugagcguccugaccuucaaggugcuggaccucaagaacuacaucgacaagcagcugcugcccauccugaacaagcagagcugcuccaucagcaacaucgagaccgucaucgaguuccagcagaagaacaaccgccuccuggagaucacgcgggaguucagcgugaacgcgggcgugaccacccccgucuccaccuacaugcugacgaacagcgagcuccugucccugaucaacgacaugccgaucaccaacgaccagaagaagcucaugagcaacaacgugcagaucgugcgccagcaguccuacagcaucaugugcaucaucaaggaggagguccuggccuacguggugcagcugccccucuacggggucaucgacacccccugcuggaagcugcacaccagcccccugugcacgaccaacaccaaggagggcuccaacaucugccucacccggacggaccgcgggugguacugcgacaacgccggcagcguguccuucuucccgcaggccgagaccugcaagguccagagcaaccggguguucugcgacaccaugaacucccggacccugcccagcgaggugaaccucugcaacaucgacaucuucaaccccaaguacgacugcaagaucaugacguccaagaccgacgucagcuccagcgugaucaccucccugggcgccaucgugagcugcuacgggaagaccaagugcacggcgagcaacaagaaccgcggcaucaucaagaccuucuccaacgggugcgacuacgucagcaacaagggcguggacaccguguccgucggcaacacccuguacugcgugaacaagcaggagggcaagagccucuacgugaagggggagcccaucaucaacuucuacgacccgcuggucuuccccuccgacgaguucgacgccagcaucucccaggugaacgagaagaucaaccagagccuggccuucauccggaaguccgacgagcuccugcacaacgugaacgucggcaagagcaccacgaacaucaugaucaccaccaucaucaucgugaucaucgugauccugcugcuccugaucgccgucgggcuguuccucuacugcaaggcccgcugaggacuaguguccaccugucccuccugggcugcuggauugucucguuuuccugccaaauaaacaggaucagcgcuuuacagaucuaaaaaaaaaaaaaaaaaaaaaaaaaaaaaaaaaaaaaaaaaaaaaaaaaaaaaaaaaaaaaaaaugcaucccccccccccccccccccccccccccccccaaaggcucuuuucagagccaccagaauu

SEQ ID NO: 16701 - RNA, 1856 nt, Artificial Sequence
  mRNA product Design e-2 comprising derived and/or modified sequence from HRSV(Memphis-37)__AIY60640.1__F-del_DSCav1_mut4 (opt1)
gggagacccgugacccggaaguuguacggcuacgcgacuuucccucccacaaacccucgcgcccuuccuuuccuacuugggcccggcagaaagcuuaccauggagcugcccauccucaagaccaacgccaucaccacgauccuggccgcggugacccugugcuucgccagcucccagaacaucaccgaggaguucuaccagagcacgugcuccgccgucagcaagggcuaccucuccgcccugcgcaccgggugguacaccagcgugaucaccaucgagcuguccaacaucaaggagaacaagugcaacggcaccgacgccaaggugaagcucaucaagcaggagcuggacaaguacaagaacgcggucacggagcugcagcuccugaugcagagcaccccggccgccggguccggcagcgccaucugcuccgggaucgcggugugcaaggugcugcaccucgagggcgaggucaacaagaucaagaacgcccugcugagcaccaacaaggccguggugucccucagcaacggcgucuccgugcugaccuucaaggugcuggaccucaagaacuacaucgacaagcagcugcugcccauccucaacaagcagagcugcuccaucagcaacaucgagacggucaucgaguuccagcagaagaacaaccggcugcuggagaucacccgcgaguucuccgugaacgccggggugaccacccccgucagcacguacaugcucaccaacagcgagcugcugucccucaucaacgacaugcccaucaccaacgaccagaagaagcugaugagcaacaacgugcagaucgugcggcagcaguccuacagcaucaugugcaucaucaaggaggagguccuggccuacguggugcagcucccgcuguacggcgucaucgacacccccugcuggaagcugcacacgagcccccucugcaccaccaacaccaaggagggguccaacaucugccugacgcgcaccgaccggggcugguacugcgacaacgcgggguccgugagcuucuucccccaggccgagaccugcaaggugcaguccaaccgcgucuucugcgacaccaugaacagccggacgcucccguccgaggugaaccugugcaacaucgacaucuucaaccccaaguacgacugcaagaucaugaccagcaagaccgacgucuccagcuccgugaucaccagccugggcgccaucguguccugcuacggcaagacgaagugcaccgccagcaacaagaaccgggggaucaucaagaccuucuccaacggcugcgacuacgucagcaacaaggggguggacaccgugagcgucggcaacacgcucuacugcgugaacaagcaggagggcaagucccuguacgugaagggggagcccaucaucaacuucuacgacccccuggucuucccgagcgacgaguucgacgccuccaucagccaggugaacgagaagaucaaccagucccucgcguucauccgcaagagcgacgagcugcugcacaacgugaacgucggcaaguccaccaccaacaucaugaucaccaccaucaucaucgugaucaucgugauccuccugcugcucaucgccgucgggcuguuccuguacugcaaggcccggugaggacuaguguccaccugucccuccugggcugcuggauugucucguuuuccugccaaauaaacaggaucagcgcuuuacagaucuaaaaaaaaaaaaaaaaaaaaaaaaaaaaaaaaaaaaaaaaaaaaaaaaaaaaaaaaaaaaaaaaugcaucccccccccccccccccccccccccccccccaaaggcucuuuucagagccaccagaauu

SEQ ID NO: 16702 - RNA, 1856 nt, Artificial Sequence
  mRNA product Design e-2 comprising derived and/or modified sequence from HRSV(Memphis-37)__AIY60640.1__F-del_DSCav1_mut4 (opt2)
gggagacccgugacccggaaguuguacggcuacgcgacuuucccucccacaaacccucgcgcccuuccuuuccuacuugggcccggcagaaagcuuaccauggagcuccccauccucaagaccaacgccaucaccaccauccucgccgccgucacccucugcuucgccuccucccagaacaucaccgaggaguucuaccaguccaccugcuccgccgucuccaagggcuaccucuccgcccuccgcaccggcugguacaccuccgucaucaccaucgagcucuccaacaucaaggagaacaagugcaacggcaccgacgccaaggucaagcucaucaagcaggagcucgacaaguacaagaacgccgucaccgagcuccagcuccucaugcaguccacccccgccgccggcuccggcuccgccaucugcuccggcaucgccgucugcaagguccuccaccucgagggcgaggucaacaagaucaagaacgcccuccucuccaccaacaaggccgucgucucccucuccaacggcgucuccguccucaccuucaagguccucgaccucaagaacuacaucgacaagcagcuccuccccauccucaacaagcaguccugcuccaucuccaacaucgagaccgucaucgaguuccagcagaagaacaaccgccuccucgagaucacccgcgaguucuccgucaacgccggcgucaccacccccgucuccaccuacaugcucaccaacuccgagcuccucucccucaucaacgacaugcccaucaccaacgaccagaagaagcucauguccaacaacguccagaucguccgccagcaguccuacuccaucaugugcaucaucaaggaggagguccucgccuacgucguccagcucccccucuacggcgucaucgacacccccugcuggaagcuccacaccuccccccucugcaccaccaacaccaaggagggcuccaacaucugccucacccgcaccgaccgcggcugguacugcgacaacgccggcuccgucuccuucuucccccaggccgagaccugcaagguccaguccaaccgcgucuucugcgacaccaugaacucccgcacccuccccuccgaggucaaccucugcaacaucgacaucuucaaccccaaguacgacugcaagaucaugaccuccaagaccgacgucuccuccuccgucaucaccucccucggcgccaucgucuccugcuacggcaagaccaagugcaccgccuccaacaagaaccgcggcaucaucaagaccuucuccaacggcugcgacuacgucuccaacaagggcgucgacaccgucuccgucggcaacacccucuacugcgucaacaagcaggagggcaagucccucuacgucaagggcgagcccaucaucaacuucuacgacccccucgucuuccccuccgacgaguucgacgccuccaucucccaggucaacgagaagaucaaccagucccucgccuucauccgcaaguccgacgagcuccuccacaacgucaacgucggcaaguccaccaccaacaucaugaucaccaccaucaucaucgucaucaucgucauccuccuccuccucaucgccgucggccucuuccucuacugcaaggcccgcugaggacuaguguccaccugucccuccugggcugcuggauugucucguuuuccugccaaauaaacaggaucagcgcuuuacagaucuaaaaaaaaaaaaaaaaaaaaaaaaaaaaaaaaaaaaaaaaaaaaaaaaaaaaaaaaaaaaaaaaugcaucccccccccccccccccccccccccccccccaaaggcucuuuucagagccaccagaauu

SEQ ID NO: 16703 - RNA, 1856 nt, Artificial Sequence
  mRNA product Design e-2 comprising derived and/or modified sequence from HRSV(Memphis-37)__AIY60640.1__F-del_DSCav1_mut4 (opt3)
gggagacccgugacccggaaguuguacggcuacgcgacuuucccucccacaaacccucgcgcccuuccuuuccuacuugggcccggcagaaagcuuaccauggagcugcccauccucaagaccaacgccauuacaacuauacuugcugcagugacgcugugcuucgccagcucccagaauaucaccgaagaguuuuaccaaucuacauguucagcggucaguaaaggcuauuugagcgcuuuaagaacugggugguacaccuccguuauuacaaucgaacugucuaacauuaaggagaauaaaugcaacggaaccgacgccaaggugaaacuaaucaagcaggaacucgauaaguauaaaaaugcaguaacugagcugcagcuucugaugcagucgaccccugccgcugguucaggcagcgcaauauguagugggaucgccgugugcaaggucuugcaccucgagggagaagugaacaaaauuaagaaugcucugcuguccacaaacaaagccguugugucucucagcaauggcgucuccguguuaacguucaagguacuggaccuuaagaacuacaucgauaaacaauugcugccaauucuaaauaagcagucauguaguaucagcaacauagagacuguuauugaauuucagcagaaaaauaacaggcuccuggagaucacccgggaguucucugugaaugcgggugucacaacuccgguguccaccuauaugcuuacaaacucagaacuguugagccucauuaacgacaugcccaucaccaaugaucaaaagaaacugaugaguaacaaugugcagaucguccgccagcagucuuacuccauuaugugcauaaucaaggaggaaguuuuagcauaugugguacaacugccucucuacggggugauugacacgccauguuggaaacuucauacuagcccccugugcacaaccaacacuaaggagggaucgaauaucuguuugacacgaaccgaucguggcugguacugcgacaacgccggcucugucuccuuuuucccucaggcugaaacguguaaggugcagucaaauagaguguuuugcgauaccaugaacaguagaacacugccaagcgaggugaaucucugcaacauagacauuuucaaucccaaauaugauuguaagaucaugacuuccaaaaccgacgucucuagcucagugaucacaagucugggggccauuguauccugcuacggaaagacuaaauguaccgcaagcaacaagaauagggguaucauuaagacauuuucuaacggcugcgauuauguuucaaauaaagggguggacaccgucagugugggaaacacucuuuacugugucaacaagcaagagggcaaaagccuguaugugaagggugaaccuauaaucaauuucuacgacccauugguuuuuccguccgaugaguucgacgcuucuauuucgcagguuaacgagaaaaucaaucagagccucgccuuuauccggaaguccgaugaacuguuacacaacguaaaugucgggaagucaacgacaaacauuaugauaaccacuaucauuaucgugauuaucguuauacugcuacuccugaucgcggugggacuuuucuuguauugcaaagcccgcugaggacuaguguccaccugucccuccugggcugcuggauugucucguuuuccugccaaauaaacaggaucagcgcuuuacagaucuaaaaaaaaaaaaaaaaaaaaaaaaaaaaaaaaaaaaaaaaaaaaaaaaaaaaaaaaaaaaaaaaugcaucccccccccccccccccccccccccccccccaaaggcucuuuucagagccaccagaauu

SEQ ID NO: 16704 - RNA, 1856 nt, Artificial Sequence
  mRNA product Design e-2 comprising derived and/or modified sequence from HRSV(Memphis-37)__AIY60640.1__F-del_DSCav1_mut4 (opt4)
gggagacccgugacccggaaguuguacggcuacgcgacuuucccucccacaaacccucgcgcccuuccuuuccuacuugggcccggcagaaagcuuaccauggagcugcccauccugaagaccaacgccaucaccaccauccuggccgccgugacccugugcuucgccagcagccagaacaucaccgaggaguucuaccagagcaccugcagcgccgugagcaagggcuaccugagcgcccugagaaccggcugguacaccagcgugaucaccaucgagcugagcaacaucaaggagaacaagugcaacggcaccgacgccaaggugaagcugaucaagcaggagcuggacaaguacaagaacgccgugaccgagcugcagcugcugaugcagagcacccccgccgccggcagcggcagcgccaucugcagcggcaucgccgugugcaaggugcugcaccuggagggcgaggugaacaagaucaagaacgcccugcugagcaccaacaaggccguggugagccugagcaacggcgugagcgugcugaccuucaaggugcuggaccugaagaacuacaucgacaagcagcugcugcccauccugaacaagcagagcugcagcaucagcaacaucgagaccgugaucgaguuccagcagaagaacaacagacugcuggagaucaccagagaguucagcgugaacgccggcgugaccacccccgugagcaccuacaugcugaccaacagcgagcugcugagccugaucaacgacaugcccaucaccaacgaccagaagaagcugaugagcaacaacgugcagaucgugagacagcagagcuacagcaucaugugcaucaucaaggaggaggugcuggccuacguggugcagcugccccuguacggcgugaucgacacccccugcuggaagcugcacaccagcccccugugcaccaccaacaccaaggagggcagcaacaucugccugaccagaaccgacagaggcugguacugcgacaacgccggcagcgugagcuucuucccccaggccgagaccugcaaggugcagagcaacagaguguucugcgacaccaugaacagcagaacccugcccagcgaggugaaccugugcaacaucgacaucuucaaccccaaguacgacugcaagaucaugaccagcaagaccgacgugagcagcagcgugaucaccagccugggcgccaucgugagcugcuacggcaagaccaagugcaccgccagcaacaagaacagaggcaucaucaagaccuucagcaacggcugcgacuacgugagcaacaagggcguggacaccgugagcgugggcaacacccuguacugcgugaacaagcaggagggcaagagccuguacgugaagggcgagcccaucaucaacuucuacgacccccugguguuccccagcgacgaguucgacgccagcaucagccaggugaacgagaagaucaaccagagccuggccuucaucagaaagagcgacgagcugcugcacaacgugaacgugggcaagagcaccaccaacaucaugaucaccaccaucaucaucgugaucaucgugauccugcugcugcugaucgccgugggccuguuccuguacugcaaggccagaugaggacuaguguccaccugucccuccugggcugcuggauugucucguuuuccugccaaauaaacaggaucagcgcuuuacagaucuaaaaaaaaaaaaaaaaaaaaaaaaaaaaaaaaaaaaaaaaaaaaaaaaaaaaaaaaaaaaaaaaugcaucccccccccccccccccccccccccccccccaaaggcucuuuucagagccaccagaauu

SEQ ID NO: 16705 - RNA, 1856 nt, Artificial Sequence
  mRNA product Design e-2 comprising derived and/or modified sequence from HRSV(Memphis-37)__AIY60640.1__F-del_DSCav1_mut4 (opt5)
gggagacccgugacccggaaguuguacggcuacgcgacuuucccucccacaaacccucgcgcccuuccuuuccuacuugggcccggcagaaagcuuaccauggagcugcccauccucaagaccaacgccauuacaacgauccuggcugccgugacccuuugcuucgcgagcucccagaauauuacagaagaguuuuaccaaucuaccuguagcgcugucuccaaaggcuaucugucugcccucagaacagggugguacaccagcguuaucacaauugaacuguccaacaucaaggagaauaaaugcaacggaaccgacgccaaggugaaacuuaucaagcaggaacuggauaaguauaaaaaugcugugacggagcuccagcugcugaugcagucuaccccugccgcuggcagcggguccgccauuuguagcggaaucgcggucugcaaggugcuccaccuggagggcgaaguuaacaaaauuaagaaugcccuucugucuacaaacaaagcuguggucucccucagcaauggggugucuguucugaccuucaaggugcuugaccugaagaacuacaucgauaaacaacuccugccgauucugaauaagcaguccuguagcaucucuaacauugagacagucaucgaauuucagcagaaaaauaaccggcuccuggagaucacccgcgaguucuccgugaaugccggagugacgacacccgucagcaccuauaugcuuacaaacuccgaacugcucucucugauuaacgacaugccuaucaccaaugaucaaaagaaacuuaugagcaacaauguucagauugugagacagcaguccuacagcaucaugugcauuaucaaggaggaagugcuggcuuaugucgugcaacucccccuguacggcguuaucgacaccccuuguuggaaacugcauacaucuccccucugcacgaccaacacaaaggagggcuccaauauuugucugacccggacagaucgcgggugguacugcgacaacgccggaagcgugagcuuuuucccucaggcggaaaccuguaagguccagucuaauagaguguuuugcgauacgaugaacuccagaacacugccgucugagguuaaucucugcaacaucgacauuuucaaucccaaauaugauuguaagaucaugaccagcaaaaccgacguguccagcucugucauuacaucccugggcgccaucgugagcugcuacgggaagaccaaauguacagcuucuaacaagaaucggggaaucauuaagacguuuuccaacggcugcgauuaugucagcaauaaagggguggacaccguuuccgugggaaacacacuuuacugugucaacaagcaagagggcaaaucucuguaugugaagggcgaaccuaucauuaauuucuacgacccccucguuuuuccuagcgaugaguucgacgccuccaucucucaggugaacgaaaagauuaaucagagccuggcuuuuauccgcaaguccgaugagcugcuccacaacgucaauguggggaaaagcaccacaaacauuaugaucaccacgaucauuaucgugauuaucguuauucugcuucugcucaucgccgucggacuguuccuguauugcaaagccagaugaggacuaguguccaccugucccuccugggcugcuggauugucucguuuuccugccaaauaaacaggaucagcgcuuuacagaucuaaaaaaaaaaaaaaaaaaaaaaaaaaaaaaaaaaaaaaaaaaaaaaaaaaaaaaaaaaaaaaaaugcaucccccccccccccccccccccccccccccccaaaggcucuuuucagagccaccagaauu

SEQ ID NO: 16706 - RNA, 1856 nt, Artificial Sequence
  mRNA product Design e-2 comprising derived and/or modified sequence from HRSV(Memphis-37)__AIY60640.1__F-del_DSCav1_mut4 (opt6)
gggagacccgugacccggaaguuguacggcuacgcgacuuucccucccacaaacccucgcgcccuuccuuuccuacuugggcccggcagaaagcuuaccauggaacuaccaauacucaaaacaaacgcaauaacaacuauacuagccgcaguuacacucugcuucgcuucaucacaaaauaucacagaagaauuuuaccaaucuacauguucagcuguauccaaagguuaccuuucagcacuacgaacaggaugguauaccucaguaaucaccaucgaacucucgaacauaaaagaaaacaaauguaacggaaccgaugcuaaagucaagcucauaaaacaagaacuagacaaauacaaaaacgcaguaaccgaacuacaacuacuuaugcaaucaacaccagcugcaggcucaggcucagcaaucugcucaggcauagcuguaugcaaaguacuacaucuagaaggagaaguaaacaaaauaaaaaacgcauuauuaucaacaaauaaagcaguaguaucacuaucaaauggaguaucaguacucacauucaaaguacuagaucuaaaaaacuacauugacaaacaauuacuaccaauccucaacaaacaaucaugcucaauauccaacauagaaacaguaauagaauuucaacaaaaaaacaaucgacuacuagaaauaacaagagaauuuucagucaaugccggaguuacaacacccguaagcacuuacaugcuaaccaacucagaacuacuaucacuaauaaacgacaugccaauuacaaacgaccaaaaaaaacuaaugucaaauaacguacaaauaguacgucaacaaucauacucaauaaugugcauaauaaaagaagaaguccuagcauacguaguacaauuacccuuauauggcguaauagacacaccaugcuggaaacuacacacauccccacucugcaccaccaacaccaaagaaggcuccaacauaugucuaacccgaaccgacagagguugguauugugauaacgcuggcuccguaucauucuucccacaagcagaaacauguaaaguacaaucaaacagaguauucugcgauacaaugaauagcagaacacuaccaucagaaguaaacuuaugcaacaucgacaucuucaaucccaaauacgacugcaaaauaaugacauccaaaacugacguuucuucaagcguaauaacaucuuuaggagcaauaguauccugcuacggaaaaacuaaaugcacagcauccaauaaaaaccguggaauaauaaaaacauucucaaauggcugcgacuacgucucaaacaaaggcguagacaccguuagugucggaaacacacuauauugcguaaauaaacaagaaggaaaauccuuauacguaaaaggcgaaccaauaauuaacuucuaugacccccucguauuuccauccgaugaauuugacgcaucaaucucgcaaguaaacgaaaaaauaaaccaaagccuagcauucauaagaaaauccgacgaacuacuccacaauguaaauguaggaaaaucaacuaccaacauaaugauuacuacuauaauaauaguaauuauagucaucuuacuacuauuaauagcagucggauuauuccuauacugcaaagcaagauagggacuaguguccaccugucccuccugggcugcuggauugucucguuuuccugccaaauaaacaggaucagcgcuuuacagaucuaaaaaaaaaaaaaaaaaaaaaaaaaaaaaaaaaaaaaaaaaaaaaaaaaaaaaaaaaaaaaaaaugcaucccccccccccccccccccccccccccccccaaaggcucuuuucagagccaccagaauu

SEQ ID NO: 16707 - RNA, 1856 nt, Artificial Sequence
  mRNA product Design e-2 comprising derived and/or modified sequence from HRSV(Memphis-37)__AIY60640.1__F-del_DSCav1_mut4 (opt11)
gggagacccgugacccggaaguuguacggcuacgcgacuuucccucccacaaacccucgcgcccuuccuuuccuacuugggcccggcagaaagcuuaccauggagcuccccauccuaaaaaccaacgccaucaccaccauccucgccgccgucacccuaugcuucgcuucaucacaaaacaucaccgaagaauuuuaccaaucuaccugcuccgccgucuccaaaggauaucucagcgcccuacggaccggcugguacaccuccgucauaaccaucgaacucaguaacaucaaagaaaacaaaugcaacggcaccgacgccaaagucaaacuaaucaaacaagaacuagauaaauacaaaaacgcggucaccgaacuacaacuccuaaugcaaagcacccccgccgccggauccggcuccgccauaugcuccggcauugcugucugcaaaguacuacaccucgagggcgaggucaacaaaaucaaaaacgcacuacucagcacuaauaaagccguaguaucccuaucaaacggugucucagucuuaacauucaaaguacucgaccuaaagaacuacaucgacaaacaacuccuacccauccucaacaagcaguccuguucuaucucaaacaucgaaaccgucaucgaauuucaacaaaagaacaaccgccuccucgaaaucacacgcgaguucuccgucaacgcaggaguaaccacccccgucuccaccuacaugcucacaaacucggaacuccucucacuaaucaacgacaugcccaucaccaacgaccaaaagaaacucaugagcaacaacguucaaaucguccgccaacaaucauacuccaucaugugcauaaucaaagaagaaguccuagcuuacgucguccagcugccccucuacggagucaucgacacgcccugcuggaaacuacacacaagcccccucugcaccaccaacaccaaagaaggcuccaacauaugccucacacggaccgaccgcgguugguacugcgacaacgccggcuccgucuccuucuucccccaagcagaaacuugcaaaguccaauccaaccgcguauucugcgacacaaugaacagcagaacacucccuagcgaagucaaccucugcaacaucgacauauucaaccccaaauacgacugcaaaaucaugacgucaaaaaccgacgucuccagcuccguuaucaccucacucggcgccaucgucagcugcuacggcaaaacuaaaugcaccgccuccaacaaaaaccgcggcaucauuaaaaccuucagcaacggcugcgacuacgucuccaacaaaggugucgauacgguauccgucggaaacacccuauacugcgucaacaaacaagaaggcaaaucucucuacgucaaaggcgaacccauaaucaauuucuacgacccccuagucuuccccuccgaugaauuugacgccuccaucagccaagucaacgagaaaaucaaccaaucacuagccuucauccggaaauccgacgaacuccuacacaacguaaacgucggcaaauccaccaccaauauaaugaucacaaccaucaucaucguaaucaucgucauccuccuccuacucaucgccgucggauuauucuuauacugcaaagcccgcuaaggacuaguguccaccugucccuccugggcugcuggauugucucguuuuccugccaaauaaacaggaucagcgcuuuacagaucuaaaaaaaaaaaaaaaaaaaaaaaaaaaaaaaaaaaaaaaaaaaaaaaaaaaaaaaaaaaaaaaaugcaucccccccccccccccccccccccccccccccaaaggcucuuuucagagccaccagaauu

SEQ ID NO: 16708 - RNA, 1826 nt, Artificial Sequence
  mRNA product Design e-3 comprising derived and/or modified sequence from HRSV(Memphis-37)__AIY60640.1__F-del_DSCav1_mut4 (opt1)
gggagacuuucccauucuguagcagaauuugguguugccuguggucuuggucccgcggagaagcuuaccauggagcugcccauccucaagaccaacgccaucaccacgauccuggccgcggugacccugugcuucgccagcucccagaacaucaccgaggaguucuaccagagcacgugcuccgccgucagcaagggcuaccucuccgcccugcgcaccgggugguacaccagcgugaucaccaucgagcuguccaacaucaaggagaacaagugcaacggcaccgacgccaaggugaagcucaucaagcaggagcuggacaaguacaagaacgcggucacggagcugcagcuccugaugcagagcaccccggccgccggcuccgggagcgcgaucugcuccggcaucgccgucugcaaggugcugcaccucgagggcgaggugaacaagaucaagaacgcccugcuguccaccaacaaggccgucgugagccucuccaacggggugagcguccugaccuucaaggugcuggaccucaagaacuacaucgacaagcagcugcugcccauccugaacaagcagagcugcuccaucagcaacaucgagaccgucaucgaguuccagcagaagaacaaccgccuccuggagaucacgcgggaguucagcgugaacgcgggcgugaccacccccgucuccaccuacaugcugacgaacagcgagcuccugucccugaucaacgacaugccgaucaccaacgaccagaagaagcucaugagcaacaacgugcagaucgugcgccagcaguccuacagcaucaugugcaucaucaaggaggagguccuggccuacguggugcagcugccccucuacggggucaucgacacccccugcuggaagcugcacaccagcccccugugcacgaccaacaccaaggagggcuccaacaucugccucacccggacggaccgcgggugguacugcgacaacgccggcagcguguccuucuucccgcaggccgagaccugcaagguccagagcaaccggguguucugcgacaccaugaacucccggacccugcccagcgaggugaaccucugcaacaucgacaucuucaaccccaaguacgacugcaagaucaugacguccaagaccgacgucagcuccagcgugaucaccucccugggcgccaucgugagcugcuacgggaagaccaagugcacggcgagcaacaagaaccgcggcaucaucaagaccuucuccaacgggugcgacuacgucagcaacaagggcguggacaccguguccgucggcaacacccuguacugcgugaacaagcaggagggcaagagccucuacgugaagggggagcccaucaucaacuucuacgacccgcuggucuuccccuccgacgaguucgacgccagcaucucccaggugaacgagaagaucaaccagagccuggccuucauccggaaguccgacgagcuccugcacaacgugaacgucggcaagagcaccacgaacaucaugaucaccaccaucaucaucgugaucaucgugauccugcugcuccugaucgccgucgggcuguuccucuacugcaaggcccgcugaggacuaguguccaccugucccuccugggcugcuggauugucucguuuuccugccaaauaaacaggaucagcgcuuuacagaucuaaaaaaaaaaaaaaaaaaaaaaaaaaaaaaaaaaaaaaaaaaaaaaaaaaaaaaaaaaaaaaaaugcaucccccccccccccccccccccccccccccccaaaggcucuuuucagagccaccagaauu

SEQ ID NO: 16709 - RNA, 1826 nt, Artificial Sequence
  mRNA product Design e-3 comprising derived and/or modified sequence from HRSV(Memphis-37)__AIY60640.1__F-del_DSCav1_mut4 (opt1)
gggagacuuucccauucuguagcagaauuugguguugccuguggucuuggucccgcggagaagcuuaccauggagcugcccauccucaagaccaacgccaucaccacgauccuggccgcggugacccugugcuucgccagcucccagaacaucaccgaggaguucuaccagagcacgugcuccgccgucagcaagggcuaccucuccgcccugcgcaccgggugguacaccagcgugaucaccaucgagcuguccaacaucaaggagaacaagugcaacggcaccgacgccaaggugaagcucaucaagcaggagcuggacaaguacaagaacgcggucacggagcugcagcuccugaugcagagcaccccggccgccggguccggcagcgccaucugcuccgggaucgcggugugcaaggugcugcaccucgagggcgaggucaacaagaucaagaacgcccugcugagcaccaacaaggccguggugucccucagcaacggcgucuccgugcugaccuucaaggugcuggaccucaagaacuacaucgacaagcagcugcugcccauccucaacaagcagagcugcuccaucagcaacaucgagacggucaucgaguuccagcagaagaacaaccggcugcuggagaucacccgcgaguucuccgugaacgccggggugaccacccccgucagcacguacaugcucaccaacagcgagcugcugucccucaucaacgacaugcccaucaccaacgaccagaagaagcugaugagcaacaacgugcagaucgugcggcagcaguccuacagcaucaugugcaucaucaaggaggagguccuggccuacguggugcagcucccgcuguacggcgucaucgacacccccugcuggaagcugcacacgagcccccucugcaccaccaacaccaaggagggguccaacaucugccugacgcgcaccgaccggggcugguacugcgacaacgcgggguccgugagcuucuucccccaggccgagaccugcaaggugcaguccaaccgcgucuucugcgacaccaugaacagccggacgcucccguccgaggugaaccugugcaacaucgacaucuucaaccccaaguacgacugcaagaucaugaccagcaagaccgacgucuccagcuccgugaucaccagccugggcgccaucguguccugcuacggcaagacgaagugcaccgccagcaacaagaaccgggggaucaucaagaccuucuccaacggcugcgacuacgucagcaacaaggggguggacaccgugagcgucggcaacacgcucuacugcgugaacaagcaggagggcaagucccuguacgugaagggggagcccaucaucaacuucuacgacccccuggucuucccgagcgacgaguucgacgccuccaucagccaggugaacgagaagaucaaccagucccucgcguucauccgcaagagcgacgagcugcugcacaacgugaacgucggcaaguccaccaccaacaucaugaucaccaccaucaucaucgugaucaucgugauccuccugcugcucaucgccgucgggcuguuccuguacugcaaggcccggugaggacuaguguccaccugucccuccugggcugcuggauugucucguuuuccugccaaauaaacaggaucagcgcuuuacagaucuaaaaaaaaaaaaaaaaaaaaaaaaaaaaaaaaaaaaaaaaaaaaaaaaaaaaaaaaaaaaaaaaugcaucccccccccccccccccccccccccccccccaaaggcucuuuucagagccaccagaauu

SEQ ID NO: 16710 - RNA, 1826 nt, Artificial Sequence
  mRNA product Design e-3 comprising derived and/or modified sequence from HRSV(Memphis-37)__AIY60640.1__F-del_DSCav1_mut4 (opt2)
gggagacuuucccauucuguagcagaauuugguguugccuguggucuuggucccgcggagaagcuuaccauggagcuccccauccucaagaccaacgccaucaccaccauccucgccgccgucacccucugcuucgccuccucccagaacaucaccgaggaguucuaccaguccaccugcuccgccgucuccaagggcuaccucuccgcccuccgcaccggcugguacaccuccgucaucaccaucgagcucuccaacaucaaggagaacaagugcaacggcaccgacgccaaggucaagcucaucaagcaggagcucgacaaguacaagaacgccgucaccgagcuccagcuccucaugcaguccacccccgccgccggcuccggcuccgccaucugcuccggcaucgccgucugcaagguccuccaccucgagggcgaggucaacaagaucaagaacgcccuccucuccaccaacaaggccgucgucucccucuccaacggcgucuccguccucaccuucaagguccucgaccucaagaacuacaucgacaagcagcuccuccccauccucaacaagcaguccugcuccaucuccaacaucgagaccgucaucgaguuccagcagaagaacaaccgccuccucgagaucacccgcgaguucuccgucaacgccggcgucaccacccccgucuccaccuacaugcucaccaacuccgagcuccucucccucaucaacgacaugcccaucaccaacgaccagaagaagcucauguccaacaacguccagaucguccgccagcaguccuacuccaucaugugcaucaucaaggaggagguccucgccuacgucguccagcucccccucuacggcgucaucgacacccccugcuggaagcuccacaccuccccccucugcaccaccaacaccaaggagggcuccaacaucugccucacccgcaccgaccgcggcugguacugcgacaacgccggcuccgucuccuucuucccccaggccgagaccugcaagguccaguccaaccgcgucuucugcgacaccaugaacucccgcacccuccccuccgaggucaaccucugcaacaucgacaucuucaaccccaaguacgacugcaagaucaugaccuccaagaccgacgucuccuccuccgucaucaccucccucggcgccaucgucuccugcuacggcaagaccaagugcaccgccuccaacaagaaccgcggcaucaucaagaccuucuccaacggcugcgacuacgucuccaacaagggcgucgacaccgucuccgucggcaacacccucuacugcgucaacaagcaggagggcaagucccucuacgucaagggcgagcccaucaucaacuucuacgacccccucgucuuccccuccgacgaguucgacgccuccaucucccaggucaacgagaagaucaaccagucccucgccuucauccgcaaguccgacgagcuccuccacaacgucaacgucggcaaguccaccaccaacaucaugaucaccaccaucaucaucgucaucaucgucauccuccuccuccucaucgccgucggccucuuccucuacugcaaggcccgcugaggacuaguguccaccugucccuccugggcugcuggauugucucguuuuccugccaaauaaacaggaucagcgcuuuacagaucuaaaaaaaaaaaaaaaaaaaaaaaaaaaaaaaaaaaaaaaaaaaaaaaaaaaaaaaaaaaaaaaaugcaucccccccccccccccccccccccccccccccaaaggcucuuuucagagccaccagaauu

SEQ ID NO: 16711 - RNA, 1826 nt, Artificial Sequence
  mRNA product Design e-3 comprising derived and/or modified sequence from HRSV(Memphis-37)__AIY60640.1__F-del_DSCav1_mut4 (opt3)
gggagacuuucccauucuguagcagaauuugguguugccuguggucuuggucccgcggagaagcuuaccauggagcugcccauccucaagaccaacgccauuacaacuauacuugcugcagugacgcugugcuucgccagcucccagaauaucaccgaagaguuuuaccaaucuacauguucagcggucaguaaaggcuauuugagcgcuuuaagaacugggugguacaccuccguuauuacaaucgaacugucuaacauuaaggagaauaaaugcaacggaaccgacgccaaggugaaacuaaucaagcaggaacucgauaaguauaaaaaugcaguaacugagcugcagcuucugaugcagucgaccccugccgcugguucaggcagcgcaauauguagugggaucgccgugugcaaggucuugcaccucgagggagaagugaacaaaauuaagaaugcucugcuguccacaaacaaagccguugugucucucagcaauggcgucuccguguuaacguucaagguacuggaccuuaagaacuacaucgauaaacaauugcugccaauucuaaauaagcagucauguaguaucagcaacauagagacuguuauugaauuucagcagaaaaauaacaggcuccuggagaucacccgggaguucucugugaaugcgggugucacaacuccgguguccaccuauaugcuuacaaacucagaacuguugagccucauuaacgacaugcccaucaccaaugaucaaaagaaacugaugaguaacaaugugcagaucguccgccagcagucuuacuccauuaugugcauaaucaaggaggaaguuuuagcauaugugguacaacugccucucuacggggugauugacacgccauguuggaaacuucauacuagcccccugugcacaaccaacacuaaggagggaucgaauaucuguuugacacgaaccgaucguggcugguacugcgacaacgccggcucugucuccuuuuucccucaggcugaaacguguaaggugcagucaaauagaguguuuugcgauaccaugaacaguagaacacugccaagcgaggugaaucucugcaacauagacauuuucaaucccaaauaugauuguaagaucaugacuuccaaaaccgacgucucuagcucagugaucacaagucugggggccauuguauccugcuacggaaagacuaaauguaccgcaagcaacaagaauagggguaucauuaagacauuuucuaacggcugcgauuauguuucaaauaaagggguggacaccgucagugugggaaacacucuuuacugugucaacaagcaagagggcaaaagccuguaugugaagggugaaccuauaaucaauuucuacgacccauugguuuuuccguccgaugaguucgacgcuucuauuucgcagguuaacgagaaaaucaaucagagccucgccuuuauccggaaguccgaugaacuguuacacaacguaaaugucgggaagucaacgacaaacauuaugauaaccacuaucauuaucgugauuaucguuauacugcuacuccugaucgcggugggacuuuucuuguauugcaaagcccgcugaggacuaguguccaccugucccuccugggcugcuggauugucucguuuuccugccaaauaaacaggaucagcgcuuuacagaucuaaaaaaaaaaaaaaaaaaaaaaaaaaaaaaaaaaaaaaaaaaaaaaaaaaaaaaaaaaaaaaaaugcaucccccccccccccccccccccccccccccccaaaggcucuuuucagagccaccagaauu

SEQ ID NO: 16712 - RNA, 1826 nt, Artificial Sequence
  mRNA product Design e-3 comprising derived and/or modified sequence from HRSV(Memphis-37)__AIY60640.1__F-del_DSCav1_mut4 (opt4)
gggagacuuucccauucuguagcagaauuugguguugccuguggucuuggucccgcggagaagcuuaccauggagcugcccauccugaagaccaacgccaucaccaccauccuggccgccgugacccugugcuucgccagcagccagaacaucaccgaggaguucuaccagagcaccugcagcgccgugagcaagggcuaccugagcgcccugagaaccggcugguacaccagcgugaucaccaucgagcugagcaacaucaaggagaacaagugcaacggcaccgacgccaaggugaagcugaucaagcaggagcuggacaaguacaagaacgccgugaccgagcugcagcugcugaugcagagcacccccgccgccggcagcggcagcgccaucugcagcggcaucgccgugugcaaggugcugcaccuggagggcgaggugaacaagaucaagaacgcccugcugagcaccaacaaggccguggugagccugagcaacggcgugagcgugcugaccuucaaggugcuggaccugaagaacuacaucgacaagcagcugcugcccauccugaacaagcagagcugcagcaucagcaacaucgagaccgugaucgaguuccagcagaagaacaacagacugcuggagaucaccagagaguucagcgugaacgccggcgugaccacccccgugagcaccuacaugcugaccaacagcgagcugcugagccugaucaacgacaugcccaucaccaacgaccagaagaagcugaugagcaacaacgugcagaucgugagacagcagagcuacagcaucaugugcaucaucaaggaggaggugcuggccuacguggugcagcugccccuguacggcgugaucgacacccccugcuggaagcugcacaccagcccccugugcaccaccaacaccaaggagggcagcaacaucugccugaccagaaccgacagaggcugguacugcgacaacgccggcagcgugagcuucuucccccaggccgagaccugcaaggugcagagcaacagaguguucugcgacaccaugaacagcagaacccugcccagcgaggugaaccugugcaacaucgacaucuucaaccccaaguacgacugcaagaucaugaccagcaagaccgacgugagcagcagcgugaucaccagccugggcgccaucgugagcugcuacggcaagaccaagugcaccgccagcaacaagaacagaggcaucaucaagaccuucagcaacggcugcgacuacgugagcaacaagggcguggacaccgugagcgugggcaacacccuguacugcgugaacaagcaggagggcaagagccuguacgugaagggcgagcccaucaucaacuucuacgacccccugguguuccccagcgacgaguucgacgccagcaucagccaggugaacgagaagaucaaccagagccuggccuucaucagaaagagcgacgagcugcugcacaacgugaacgugggcaagagcaccaccaacaucaugaucaccaccaucaucaucgugaucaucgugauccugcugcugcugaucgccgugggccuguuccuguacugcaaggccagaugaggacuaguguccaccugucccuccugggcugcuggauugucucguuuuccugccaaauaaacaggaucagcgcuuuacagaucuaaaaaaaaaaaaaaaaaaaaaaaaaaaaaaaaaaaaaaaaaaaaaaaaaaaaaaaaaaaaaaaaugcaucccccccccccccccccccccccccccccccaaaggcucuuuucagagccaccagaauu

SEQ ID NO: 16713 - RNA, 1826 nt, Artificial Sequence
  mRNA product Design e-3 comprising derived and/or modified sequence from HRSV(Memphis-37)__AIY60640.1__F-del_DSCav1_mut4 (opt5)
gggagacuuucccauucuguagcagaauuugguguugccuguggucuuggucccgcggagaagcuuaccauggagcugcccauccucaagaccaacgccauuacaacgauccuggcugccgugacccuuugcuucgcgagcucccagaauauuacagaagaguuuuaccaaucuaccuguagcgcugucuccaaaggcuaucugucugcccucagaacagggugguacaccagcguuaucacaauugaacuguccaacaucaaggagaauaaaugcaacggaaccgacgccaaggugaaacuuaucaagcaggaacuggauaaguauaaaaaugcugugacggagcuccagcugcugaugcagucuaccccugccgcuggcagcggguccgccauuuguagcggaaucgcggucugcaaggugcuccaccuggagggcgaaguuaacaaaauuaagaaugcccuucugucuacaaacaaagcuguggucucccucagcaauggggugucuguucugaccuucaaggugcuugaccugaagaacuacaucgauaaacaacuccugccgauucugaauaagcaguccuguagcaucucuaacauugagacagucaucgaauuucagcagaaaaauaaccggcuccuggagaucacccgcgaguucuccgugaaugccggagugacgacacccgucagcaccuauaugcuuacaaacuccgaacugcucucucugauuaacgacaugccuaucaccaaugaucaaaagaaacuuaugagcaacaauguucagauugugagacagcaguccuacagcaucaugugcauuaucaaggaggaagugcuggcuuaugucgugcaacucccccuguacggcguuaucgacaccccuuguuggaaacugcauacaucuccccucugcacgaccaacacaaaggagggcuccaauauuugucugacccggacagaucgcgggugguacugcgacaacgccggaagcgugagcuuuuucccucaggcggaaaccuguaagguccagucuaauagaguguuuugcgauacgaugaacuccagaacacugccgucugagguuaaucucugcaacaucgacauuuucaaucccaaauaugauuguaagaucaugaccagcaaaaccgacguguccagcucugucauuacaucccugggcgccaucgugagcugcuacgggaagaccaaauguacagcuucuaacaagaaucggggaaucauuaagacguuuuccaacggcugcgauuaugucagcaauaaagggguggacaccguuuccgugggaaacacacuuuacugugucaacaagcaagagggcaaaucucuguaugugaagggcgaaccuaucauuaauuucuacgacccccucguuuuuccuagcgaugaguucgacgccuccaucucucaggugaacgaaaagauuaaucagagccuggcuuuuauccgcaaguccgaugagcugcuccacaacgucaauguggggaaaagcaccacaaacauuaugaucaccacgaucauuaucgugauuaucguuauucugcuucugcucaucgccgucggacuguuccuguauugcaaagccagaugaggacuaguguccaccugucccuccugggcugcuggauugucucguuuuccugccaaauaaacaggaucagcgcuuuacagaucuaaaaaaaaaaaaaaaaaaaaaaaaaaaaaaaaaaaaaaaaaaaaaaaaaaaaaaaaaaaaaaaaugcaucccccccccccccccccccccccccccccccaaaggcucuuuucagagccaccagaauu

SEQ ID NO: 16714 - RNA, 1826 nt, Artificial Sequence
  mRNA product Design e-3 comprising derived and/or modified sequence from HRSV(Memphis-37)__AIY60640.1__F-del_DSCav1_mut4 (opt6)
gggagacuuucccauucuguagcagaauuugguguugccuguggucuuggucccgcggagaagcuuaccauggaacuaccaauacucaaaacaaacgcaauaacaacuauacuagccgcaguuacacucugcuucgcuucaucacaaaauaucacagaagaauuuuaccaaucuacauguucagcuguauccaaagguuaccuuucagcacuacgaacaggaugguauaccucaguaaucaccaucgaacucucgaacauaaaagaaaacaaauguaacggaaccgaugcuaaagucaagcucauaaaacaagaacuagacaaauacaaaaacgcaguaaccgaacuacaacuacuuaugcaaucaacaccagcugcaggcucaggcucagcaaucugcucaggcauagcuguaugcaaaguacuacaucuagaaggagaaguaaacaaaauaaaaaacgcauuauuaucaacaaauaaagcaguaguaucacuaucaaauggaguaucaguacucacauucaaaguacuagaucuaaaaaacuacauugacaaacaauuacuaccaauccucaacaaacaaucaugcucaauauccaacauagaaacaguaauagaauuucaacaaaaaaacaaucgacuacuagaaauaacaagagaauuuucagucaaugccggaguuacaacacccguaagcacuuacaugcuaaccaacucagaacuacuaucacuaauaaacgacaugccaauuacaaacgaccaaaaaaaacuaaugucaaauaacguacaaauaguacgucaacaaucauacucaauaaugugcauaauaaaagaagaaguccuagcauacguaguacaauuacccuuauauggcguaauagacacaccaugcuggaaacuacacacauccccacucugcaccaccaacaccaaagaaggcuccaacauaugucuaacccgaaccgacagagguugguauugugauaacgcuggcuccguaucauucuucccacaagcagaaacauguaaaguacaaucaaacagaguauucugcgauacaaugaauagcagaacacuaccaucagaaguaaacuuaugcaacaucgacaucuucaaucccaaauacgacugcaaaauaaugacauccaaaacugacguuucuucaagcguaauaacaucuuuaggagcaauaguauccugcuacggaaaaacuaaaugcacagcauccaauaaaaaccguggaauaauaaaaacauucucaaauggcugcgacuacgucucaaacaaaggcguagacaccguuagugucggaaacacacuauauugcguaaauaaacaagaaggaaaauccuuauacguaaaaggcgaaccaauaauuaacuucuaugacccccucguauuuccauccgaugaauuugacgcaucaaucucgcaaguaaacgaaaaaauaaaccaaagccuagcauucauaagaaaauccgacgaacuacuccacaauguaaauguaggaaaaucaacuaccaacauaaugauuacuacuauaauaauaguaauuauagucaucuuacuacuauuaauagcagucggauuauuccuauacugcaaagcaagauagggacuaguguccaccugucccuccugggcugcuggauugucucguuuuccugccaaauaaacaggaucagcgcuuuacagaucuaaaaaaaaaaaaaaaaaaaaaaaaaaaaaaaaaaaaaaaaaaaaaaaaaaaaaaaaaaaaaaaaugcaucccccccccccccccccccccccccccccccaaaggcucuuuucagagccaccagaauu

SEQ ID NO: 16715 - RNA, 1826 nt, Artificial Sequence
  mRNA product Design e-3 comprising derived and/or modified sequence from HRSV(Memphis-37)__AIY60640.1__F-del_DSCav1_mut4 (opt11)
gggagacuuucccauucuguagcagaauuugguguugccuguggucuuggucccgcggagaagcuuaccauggagcuccccauccuaaaaaccaacgccaucaccaccauccucgccgccgucacccuaugcuucgcuucaucacaaaacaucaccgaagaauuuuaccaaucuaccugcuccgccgucuccaaaggauaucucagcgcccuacggaccggcugguacaccuccgucauaaccaucgaacucaguaacaucaaagaaaacaaaugcaacggcaccgacgccaaagucaaacuaaucaaacaagaacuagauaaauacaaaaacgcggucaccgaacuacaacuccuaaugcaaagcacccccgccgccggauccggcuccgccauaugcuccggcauugcugucugcaaaguacuacaccucgagggcgaggucaacaaaaucaaaaacgcacuacucagcacuaauaaagccguaguaucccuaucaaacggugucucagucuuaacauucaaaguacucgaccuaaagaacuacaucgacaaacaacuccuacccauccucaacaagcaguccuguucuaucucaaacaucgaaaccgucaucgaauuucaacaaaagaacaaccgccuccucgaaaucacacgcgaguucuccgucaacgcaggaguaaccacccccgucuccaccuacaugcucacaaacucggaacuccucucacuaaucaacgacaugcccaucaccaacgaccaaaagaaacucaugagcaacaacguucaaaucguccgccaacaaucauacuccaucaugugcauaaucaaagaagaaguccuagcuuacgucguccagcugccccucuacggagucaucgacacgcccugcuggaaacuacacacaagcccccucugcaccaccaacaccaaagaaggcuccaacauaugccucacacggaccgaccgcgguugguacugcgacaacgccggcuccgucuccuucuucccccaagcagaaacuugcaaaguccaauccaaccgcguauucugcgacacaaugaacagcagaacacucccuagcgaagucaaccucugcaacaucgacauauucaaccccaaauacgacugcaaaaucaugacgucaaaaaccgacgucuccagcuccguuaucaccucacucggcgccaucgucagcugcuacggcaaaacuaaaugcaccgccuccaacaaaaaccgcggcaucauuaaaaccuucagcaacggcugcgacuacgucuccaacaaaggugucgauacgguauccgucggaaacacccuauacugcgucaacaaacaagaaggcaaaucucucuacgucaaaggcgaacccauaaucaauuucuacgacccccuagucuuccccuccgaugaauuugacgccuccaucagccaagucaacgagaaaaucaaccaaucacuagccuucauccggaaauccgacgaacuccuacacaacguaaacgucggcaaauccaccaccaauauaaugaucacaaccaucaucaucguaaucaucgucauccuccuccuacucaucgccgucggauuauucuuauacugcaaagcccgcuaaggacuaguguccaccugucccuccugggcugcuggauugucucguuuuccugccaaauaaacaggaucagcgcuuuacagaucuaaaaaaaaaaaaaaaaaaaaaaaaaaaaaaaaaaaaaaaaaaaaaaaaaaaaaaaaaaaaaaaaugcaucccccccccccccccccccccccccccccccaaaggcucuuuucagagccaccagaauu

SEQ ID NO: 16716 - RNA, 1880 nt, Artificial Sequence
  mRNA product Design e-4 comprising derived and/or modified sequence from HRSV(Memphis-37)__AIY60640.1__F-del_DSCav1_mut4 (opt1)
gggagacuccugucgggcggaaguaggaggaguagaguuuaaaaacaguacucuuuuuccgguucgggacguaguugaagcaacgacaagccggauaaccgcucuugagacaggaagcuuaccauggagcugcccauccucaagaccaacgccaucaccacgauccuggccgcggugacccugugcuucgccagcucccagaacaucaccgaggaguucuaccagagcacgugcuccgccgucagcaagggcuaccucuccgcccugcgcaccgggugguacaccagcgugaucaccaucgagcuguccaacaucaaggagaacaagugcaacggcaccgacgccaaggugaagcucaucaagcaggagcuggacaaguacaagaacgcggucacggagcugcagcuccugaugcagagcaccccggccgccggcuccgggagcgcgaucugcuccggcaucgccgucugcaaggugcugcaccucgagggcgaggugaacaagaucaagaacgcccugcuguccaccaacaaggccgucgugagccucuccaacggggugagcguccugaccuucaaggugcuggaccucaagaacuacaucgacaagcagcugcugcccauccugaacaagcagagcugcuccaucagcaacaucgagaccgucaucgaguuccagcagaagaacaaccgccuccuggagaucacgcgggaguucagcgugaacgcgggcgugaccacccccgucuccaccuacaugcugacgaacagcgagcuccugucccugaucaacgacaugccgaucaccaacgaccagaagaagcucaugagcaacaacgugcagaucgugcgccagcaguccuacagcaucaugugcaucaucaaggaggagguccuggccuacguggugcagcugccccucuacggggucaucgacacccccugcuggaagcugcacaccagcccccugugcacgaccaacaccaaggagggcuccaacaucugccucacccggacggaccgcgggugguacugcgacaacgccggcagcguguccuucuucccgcaggccgagaccugcaagguccagagcaaccggguguucugcgacaccaugaacucccggacccugcccagcgaggugaaccucugcaacaucgacaucuucaaccccaaguacgacugcaagaucaugacguccaagaccgacgucagcuccagcgugaucaccucccugggcgccaucgugagcugcuacgggaagaccaagugcacggcgagcaacaagaaccgcggcaucaucaagaccuucuccaacgggugcgacuacgucagcaacaagggcguggacaccguguccgucggcaacacccuguacugcgugaacaagcaggagggcaagagccucuacgugaagggggagcccaucaucaacuucuacgacccgcuggucuuccccuccgacgaguucgacgccagcaucucccaggugaacgagaagaucaaccagagccuggccuucauccggaaguccgacgagcuccugcacaacgugaacgucggcaagagcaccacgaacaucaugaucaccaccaucaucaucgugaucaucgugauccugcugcuccugaucgccgucgggcuguuccucuacugcaaggcccgcugaggacuaguguccaccugucccuccugggcugcuggauugucucguuuuccugccaaauaaacaggaucagcgcuuuacagaucuaaaaaaaaaaaaaaaaaaaaaaaaaaaaaaaaaaaaaaaaaaaaaaaaaaaaaaaaaaaaaaaaugcaucccccccccccccccccccccccccccccccaaaggcucuuuucagagccaccagaauu

SEQ ID NO: 16717 - RNA, 1880 nt, Artificial Sequence
  mRNA product Design e-4 comprising derived and/or modified sequence from HRSV(Memphis-37)__AIY60640.1__F-del_DSCav1_mut4 (opt1)
gggagacuccugucgggcggaaguaggaggaguagaguuuaaaaacaguacucuuuuuccgguucgggacguaguugaagcaacgacaagccggauaaccgcucuugagacaggaagcuuaccauggagcugcccauccucaagaccaacgccaucaccacgauccuggccgcggugacccugugcuucgccagcucccagaacaucaccgaggaguucuaccagagcacgugcuccgccgucagcaagggcuaccucuccgcccugcgcaccgggugguacaccagcgugaucaccaucgagcuguccaacaucaaggagaacaagugcaacggcaccgacgccaaggugaagcucaucaagcaggagcuggacaaguacaagaacgcggucacggagcugcagcuccugaugcagagcaccccggccgccggguccggcagcgccaucugcuccgggaucgcggugugcaaggugcugcaccucgagggcgaggucaacaagaucaagaacgcccugcugagcaccaacaaggccguggugucccucagcaacggcgucuccgugcugaccuucaaggugcuggaccucaagaacuacaucgacaagcagcugcugcccauccucaacaagcagagcugcuccaucagcaacaucgagacggucaucgaguuccagcagaagaacaaccggcugcuggagaucacccgcgaguucuccgugaacgccggggugaccacccccgucagcacguacaugcucaccaacagcgagcugcugucccucaucaacgacaugcccaucaccaacgaccagaagaagcugaugagcaacaacgugcagaucgugcggcagcaguccuacagcaucaugugcaucaucaaggaggagguccuggccuacguggugcagcucccgcuguacggcgucaucgacacccccugcuggaagcugcacacgagcccccucugcaccaccaacaccaaggagggguccaacaucugccugacgcgcaccgaccggggcugguacugcgacaacgcgggguccgugagcuucuucccccaggccgagaccugcaaggugcaguccaaccgcgucuucugcgacaccaugaacagccggacgcucccguccgaggugaaccugugcaacaucgacaucuucaaccccaaguacgacugcaagaucaugaccagcaagaccgacgucuccagcuccgugaucaccagccugggcgccaucguguccugcuacggcaagacgaagugcaccgccagcaacaagaaccgggggaucaucaagaccuucuccaacggcugcgacuacgucagcaacaaggggguggacaccgugagcgucggcaacacgcucuacugcgugaacaagcaggagggcaagucccuguacgugaagggggagcccaucaucaacuucuacgacccccuggucuucccgagcgacgaguucgacgccuccaucagccaggugaacgagaagaucaaccagucccucgcguucauccgcaagagcgacgagcugcugcacaacgugaacgucggcaaguccaccaccaacaucaugaucaccaccaucaucaucgugaucaucgugauccuccugcugcucaucgccgucgggcuguuccuguacugcaaggcccggugaggacuaguguccaccugucccuccugggcugcuggauugucucguuuuccugccaaauaaacaggaucagcgcuuuacagaucuaaaaaaaaaaaaaaaaaaaaaaaaaaaaaaaaaaaaaaaaaaaaaaaaaaaaaaaaaaaaaaaaugcaucccccccccccccccccccccccccccccccaaaggcucuuuucagagccaccagaauu

SEQ ID NO: 16718 - RNA, 1880 nt, Artificial Sequence
  mRNA product Design e-4 comprising derived and/or modified sequence from HRSV(Memphis-37)__AIY60640.1__F-del_DSCav1_mut4 (opt2)
gggagacuccugucgggcggaaguaggaggaguagaguuuaaaaacaguacucuuuuuccgguucgggacguaguugaagcaacgacaagccggauaaccgcucuugagacaggaagcuuaccauggagcuccccauccucaagaccaacgccaucaccaccauccucgccgccgucacccucugcuucgccuccucccagaacaucaccgaggaguucuaccaguccaccugcuccgccgucuccaagggcuaccucuccgcccuccgcaccggcugguacaccuccgucaucaccaucgagcucuccaacaucaaggagaacaagugcaacggcaccgacgccaaggucaagcucaucaagcaggagcucgacaaguacaagaacgccgucaccgagcuccagcuccucaugcaguccacccccgccgccggcuccggcuccgccaucugcuccggcaucgccgucugcaagguccuccaccucgagggcgaggucaacaagaucaagaacgcccuccucuccaccaacaaggccgucgucucccucuccaacggcgucuccguccucaccuucaagguccucgaccucaagaacuacaucgacaagcagcuccuccccauccucaacaagcaguccugcuccaucuccaacaucgagaccgucaucgaguuccagcagaagaacaaccgccuccucgagaucacccgcgaguucuccgucaacgccggcgucaccacccccgucuccaccuacaugcucaccaacuccgagcuccucucccucaucaacgacaugcccaucaccaacgaccagaagaagcucauguccaacaacguccagaucguccgccagcaguccuacuccaucaugugcaucaucaaggaggagguccucgccuacgucguccagcucccccucuacggcgucaucgacacccccugcuggaagcuccacaccuccccccucugcaccaccaacaccaaggagggcuccaacaucugccucacccgcaccgaccgcggcugguacugcgacaacgccggcuccgucuccuucuucccccaggccgagaccugcaagguccaguccaaccgcgucuucugcgacaccaugaacucccgcacccuccccuccgaggucaaccucugcaacaucgacaucuucaaccccaaguacgacugcaagaucaugaccuccaagaccgacgucuccuccuccgucaucaccucccucggcgccaucgucuccugcuacggcaagaccaagugcaccgccuccaacaagaaccgcggcaucaucaagaccuucuccaacggcugcgacuacgucuccaacaagggcgucgacaccgucuccgucggcaacacccucuacugcgucaacaagcaggagggcaagucccucuacgucaagggcgagcccaucaucaacuucuacgacccccucgucuuccccuccgacgaguucgacgccuccaucucccaggucaacgagaagaucaaccagucccucgccuucauccgcaaguccgacgagcuccuccacaacgucaacgucggcaaguccaccaccaacaucaugaucaccaccaucaucaucgucaucaucgucauccuccuccuccucaucgccgucggccucuuccucuacugcaaggcccgcugaggacuaguguccaccugucccuccugggcugcuggauugucucguuuuccugccaaauaaacaggaucagcgcuuuacagaucuaaaaaaaaaaaaaaaaaaaaaaaaaaaaaaaaaaaaaaaaaaaaaaaaaaaaaaaaaaaaaaaaugcaucccccccccccccccccccccccccccccccaaaggcucuuuucagagccaccagaauu

SEQ ID NO: 16719 - RNA, 1880 nt, Artificial Sequence
  mRNA product Design e-4 comprising derived and/or modified sequence from HRSV(Memphis-37)__AIY60640.1__F-del_DSCav1_mut4 (opt3)
gggagacuccugucgggcggaaguaggaggaguagaguuuaaaaacaguacucuuuuuccgguucgggacguaguugaagcaacgacaagccggauaaccgcucuugagacaggaagcuuaccauggagcugcccauccucaagaccaacgccauuacaacuauacuugcugcagugacgcugugcuucgccagcucccagaauaucaccgaagaguuuuaccaaucuacauguucagcggucaguaaaggcuauuugagcgcuuuaagaacugggugguacaccuccguuauuacaaucgaacugucuaacauuaaggagaauaaaugcaacggaaccgacgccaaggugaaacuaaucaagcaggaacucgauaaguauaaaaaugcaguaacugagcugcagcuucugaugcagucgaccccugccgcugguucaggcagcgcaauauguagugggaucgccgugugcaaggucuugcaccucgagggagaagugaacaaaauuaagaaugcucugcuguccacaaacaaagccguugugucucucagcaauggcgucuccguguuaacguucaagguacuggaccuuaagaacuacaucgauaaacaauugcugccaauucuaaauaagcagucauguaguaucagcaacauagagacuguuauugaauuucagcagaaaaauaacaggcuccuggagaucacccgggaguucucugugaaugcgggugucacaacuccgguguccaccuauaugcuuacaaacucagaacuguugagccucauuaacgacaugcccaucaccaaugaucaaaagaaacugaugaguaacaaugugcagaucguccgccagcagucuuacuccauuaugugcauaaucaaggaggaaguuuuagcauaugugguacaacugccucucuacggggugauugacacgccauguuggaaacuucauacuagcccccugugcacaaccaacacuaaggagggaucgaauaucuguuugacacgaaccgaucguggcugguacugcgacaacgccggcucugucuccuuuuucccucaggcugaaacguguaaggugcagucaaauagaguguuuugcgauaccaugaacaguagaacacugccaagcgaggugaaucucugcaacauagacauuuucaaucccaaauaugauuguaagaucaugacuuccaaaaccgacgucucuagcucagugaucacaagucugggggccauuguauccugcuacggaaagacuaaauguaccgcaagcaacaagaauagggguaucauuaagacauuuucuaacggcugcgauuauguuucaaauaaagggguggacaccgucagugugggaaacacucuuuacugugucaacaagcaagagggcaaaagccuguaugugaagggugaaccuauaaucaauuucuacgacccauugguuuuuccguccgaugaguucgacgcuucuauuucgcagguuaacgagaaaaucaaucagagccucgccuuuauccggaaguccgaugaacuguuacacaacguaaaugucgggaagucaacgacaaacauuaugauaaccacuaucauuaucgugauuaucguuauacugcuacuccugaucgcggugggacuuuucuuguauugcaaagcccgcugaggacuaguguccaccugucccuccugggcugcuggauugucucguuuuccugccaaauaaacaggaucagcgcuuuacagaucuaaaaaaaaaaaaaaaaaaaaaaaaaaaaaaaaaaaaaaaaaaaaaaaaaaaaaaaaaaaaaaaaugcaucccccccccccccccccccccccccccccccaaaggcucuuuucagagccaccagaauu

SEQ ID NO: 16720 - RNA, 1880 nt, Artificial Sequence
  mRNA product Design e-4 comprising derived and/or modified sequence from HRSV(Memphis-37)__AIY60640.1__F-del_DSCav1_mut4 (opt4)
gggagacuccugucgggcggaaguaggaggaguagaguuuaaaaacaguacucuuuuuccgguucgggacguaguugaagcaacgacaagccggauaaccgcucuugagacaggaagcuuaccauggagcugcccauccugaagaccaacgccaucaccaccauccuggccgccgugacccugugcuucgccagcagccagaacaucaccgaggaguucuaccagagcaccugcagcgccgugagcaagggcuaccugagcgcccugagaaccggcugguacaccagcgugaucaccaucgagcugagcaacaucaaggagaacaagugcaacggcaccgacgccaaggugaagcugaucaagcaggagcuggacaaguacaagaacgccgugaccgagcugcagcugcugaugcagagcacccccgccgccggcagcggcagcgccaucugcagcggcaucgccgugugcaaggugcugcaccuggagggcgaggugaacaagaucaagaacgcccugcugagcaccaacaaggccguggugagccugagcaacggcgugagcgugcugaccuucaaggugcuggaccugaagaacuacaucgacaagcagcugcugcccauccugaacaagcagagcugcagcaucagcaacaucgagaccgugaucgaguuccagcagaagaacaacagacugcuggagaucaccagagaguucagcgugaacgccggcgugaccacccccgugagcaccuacaugcugaccaacagcgagcugcugagccugaucaacgacaugcccaucaccaacgaccagaagaagcugaugagcaacaacgugcagaucgugagacagcagagcuacagcaucaugugcaucaucaaggaggaggugcuggccuacguggugcagcugccccuguacggcgugaucgacacccccugcuggaagcugcacaccagcccccugugcaccaccaacaccaaggagggcagcaacaucugccugaccagaaccgacagaggcugguacugcgacaacgccggcagcgugagcuucuucccccaggccgagaccugcaaggugcagagcaacagaguguucugcgacaccaugaacagcagaacccugcccagcgaggugaaccugugcaacaucgacaucuucaaccccaaguacgacugcaagaucaugaccagcaagaccgacgugagcagcagcgugaucaccagccugggcgccaucgugagcugcuacggcaagaccaagugcaccgccagcaacaagaacagaggcaucaucaagaccuucagcaacggcugcgacuacgugagcaacaagggcguggacaccgugagcgugggcaacacccuguacugcgugaacaagcaggagggcaagagccuguacgugaagggcgagcccaucaucaacuucuacgacccccugguguuccccagcgacgaguucgacgccagcaucagccaggugaacgagaagaucaaccagagccuggccuucaucagaaagagcgacgagcugcugcacaacgugaacgugggcaagagcaccaccaacaucaugaucaccaccaucaucaucgugaucaucgugauccugcugcugcugaucgccgugggccuguuccuguacugcaaggccagaugaggacuaguguccaccugucccuccugggcugcuggauugucucguuuuccugccaaauaaacaggaucagcgcuuuacagaucuaaaaaaaaaaaaaaaaaaaaaaaaaaaaaaaaaaaaaaaaaaaaaaaaaaaaaaaaaaaaaaaaugcaucccccccccccccccccccccccccccccccaaaggcucuuuucagagccaccagaauu

SEQ ID NO: 16721 - RNA, 1880 nt, Artificial Sequence
  mRNA product Design e-4 comprising derived and/or modified sequence from HRSV(Memphis-37)__AIY60640.1__F-del_DSCav1_mut4 (opt5)
gggagacuccugucgggcggaaguaggaggaguagaguuuaaaaacaguacucuuuuuccgguucgggacguaguugaagcaacgacaagccggauaaccgcucuugagacaggaagcuuaccauggagcugcccauccucaagaccaacgccauuacaacgauccuggcugccgugacccuuugcuucgcgagcucccagaauauuacagaagaguuuuaccaaucuaccuguagcgcugucuccaaaggcuaucugucugcccucagaacagggugguacaccagcguuaucacaauugaacuguccaacaucaaggagaauaaaugcaacggaaccgacgccaaggugaaacuuaucaagcaggaacuggauaaguauaaaaaugcugugacggagcuccagcugcugaugcagucuaccccugccgcuggcagcggguccgccauuuguagcggaaucgcggucugcaaggugcuccaccuggagggcgaaguuaacaaaauuaagaaugcccuucugucuacaaacaaagcuguggucucccucagcaauggggugucuguucugaccuucaaggugcuugaccugaagaacuacaucgauaaacaacuccugccgauucugaauaagcaguccuguagcaucucuaacauugagacagucaucgaauuucagcagaaaaauaaccggcuccuggagaucacccgcgaguucuccgugaaugccggagugacgacacccgucagcaccuauaugcuuacaaacuccgaacugcucucucugauuaacgacaugccuaucaccaaugaucaaaagaaacuuaugagcaacaauguucagauugugagacagcaguccuacagcaucaugugcauuaucaaggaggaagugcuggcuuaugucgugcaacucccccuguacggcguuaucgacaccccuuguuggaaacugcauacaucuccccucugcacgaccaacacaaaggagggcuccaauauuugucugacccggacagaucgcgggugguacugcgacaacgccggaagcgugagcuuuuucccucaggcggaaaccuguaagguccagucuaauagaguguuuugcgauacgaugaacuccagaacacugccgucugagguuaaucucugcaacaucgacauuuucaaucccaaauaugauuguaagaucaugaccagcaaaaccgacguguccagcucugucauuacaucccugggcgccaucgugagcugcuacgggaagaccaaauguacagcuucuaacaagaaucggggaaucauuaagacguuuuccaacggcugcgauuaugucagcaauaaagggguggacaccguuuccgugggaaacacacuuuacugugucaacaagcaagagggcaaaucucuguaugugaagggcgaaccuaucauuaauuucuacgacccccucguuuuuccuagcgaugaguucgacgccuccaucucucaggugaacgaaaagauuaaucagagccuggcuuuuauccgcaaguccgaugagcugcuccacaacgucaauguggggaaaagcaccacaaacauuaugaucaccacgaucauuaucgugauuaucguuauucugcuucugcucaucgccgucggacuguuccuguauugcaaagccagaugaggacuaguguccaccugucccuccugggcugcuggauugucucguuuuccugccaaauaaacaggaucagcgcuuuacagaucuaaaaaaaaaaaaaaaaaaaaaaaaaaaaaaaaaaaaaaaaaaaaaaaaaaaaaaaaaaaaaaaaugcaucccccccccccccccccccccccccccccccaaaggcucuuuucagagccaccagaauu

SEQ ID NO: 16722 - RNA, 1880 nt, Artificial Sequence
  mRNA product Design e-4 comprising derived and/or modified sequence from HRSV(Memphis-37)__AIY60640.1__F-del_DSCav1_mut4 (opt6)
gggagacuccugucgggcggaaguaggaggaguagaguuuaaaaacaguacucuuuuuccgguucgggacguaguugaagcaacgacaagccggauaaccgcucuugagacaggaagcuuaccauggaacuaccaauacucaaaacaaacgcaauaacaacuauacuagccgcaguuacacucugcuucgcuucaucacaaaauaucacagaagaauuuuaccaaucuacauguucagcuguauccaaagguuaccuuucagcacuacgaacaggaugguauaccucaguaaucaccaucgaacucucgaacauaaaagaaaacaaauguaacggaaccgaugcuaaagucaagcucauaaaacaagaacuagacaaauacaaaaacgcaguaaccgaacuacaacuacuuaugcaaucaacaccagcugcaggcucaggcucagcaaucugcucaggcauagcuguaugcaaaguacuacaucuagaaggagaaguaaacaaaauaaaaaacgcauuauuaucaacaaauaaagcaguaguaucacuaucaaauggaguaucaguacucacauucaaaguacuagaucuaaaaaacuacauugacaaacaauuacuaccaauccucaacaaacaaucaugcucaauauccaacauagaaacaguaauagaauuucaacaaaaaaacaaucgacuacuagaaauaacaagagaauuuucagucaaugccggaguuacaacacccguaagcacuuacaugcuaaccaacucagaacuacuaucacuaauaaacgacaugccaauuacaaacgaccaaaaaaaacuaaugucaaauaacguacaaauaguacgucaacaaucauacucaauaaugugcauaauaaaagaagaaguccuagcauacguaguacaauuacccuuauauggcguaauagacacaccaugcuggaaacuacacacauccccacucugcaccaccaacaccaaagaaggcuccaacauaugucuaacccgaaccgacagagguugguauugugauaacgcuggcuccguaucauucuucccacaagcagaaacauguaaaguacaaucaaacagaguauucugcgauacaaugaauagcagaacacuaccaucagaaguaaacuuaugcaacaucgacaucuucaaucccaaauacgacugcaaaauaaugacauccaaaacugacguuucuucaagcguaauaacaucuuuaggagcaauaguauccugcuacggaaaaacuaaaugcacagcauccaauaaaaaccguggaauaauaaaaacauucucaaauggcugcgacuacgucucaaacaaaggcguagacaccguuagugucggaaacacacuauauugcguaaauaaacaagaaggaaaauccuuauacguaaaaggcgaaccaauaauuaacuucuaugacccccucguauuuccauccgaugaauuugacgcaucaaucucgcaaguaaacgaaaaaauaaaccaaagccuagcauucauaagaaaauccgacgaacuacuccacaauguaaauguaggaaaaucaacuaccaacauaaugauuacuacuauaauaauaguaauuauagucaucuuacuacuauuaauagcagucggauuauuccuauacugcaaagcaagauagggacuaguguccaccugucccuccugggcugcuggauugucucguuuuccugccaaauaaacaggaucagcgcuuuacagaucuaaaaaaaaaaaaaaaaaaaaaaaaaaaaaaaaaaaaaaaaaaaaaaaaaaaaaaaaaaaaaaaaugcaucccccccccccccccccccccccccccccccaaaggcucuuuucagagccaccagaauu

SEQ ID NO: 16723 - RNA, 1880 nt, Artificial Sequence
  mRNA product Design e-4 comprising derived and/or modified sequence from HRSV(Memphis-37)__AIY60640.1__F-del_DSCav1_mut4 (opt11)
gggagacuccugucgggcggaaguaggaggaguagaguuuaaaaacaguacucuuuuuccgguucgggacguaguugaagcaacgacaagccggauaaccgcucuugagacaggaagcuuaccauggagcuccccauccuaaaaaccaacgccaucaccaccauccucgccgccgucacccuaugcuucgcuucaucacaaaacaucaccgaagaauuuuaccaaucuaccugcuccgccgucuccaaaggauaucucagcgcccuacggaccggcugguacaccuccgucauaaccaucgaacucaguaacaucaaagaaaacaaaugcaacggcaccgacgccaaagucaaacuaaucaaacaagaacuagauaaauacaaaaacgcggucaccgaacuacaacuccuaaugcaaagcacccccgccgccggauccggcuccgccauaugcuccggcauugcugucugcaaaguacuacaccucgagggcgaggucaacaaaaucaaaaacgcacuacucagcacuaauaaagccguaguaucccuaucaaacggugucucagucuuaacauucaaaguacucgaccuaaagaacuacaucgacaaacaacuccuacccauccucaacaagcaguccuguucuaucucaaacaucgaaaccgucaucgaauuucaacaaaagaacaaccgccuccucgaaaucacacgcgaguucuccgucaacgcaggaguaaccacccccgucuccaccuacaugcucacaaacucggaacuccucucacuaaucaacgacaugcccaucaccaacgaccaaaagaaacucaugagcaacaacguucaaaucguccgccaacaaucauacuccaucaugugcauaaucaaagaagaaguccuagcuuacgucguccagcugccccucuacggagucaucgacacgcccugcuggaaacuacacacaagcccccucugcaccaccaacaccaaagaaggcuccaacauaugccucacacggaccgaccgcgguugguacugcgacaacgccggcuccgucuccuucuucccccaagcagaaacuugcaaaguccaauccaaccgcguauucugcgacacaaugaacagcagaacacucccuagcgaagucaaccucugcaacaucgacauauucaaccccaaauacgacugcaaaaucaugacgucaaaaaccgacgucuccagcuccguuaucaccucacucggcgccaucgucagcugcuacggcaaaacuaaaugcaccgccuccaacaaaaaccgcggcaucauuaaaaccuucagcaacggcugcgacuacgucuccaacaaaggugucgauacgguauccgucggaaacacccuauacugcgucaacaaacaagaaggcaaaucucucuacgucaaaggcgaacccauaaucaauuucuacgacccccuagucuuccccuccgaugaauuugacgccuccaucagccaagucaacgagaaaaucaaccaaucacuagccuucauccggaaauccgacgaacuccuacacaacguaaacgucggcaaauccaccaccaauauaaugaucacaaccaucaucaucguaaucaucgucauccuccuccuacucaucgccgucggauuauucuuauacugcaaagcccgcuaaggacuaguguccaccugucccuccugggcugcuggauugucucguuuuccugccaaauaaacaggaucagcgcuuuacagaucuaaaaaaaaaaaaaaaaaaaaaaaaaaaaaaaaaaaaaaaaaaaaaaaaaaaaaaaaaaaaaaaaugcaucccccccccccccccccccccccccccccccaaaggcucuuuucagagccaccagaauu

SEQ ID NO: 16724 - RNA, 1847 nt, Artificial Sequence
  mRNA product Design e-5 comprising derived and/or modified sequence from HRSV(Memphis-37)__AIY60640.1__F-del_DSCav1_mut4 (opt1)
gggagagcggcucggccauuuugucccagucaguccggaggcugcggcugcagaaguaccgccugcggaguaacugcaaagaagcuuaccauggagcugcccauccucaagaccaacgccaucaccacgauccuggccgcggugacccugugcuucgccagcucccagaacaucaccgaggaguucuaccagagcacgugcuccgccgucagcaagggcuaccucuccgcccugcgcaccgggugguacaccagcgugaucaccaucgagcuguccaacaucaaggagaacaagugcaacggcaccgacgccaaggugaagcucaucaagcaggagcuggacaaguacaagaacgcggucacggagcugcagcuccugaugcagagcaccccggccgccggcuccgggagcgcgaucugcuccggcaucgccgucugcaaggugcugcaccucgagggcgaggugaacaagaucaagaacgcccugcuguccaccaacaaggccgucgugagccucuccaacggggugagcguccugaccuucaaggugcuggaccucaagaacuacaucgacaagcagcugcugcccauccugaacaagcagagcugcuccaucagcaacaucgagaccgucaucgaguuccagcagaagaacaaccgccuccuggagaucacgcgggaguucagcgugaacgcgggcgugaccacccccgucuccaccuacaugcugacgaacagcgagcuccugucccugaucaacgacaugccgaucaccaacgaccagaagaagcucaugagcaacaacgugcagaucgugcgccagcaguccuacagcaucaugugcaucaucaaggaggagguccuggccuacguggugcagcugccccucuacggggucaucgacacccccugcuggaagcugcacaccagcccccugugcacgaccaacaccaaggagggcuccaacaucugccucacccggacggaccgcgggugguacugcgacaacgccggcagcguguccuucuucccgcaggccgagaccugcaagguccagagcaaccggguguucugcgacaccaugaacucccggacccugcccagcgaggugaaccucugcaacaucgacaucuucaaccccaaguacgacugcaagaucaugacguccaagaccgacgucagcuccagcgugaucaccucccugggcgccaucgugagcugcuacgggaagaccaagugcacggcgagcaacaagaaccgcggcaucaucaagaccuucuccaacgggugcgacuacgucagcaacaagggcguggacaccguguccgucggcaacacccuguacugcgugaacaagcaggagggcaagagccucuacgugaagggggagcccaucaucaacuucuacgacccgcuggucuuccccuccgacgaguucgacgccagcaucucccaggugaacgagaagaucaaccagagccuggccuucauccggaaguccgacgagcuccugcacaacgugaacgucggcaagagcaccacgaacaucaugaucaccaccaucaucaucgugaucaucgugauccugcugcuccugaucgccgucgggcuguuccucuacugcaaggcccgcugaggacuaguguccaccugucccuccugggcugcuggauugucucguuuuccugccaaauaaacaggaucagcgcuuuacagaucuaaaaaaaaaaaaaaaaaaaaaaaaaaaaaaaaaaaaaaaaaaaaaaaaaaaaaaaaaaaaaaaaugcaucccccccccccccccccccccccccccccccaaaggcucuuuucagagccaccagaauu

SEQ ID NO: 16725 - RNA, 1847 nt, Artificial Sequence
  mRNA product Design e-5 comprising derived and/or modified sequence from HRSV(Memphis-37)__AIY60640.1__F-del_DSCav1_mut4 (opt1)
gggagagcggcucggccauuuugucccagucaguccggaggcugcggcugcagaaguaccgccugcggaguaacugcaaagaagcuuaccauggagcugcccauccucaagaccaacgccaucaccacgauccuggccgcggugacccugugcuucgccagcucccagaacaucaccgaggaguucuaccagagcacgugcuccgccgucagcaagggcuaccucuccgcccugcgcaccgggugguacaccagcgugaucaccaucgagcuguccaacaucaaggagaacaagugcaacggcaccgacgccaaggugaagcucaucaagcaggagcuggacaaguacaagaacgcggucacggagcugcagcuccugaugcagagcaccccggccgccggguccggcagcgccaucugcuccgggaucgcggugugcaaggugcugcaccucgagggcgaggucaacaagaucaagaacgcccugcugagcaccaacaaggccguggugucccucagcaacggcgucuccgugcugaccuucaaggugcuggaccucaagaacuacaucgacaagcagcugcugcccauccucaacaagcagagcugcuccaucagcaacaucgagacggucaucgaguuccagcagaagaacaaccggcugcuggagaucacccgcgaguucuccgugaacgccggggugaccacccccgucagcacguacaugcucaccaacagcgagcugcugucccucaucaacgacaugcccaucaccaacgaccagaagaagcugaugagcaacaacgugcagaucgugcggcagcaguccuacagcaucaugugcaucaucaaggaggagguccuggccuacguggugcagcucccgcuguacggcgucaucgacacccccugcuggaagcugcacacgagcccccucugcaccaccaacaccaaggagggguccaacaucugccugacgcgcaccgaccggggcugguacugcgacaacgcgggguccgugagcuucuucccccaggccgagaccugcaaggugcaguccaaccgcgucuucugcgacaccaugaacagccggacgcucccguccgaggugaaccugugcaacaucgacaucuucaaccccaaguacgacugcaagaucaugaccagcaagaccgacgucuccagcuccgugaucaccagccugggcgccaucguguccugcuacggcaagacgaagugcaccgccagcaacaagaaccgggggaucaucaagaccuucuccaacggcugcgacuacgucagcaacaaggggguggacaccgugagcgucggcaacacgcucuacugcgugaacaagcaggagggcaagucccuguacgugaagggggagcccaucaucaacuucuacgacccccuggucuucccgagcgacgaguucgacgccuccaucagccaggugaacgagaagaucaaccagucccucgcguucauccgcaagagcgacgagcugcugcacaacgugaacgucggcaaguccaccaccaacaucaugaucaccaccaucaucaucgugaucaucgugauccuccugcugcucaucgccgucgggcuguuccuguacugcaaggcccggugaggacuaguguccaccugucccuccugggcugcuggauugucucguuuuccugccaaauaaacaggaucagcgcuuuacagaucuaaaaaaaaaaaaaaaaaaaaaaaaaaaaaaaaaaaaaaaaaaaaaaaaaaaaaaaaaaaaaaaaugcaucccccccccccccccccccccccccccccccaaaggcucuuuucagagccaccagaauu

SEQ ID NO: 16726 - RNA, 1847 nt, Artificial Sequence
  mRNA product Design e-5 comprising derived and/or modified sequence from HRSV(Memphis-37)__AIY60640.1__F-del_DSCav1_mut4 (opt2)
gggagagcggcucggccauuuugucccagucaguccggaggcugcggcugcagaaguaccgccugcggaguaacugcaaagaagcuuaccauggagcuccccauccucaagaccaacgccaucaccaccauccucgccgccgucacccucugcuucgccuccucccagaacaucaccgaggaguucuaccaguccaccugcuccgccgucuccaagggcuaccucuccgcccuccgcaccggcugguacaccuccgucaucaccaucgagcucuccaacaucaaggagaacaagugcaacggcaccgacgccaaggucaagcucaucaagcaggagcucgacaaguacaagaacgccgucaccgagcuccagcuccucaugcaguccacccccgccgccggcuccggcuccgccaucugcuccggcaucgccgucugcaagguccuccaccucgagggcgaggucaacaagaucaagaacgcccuccucuccaccaacaaggccgucgucucccucuccaacggcgucuccguccucaccuucaagguccucgaccucaagaacuacaucgacaagcagcuccuccccauccucaacaagcaguccugcuccaucuccaacaucgagaccgucaucgaguuccagcagaagaacaaccgccuccucgagaucacccgcgaguucuccgucaacgccggcgucaccacccccgucuccaccuacaugcucaccaacuccgagcuccucucccucaucaacgacaugcccaucaccaacgaccagaagaagcucauguccaacaacguccagaucguccgccagcaguccuacuccaucaugugcaucaucaaggaggagguccucgccuacgucguccagcucccccucuacggcgucaucgacacccccugcuggaagcuccacaccuccccccucugcaccaccaacaccaaggagggcuccaacaucugccucacccgcaccgaccgcggcugguacugcgacaacgccggcuccgucuccuucuucccccaggccgagaccugcaagguccaguccaaccgcgucuucugcgacaccaugaacucccgcacccuccccuccgaggucaaccucugcaacaucgacaucuucaaccccaaguacgacugcaagaucaugaccuccaagaccgacgucuccuccuccgucaucaccucccucggcgccaucgucuccugcuacggcaagaccaagugcaccgccuccaacaagaaccgcggcaucaucaagaccuucuccaacggcugcgacuacgucuccaacaagggcgucgacaccgucuccgucggcaacacccucuacugcgucaacaagcaggagggcaagucccucuacgucaagggcgagcccaucaucaacuucuacgacccccucgucuuccccuccgacgaguucgacgccuccaucucccaggucaacgagaagaucaaccagucccucgccuucauccgcaaguccgacgagcuccuccacaacgucaacgucggcaaguccaccaccaacaucaugaucaccaccaucaucaucgucaucaucgucauccuccuccuccucaucgccgucggccucuuccucuacugcaaggcccgcugaggacuaguguccaccugucccuccugggcugcuggauugucucguuuuccugccaaauaaacaggaucagcgcuuuacagaucuaaaaaaaaaaaaaaaaaaaaaaaaaaaaaaaaaaaaaaaaaaaaaaaaaaaaaaaaaaaaaaaaugcaucccccccccccccccccccccccccccccccaaaggcucuuuucagagccaccagaauu

SEQ ID NO: 16727 - RNA, 1847 nt, Artificial Sequence
  mRNA product Design e-5 comprising derived and/or modified sequence from HRSV(Memphis-37)__AIY60640.1__F-del_DSCav1_mut4 (opt3)
gggagagcggcucggccauuuugucccagucaguccggaggcugcggcugcagaaguaccgccugcggaguaacugcaaagaagcuuaccauggagcugcccauccucaagaccaacgccauuacaacuauacuugcugcagugacgcugugcuucgccagcucccagaauaucaccgaagaguuuuaccaaucuacauguucagcggucaguaaaggcuauuugagcgcuuuaagaacugggugguacaccuccguuauuacaaucgaacugucuaacauuaaggagaauaaaugcaacggaaccgacgccaaggugaaacuaaucaagcaggaacucgauaaguauaaaaaugcaguaacugagcugcagcuucugaugcagucgaccccugccgcugguucaggcagcgcaauauguagugggaucgccgugugcaaggucuugcaccucgagggagaagugaacaaaauuaagaaugcucugcuguccacaaacaaagccguugugucucucagcaauggcgucuccguguuaacguucaagguacuggaccuuaagaacuacaucgauaaacaauugcugccaauucuaaauaagcagucauguaguaucagcaacauagagacuguuauugaauuucagcagaaaaauaacaggcuccuggagaucacccgggaguucucugugaaugcgggugucacaacuccgguguccaccuauaugcuuacaaacucagaacuguugagccucauuaacgacaugcccaucaccaaugaucaaaagaaacugaugaguaacaaugugcagaucguccgccagcagucuuacuccauuaugugcauaaucaaggaggaaguuuuagcauaugugguacaacugccucucuacggggugauugacacgccauguuggaaacuucauacuagcccccugugcacaaccaacacuaaggagggaucgaauaucuguuugacacgaaccgaucguggcugguacugcgacaacgccggcucugucuccuuuuucccucaggcugaaacguguaaggugcagucaaauagaguguuuugcgauaccaugaacaguagaacacugccaagcgaggugaaucucugcaacauagacauuuucaaucccaaauaugauuguaagaucaugacuuccaaaaccgacgucucuagcucagugaucacaagucugggggccauuguauccugcuacggaaagacuaaauguaccgcaagcaacaagaauagggguaucauuaagacauuuucuaacggcugcgauuauguuucaaauaaagggguggacaccgucagugugggaaacacucuuuacugugucaacaagcaagagggcaaaagccuguaugugaagggugaaccuauaaucaauuucuacgacccauugguuuuuccguccgaugaguucgacgcuucuauuucgcagguuaacgagaaaaucaaucagagccucgccuuuauccggaaguccgaugaacuguuacacaacguaaaugucgggaagucaacgacaaacauuaugauaaccacuaucauuaucgugauuaucguuauacugcuacuccugaucgcggugggacuuuucuuguauugcaaagcccgcugaggacuaguguccaccugucccuccugggcugcuggauugucucguuuuccugccaaauaaacaggaucagcgcuuuacagaucuaaaaaaaaaaaaaaaaaaaaaaaaaaaaaaaaaaaaaaaaaaaaaaaaaaaaaaaaaaaaaaaaugcaucccccccccccccccccccccccccccccccaaaggcucuuuucagagccaccagaauu

SEQ ID NO: 16728 - RNA, 1847 nt, Artificial Sequence
  mRNA product Design e-5 comprising derived and/or modified sequence from HRSV(Memphis-37)__AIY60640.1__F-del_DSCav1_mut4 (opt4)
gggagagcggcucggccauuuugucccagucaguccggaggcugcggcugcagaaguaccgccugcggaguaacugcaaagaagcuuaccauggagcugcccauccugaagaccaacgccaucaccaccauccuggccgccgugacccugugcuucgccagcagccagaacaucaccgaggaguucuaccagagcaccugcagcgccgugagcaagggcuaccugagcgcccugagaaccggcugguacaccagcgugaucaccaucgagcugagcaacaucaaggagaacaagugcaacggcaccgacgccaaggugaagcugaucaagcaggagcuggacaaguacaagaacgccgugaccgagcugcagcugcugaugcagagcacccccgccgccggcagcggcagcgccaucugcagcggcaucgccgugugcaaggugcugcaccuggagggcgaggugaacaagaucaagaacgcccugcugagcaccaacaaggccguggugagccugagcaacggcgugagcgugcugaccuucaaggugcuggaccugaagaacuacaucgacaagcagcugcugcccauccugaacaagcagagcugcagcaucagcaacaucgagaccgugaucgaguuccagcagaagaacaacagacugcuggagaucaccagagaguucagcgugaacgccggcgugaccacccccgugagcaccuacaugcugaccaacagcgagcugcugagccugaucaacgacaugcccaucaccaacgaccagaagaagcugaugagcaacaacgugcagaucgugagacagcagagcuacagcaucaugugcaucaucaaggaggaggugcuggccuacguggugcagcugccccuguacggcgugaucgacacccccugcuggaagcugcacaccagcccccugugcaccaccaacaccaaggagggcagcaacaucugccugaccagaaccgacagaggcugguacugcgacaacgccggcagcgugagcuucuucccccaggccgagaccugcaaggugcagagcaacagaguguucugcgacaccaugaacagcagaacccugcccagcgaggugaaccugugcaacaucgacaucuucaaccccaaguacgacugcaagaucaugaccagcaagaccgacgugagcagcagcgugaucaccagccugggcgccaucgugagcugcuacggcaagaccaagugcaccgccagcaacaagaacagaggcaucaucaagaccuucagcaacggcugcgacuacgugagcaacaagggcguggacaccgugagcgugggcaacacccuguacugcgugaacaagcaggagggcaagagccuguacgugaagggcgagcccaucaucaacuucuacgacccccugguguuccccagcgacgaguucgacgccagcaucagccaggugaacgagaagaucaaccagagccuggccuucaucagaaagagcgacgagcugcugcacaacgugaacgugggcaagagcaccaccaacaucaugaucaccaccaucaucaucgugaucaucgugauccugcugcugcugaucgccgugggccuguuccuguacugcaaggccagaugaggacuaguguccaccugucccuccugggcugcuggauugucucguuuuccugccaaauaaacaggaucagcgcuuuacagaucuaaaaaaaaaaaaaaaaaaaaaaaaaaaaaaaaaaaaaaaaaaaaaaaaaaaaaaaaaaaaaaaaugcaucccccccccccccccccccccccccccccccaaaggcucuuuucagagccaccagaauu

SEQ ID NO: 16729 - RNA, 1847 nt, Artificial Sequence
  mRNA product Design e-5 comprising derived and/or modified sequence from HRSV(Memphis-37)__AIY60640.1__F-del_DSCav1_mut4 (opt5)
gggagagcggcucggccauuuugucccagucaguccggaggcugcggcugcagaaguaccgccugcggaguaacugcaaagaagcuuaccauggagcugcccauccucaagaccaacgccauuacaacgauccuggcugccgugacccuuugcuucgcgagcucccagaauauuacagaagaguuuuaccaaucuaccuguagcgcugucuccaaaggcuaucugucugcccucagaacagggugguacaccagcguuaucacaauugaacuguccaacaucaaggagaauaaaugcaacggaaccgacgccaaggugaaacuuaucaagcaggaacuggauaaguauaaaaaugcugugacggagcuccagcugcugaugcagucuaccccugccgcuggcagcggguccgccauuuguagcggaaucgcggucugcaaggugcuccaccuggagggcgaaguuaacaaaauuaagaaugcccuucugucuacaaacaaagcuguggucucccucagcaauggggugucuguucugaccuucaaggugcuugaccugaagaacuacaucgauaaacaacuccugccgauucugaauaagcaguccuguagcaucucuaacauugagacagucaucgaauuucagcagaaaaauaaccggcuccuggagaucacccgcgaguucuccgugaaugccggagugacgacacccgucagcaccuauaugcuuacaaacuccgaacugcucucucugauuaacgacaugccuaucaccaaugaucaaaagaaacuuaugagcaacaauguucagauugugagacagcaguccuacagcaucaugugcauuaucaaggaggaagugcuggcuuaugucgugcaacucccccuguacggcguuaucgacaccccuuguuggaaacugcauacaucuccccucugcacgaccaacacaaaggagggcuccaauauuugucugacccggacagaucgcgggugguacugcgacaacgccggaagcgugagcuuuuucccucaggcggaaaccuguaagguccagucuaauagaguguuuugcgauacgaugaacuccagaacacugccgucugagguuaaucucugcaacaucgacauuuucaaucccaaauaugauuguaagaucaugaccagcaaaaccgacguguccagcucugucauuacaucccugggcgccaucgugagcugcuacgggaagaccaaauguacagcuucuaacaagaaucggggaaucauuaagacguuuuccaacggcugcgauuaugucagcaauaaagggguggacaccguuuccgugggaaacacacuuuacugugucaacaagcaagagggcaaaucucuguaugugaagggcgaaccuaucauuaauuucuacgacccccucguuuuuccuagcgaugaguucgacgccuccaucucucaggugaacgaaaagauuaaucagagccuggcuuuuauccgcaaguccgaugagcugcuccacaacgucaauguggggaaaagcaccacaaacauuaugaucaccacgaucauuaucgugauuaucguuauucugcuucugcucaucgccgucggacuguuccuguauugcaaagccagaugaggacuaguguccaccugucccuccugggcugcuggauugucucguuuuccugccaaauaaacaggaucagcgcuuuacagaucuaaaaaaaaaaaaaaaaaaaaaaaaaaaaaaaaaaaaaaaaaaaaaaaaaaaaaaaaaaaaaaaaugcaucccccccccccccccccccccccccccccccaaaggcucuuuucagagccaccagaauu

SEQ ID NO: 16730 - RNA, 1847 nt, Artificial Sequence
  mRNA product Design e-5 comprising derived and/or modified sequence from HRSV(Memphis-37)__AIY60640.1__F-del_DSCav1_mut4 (opt6)
gggagagcggcucggccauuuugucccagucaguccggaggcugcggcugcagaaguaccgccugcggaguaacugcaaagaagcuuaccauggaacuaccaauacucaaaacaaacgcaauaacaacuauacuagccgcaguuacacucugcuucgcuucaucacaaaauaucacagaagaauuuuaccaaucuacauguucagcuguauccaaagguuaccuuucagcacuacgaacaggaugguauaccucaguaaucaccaucgaacucucgaacauaaaagaaaacaaauguaacggaaccgaugcuaaagucaagcucauaaaacaagaacuagacaaauacaaaaacgcaguaaccgaacuacaacuacuuaugcaaucaacaccagcugcaggcucaggcucagcaaucugcucaggcauagcuguaugcaaaguacuacaucuagaaggagaaguaaacaaaauaaaaaacgcauuauuaucaacaaauaaagcaguaguaucacuaucaaauggaguaucaguacucacauucaaaguacuagaucuaaaaaacuacauugacaaacaauuacuaccaauccucaacaaacaaucaugcucaauauccaacauagaaacaguaauagaauuucaacaaaaaaacaaucgacuacuagaaauaacaagagaauuuucagucaaugccggaguuacaacacccguaagcacuuacaugcuaaccaacucagaacuacuaucacuaauaaacgacaugccaauuacaaacgaccaaaaaaaacuaaugucaaauaacguacaaauaguacgucaacaaucauacucaauaaugugcauaauaaaagaagaaguccuagcauacguaguacaauuacccuuauauggcguaauagacacaccaugcuggaaacuacacacauccccacucugcaccaccaacaccaaagaaggcuccaacauaugucuaacccgaaccgacagagguugguauugugauaacgcuggcuccguaucauucuucccacaagcagaaacauguaaaguacaaucaaacagaguauucugcgauacaaugaauagcagaacacuaccaucagaaguaaacuuaugcaacaucgacaucuucaaucccaaauacgacugcaaaauaaugacauccaaaacugacguuucuucaagcguaauaacaucuuuaggagcaauaguauccugcuacggaaaaacuaaaugcacagcauccaauaaaaaccguggaauaauaaaaacauucucaaauggcugcgacuacgucucaaacaaaggcguagacaccguuagugucggaaacacacuauauugcguaaauaaacaagaaggaaaauccuuauacguaaaaggcgaaccaauaauuaacuucuaugacccccucguauuuccauccgaugaauuugacgcaucaaucucgcaaguaaacgaaaaaauaaaccaaagccuagcauucauaagaaaauccgacgaacuacuccacaauguaaauguaggaaaaucaacuaccaacauaaugauuacuacuauaauaauaguaauuauagucaucuuacuacuauuaauagcagucggauuauuccuauacugcaaagcaagauagggacuaguguccaccugucccuccugggcugcuggauugucucguuuuccugccaaauaaacaggaucagcgcuuuacagaucuaaaaaaaaaaaaaaaaaaaaaaaaaaaaaaaaaaaaaaaaaaaaaaaaaaaaaaaaaaaaaaaaugcaucccccccccccccccccccccccccccccccaaaggcucuuuucagagccaccagaauu

SEQ ID NO: 16731 - RNA, 1847 nt, Artificial Sequence
  mRNA product Design e-5 comprising derived and/or modified sequence from HRSV(Memphis-37)__AIY60640.1__F-del_DSCav1_mut4 (opt11)
gggagagcggcucggccauuuugucccagucaguccggaggcugcggcugcagaaguaccgccugcggaguaacugcaaagaagcuuaccauggagcuccccauccuaaaaaccaacgccaucaccaccauccucgccgccgucacccuaugcuucgcuucaucacaaaacaucaccgaagaauuuuaccaaucuaccugcuccgccgucuccaaaggauaucucagcgcccuacggaccggcugguacaccuccgucauaaccaucgaacucaguaacaucaaagaaaacaaaugcaacggcaccgacgccaaagucaaacuaaucaaacaagaacuagauaaauacaaaaacgcggucaccgaacuacaacuccuaaugcaaagcacccccgccgccggauccggcuccgccauaugcuccggcauugcugucugcaaaguacuacaccucgagggcgaggucaacaaaaucaaaaacgcacuacucagcacuaauaaagccguaguaucccuaucaaacggugucucagucuuaacauucaaaguacucgaccuaaagaacuacaucgacaaacaacuccuacccauccucaacaagcaguccuguucuaucucaaacaucgaaaccgucaucgaauuucaacaaaagaacaaccgccuccucgaaaucacacgcgaguucuccgucaacgcaggaguaaccacccccgucuccaccuacaugcucacaaacucggaacuccucucacuaaucaacgacaugcccaucaccaacgaccaaaagaaacucaugagcaacaacguucaaaucguccgccaacaaucauacuccaucaugugcauaaucaaagaagaaguccuagcuuacgucguccagcugccccucuacggagucaucgacacgcccugcuggaaacuacacacaagcccccucugcaccaccaacaccaaagaaggcuccaacauaugccucacacggaccgaccgcgguugguacugcgacaacgccggcuccgucuccuucuucccccaagcagaaacuugcaaaguccaauccaaccgcguauucugcgacacaaugaacagcagaacacucccuagcgaagucaaccucugcaacaucgacauauucaaccccaaauacgacugcaaaaucaugacgucaaaaaccgacgucuccagcuccguuaucaccucacucggcgccaucgucagcugcuacggcaaaacuaaaugcaccgccuccaacaaaaaccgcggcaucauuaaaaccuucagcaacggcugcgacuacgucuccaacaaaggugucgauacgguauccgucggaaacacccuauacugcgucaacaaacaagaaggcaaaucucucuacgucaaaggcgaacccauaaucaauuucuacgacccccuagucuuccccuccgaugaauuugacgccuccaucagccaagucaacgagaaaaucaaccaaucacuagccuucauccggaaauccgacgaacuccuacacaacguaaacgucggcaaauccaccaccaauauaaugaucacaaccaucaucaucguaaucaucgucauccuccuccuacucaucgccgucggauuauucuuauacugcaaagcccgcuaaggacuaguguccaccugucccuccugggcugcuggauugucucguuuuccugccaaauaaacaggaucagcgcuuuacagaucuaaaaaaaaaaaaaaaaaaaaaaaaaaaaaaaaaaaaaaaaaaaaaaaaaaaaaaaaaaaaaaaaugcaucccccccccccccccccccccccccccccccaaaggcucuuuucagagccaccagaauu

SEQ ID NO: 16732 - RNA, 1914 nt, Artificial Sequence
  mRNA product Design e-6 comprising derived and/or modified sequence from HRSV(Memphis-37)__AIY60640.1__F-del_DSCav1_mut4 (opt1)
gggagagcggcucggccauuuugucccagucaguccggaggcugcggcugcagaaguaccgccugcggaguaacugcaaagaagcuuaccauggagcugcccauccucaagaccaacgccaucaccacgauccuggccgcggugacccugugcuucgccagcucccagaacaucaccgaggaguucuaccagagcacgugcuccgccgucagcaagggcuaccucuccgcccugcgcaccgggugguacaccagcgugaucaccaucgagcuguccaacaucaaggagaacaagugcaacggcaccgacgccaaggugaagcucaucaagcaggagcuggacaaguacaagaacgcggucacggagcugcagcuccugaugcagagcaccccggccgccggcuccgggagcgcgaucugcuccggcaucgccgucugcaaggugcugcaccucgagggcgaggugaacaagaucaagaacgcccugcuguccaccaacaaggccgucgugagccucuccaacggggugagcguccugaccuucaaggugcuggaccucaagaacuacaucgacaagcagcugcugcccauccugaacaagcagagcugcuccaucagcaacaucgagaccgucaucgaguuccagcagaagaacaaccgccuccuggagaucacgcgggaguucagcgugaacgcgggcgugaccacccccgucuccaccuacaugcugacgaacagcgagcuccugucccugaucaacgacaugccgaucaccaacgaccagaagaagcucaugagcaacaacgugcagaucgugcgccagcaguccuacagcaucaugugcaucaucaaggaggagguccuggccuacguggugcagcugccccucuacggggucaucgacacccccugcuggaagcugcacaccagcccccugugcacgaccaacaccaaggagggcuccaacaucugccucacccggacggaccgcgggugguacugcgacaacgccggcagcguguccuucuucccgcaggccgagaccugcaagguccagagcaaccggguguucugcgacaccaugaacucccggacccugcccagcgaggugaaccucugcaacaucgacaucuucaaccccaaguacgacugcaagaucaugacguccaagaccgacgucagcuccagcgugaucaccucccugggcgccaucgugagcugcuacgggaagaccaagugcacggcgagcaacaagaaccgcggcaucaucaagaccuucuccaacgggugcgacuacgucagcaacaagggcguggacaccguguccgucggcaacacccuguacugcgugaacaagcaggagggcaagagccucuacgugaagggggagcccaucaucaacuucuacgacccgcuggucuuccccuccgacgaguucgacgccagcaucucccaggugaacgagaagaucaaccagagccuggccuucauccggaaguccgacgagcuccugcacaacgugaacgucggcaagagcaccacgaacaucaugaucaccaccaucaucaucgugaucaucgugauccugcugcuccugaucgccgucgggcuguuccucuacugcaaggcccgcugaggacuaguacuggcugcaucucccuuuccucuguccuccauccuucucccaggauggugaagggggaccugguacccagugauccccaccccaggauccuaaaucaugacuuaccugcuaauaaaaacucauuggaaaagugagaagaucuaaaaaaaaaaaaaaaaaaaaaaaaaaaaaaaaaaaaaaaaaaaaaaaaaaaaaaaaaaaaaaaaugcaucccccccccccccccccccccccccccccccaaaggcucuuuucagagccaccagaauu

SEQ ID NO: 16733 - RNA, 1914 nt, Artificial Sequence
  mRNA product Design e-6 comprising derived and/or modified sequence from HRSV(Memphis-37)__AIY60640.1__F-del_DSCav1_mut4 (opt1)
gggagagcggcucggccauuuugucccagucaguccggaggcugcggcugcagaaguaccgccugcggaguaacugcaaagaagcuuaccauggagcugcccauccucaagaccaacgccaucaccacgauccuggccgcggugacccugugcuucgccagcucccagaacaucaccgaggaguucuaccagagcacgugcuccgccgucagcaagggcuaccucuccgcccugcgcaccgggugguacaccagcgugaucaccaucgagcuguccaacaucaaggagaacaagugcaacggcaccgacgccaaggugaagcucaucaagcaggagcuggacaaguacaagaacgcggucacggagcugcagcuccugaugcagagcaccccggccgccggguccggcagcgccaucugcuccgggaucgcggugugcaaggugcugcaccucgagggcgaggucaacaagaucaagaacgcccugcugagcaccaacaaggccguggugucccucagcaacggcgucuccgugcugaccuucaaggugcuggaccucaagaacuacaucgacaagcagcugcugcccauccucaacaagcagagcugcuccaucagcaacaucgagacggucaucgaguuccagcagaagaacaaccggcugcuggagaucacccgcgaguucuccgugaacgccggggugaccacccccgucagcacguacaugcucaccaacagcgagcugcugucccucaucaacgacaugcccaucaccaacgaccagaagaagcugaugagcaacaacgugcagaucgugcggcagcaguccuacagcaucaugugcaucaucaaggaggagguccuggccuacguggugcagcucccgcuguacggcgucaucgacacccccugcuggaagcugcacacgagcccccucugcaccaccaacaccaaggagggguccaacaucugccugacgcgcaccgaccggggcugguacugcgacaacgcgggguccgugagcuucuucccccaggccgagaccugcaaggugcaguccaaccgcgucuucugcgacaccaugaacagccggacgcucccguccgaggugaaccugugcaacaucgacaucuucaaccccaaguacgacugcaagaucaugaccagcaagaccgacgucuccagcuccgugaucaccagccugggcgccaucguguccugcuacggcaagacgaagugcaccgccagcaacaagaaccgggggaucaucaagaccuucuccaacggcugcgacuacgucagcaacaaggggguggacaccgugagcgucggcaacacgcucuacugcgugaacaagcaggagggcaagucccuguacgugaagggggagcccaucaucaacuucuacgacccccuggucuucccgagcgacgaguucgacgccuccaucagccaggugaacgagaagaucaaccagucccucgcguucauccgcaagagcgacgagcugcugcacaacgugaacgucggcaaguccaccaccaacaucaugaucaccaccaucaucaucgugaucaucgugauccuccugcugcucaucgccgucgggcuguuccuguacugcaaggcccggugaggacuaguacuggcugcaucucccuuuccucuguccuccauccuucucccaggauggugaagggggaccugguacccagugauccccaccccaggauccuaaaucaugacuuaccugcuaauaaaaacucauuggaaaagugagaagaucuaaaaaaaaaaaaaaaaaaaaaaaaaaaaaaaaaaaaaaaaaaaaaaaaaaaaaaaaaaaaaaaaugcaucccccccccccccccccccccccccccccccaaaggcucuuuucagagccaccagaauu

SEQ ID NO: 16734 - RNA, 1914 nt, Artificial Sequence
  mRNA product Design e-6 comprising derived and/or modified sequence from HRSV(Memphis-37)__AIY60640.1__F-del_DSCav1_mut4 (opt2)
gggagagcggcucggccauuuugucccagucaguccggaggcugcggcugcagaaguaccgccugcggaguaacugcaaagaagcuuaccauggagcuccccauccucaagaccaacgccaucaccaccauccucgccgccgucacccucugcuucgccuccucccagaacaucaccgaggaguucuaccaguccaccugcuccgccgucuccaagggcuaccucuccgcccuccgcaccggcugguacaccuccgucaucaccaucgagcucuccaacaucaaggagaacaagugcaacggcaccgacgccaaggucaagcucaucaagcaggagcucgacaaguacaagaacgccgucaccgagcuccagcuccucaugcaguccacccccgccgccggcuccggcuccgccaucugcuccggcaucgccgucugcaagguccuccaccucgagggcgaggucaacaagaucaagaacgcccuccucuccaccaacaaggccgucgucucccucuccaacggcgucuccguccucaccuucaagguccucgaccucaagaacuacaucgacaagcagcuccuccccauccucaacaagcaguccugcuccaucuccaacaucgagaccgucaucgaguuccagcagaagaacaaccgccuccucgagaucacccgcgaguucuccgucaacgccggcgucaccacccccgucuccaccuacaugcucaccaacuccgagcuccucucccucaucaacgacaugcccaucaccaacgaccagaagaagcucauguccaacaacguccagaucguccgccagcaguccuacuccaucaugugcaucaucaaggaggagguccucgccuacgucguccagcucccccucuacggcgucaucgacacccccugcuggaagcuccacaccuccccccucugcaccaccaacaccaaggagggcuccaacaucugccucacccgcaccgaccgcggcugguacugcgacaacgccggcuccgucuccuucuucccccaggccgagaccugcaagguccaguccaaccgcgucuucugcgacaccaugaacucccgcacccuccccuccgaggucaaccucugcaacaucgacaucuucaaccccaaguacgacugcaagaucaugaccuccaagaccgacgucuccuccuccgucaucaccucccucggcgccaucgucuccugcuacggcaagaccaagugcaccgccuccaacaagaaccgcggcaucaucaagaccuucuccaacggcugcgacuacgucuccaacaagggcgucgacaccgucuccgucggcaacacccucuacugcgucaacaagcaggagggcaagucccucuacgucaagggcgagcccaucaucaacuucuacgacccccucgucuuccccuccgacgaguucgacgccuccaucucccaggucaacgagaagaucaaccagucccucgccuucauccgcaaguccgacgagcuccuccacaacgucaacgucggcaaguccaccaccaacaucaugaucaccaccaucaucaucgucaucaucgucauccuccuccuccucaucgccgucggccucuuccucuacugcaaggcccgcugaggacuaguacuggcugcaucucccuuuccucuguccuccauccuucucccaggauggugaagggggaccugguacccagugauccccaccccaggauccuaaaucaugacuuaccugcuaauaaaaacucauuggaaaagugagaagaucuaaaaaaaaaaaaaaaaaaaaaaaaaaaaaaaaaaaaaaaaaaaaaaaaaaaaaaaaaaaaaaaaugcaucccccccccccccccccccccccccccccccaaaggcucuuuucagagccaccagaauu

SEQ ID NO: 16735 - RNA, 1914 nt, Artificial Sequence
  mRNA product Design e-6 comprising derived and/or modified sequence from HRSV(Memphis-37)__AIY60640.1__F-del_DSCav1_mut4 (opt3)
gggagagcggcucggccauuuugucccagucaguccggaggcugcggcugcagaaguaccgccugcggaguaacugcaaagaagcuuaccauggagcugcccauccucaagaccaacgccauuacaacuauacuugcugcagugacgcugugcuucgccagcucccagaauaucaccgaagaguuuuaccaaucuacauguucagcggucaguaaaggcuauuugagcgcuuuaagaacugggugguacaccuccguuauuacaaucgaacugucuaacauuaaggagaauaaaugcaacggaaccgacgccaaggugaaacuaaucaagcaggaacucgauaaguauaaaaaugcaguaacugagcugcagcuucugaugcagucgaccccugccgcugguucaggcagcgcaauauguagugggaucgccgugugcaaggucuugcaccucgagggagaagugaacaaaauuaagaaugcucugcuguccacaaacaaagccguugugucucucagcaauggcgucuccguguuaacguucaagguacuggaccuuaagaacuacaucgauaaacaauugcugccaauucuaaauaagcagucauguaguaucagcaacauagagacuguuauugaauuucagcagaaaaauaacaggcuccuggagaucacccgggaguucucugugaaugcgggugucacaacuccgguguccaccuauaugcuuacaaacucagaacuguugagccucauuaacgacaugcccaucaccaaugaucaaaagaaacugaugaguaacaaugugcagaucguccgccagcagucuuacuccauuaugugcauaaucaaggaggaaguuuuagcauaugugguacaacugccucucuacggggugauugacacgccauguuggaaacuucauacuagcccccugugcacaaccaacacuaaggagggaucgaauaucuguuugacacgaaccgaucguggcugguacugcgacaacgccggcucugucuccuuuuucccucaggcugaaacguguaaggugcagucaaauagaguguuuugcgauaccaugaacaguagaacacugccaagcgaggugaaucucugcaacauagacauuuucaaucccaaauaugauuguaagaucaugacuuccaaaaccgacgucucuagcucagugaucacaagucugggggccauuguauccugcuacggaaagacuaaauguaccgcaagcaacaagaauagggguaucauuaagacauuuucuaacggcugcgauuauguuucaaauaaagggguggacaccgucagugugggaaacacucuuuacugugucaacaagcaagagggcaaaagccuguaugugaagggugaaccuauaaucaauuucuacgacccauugguuuuuccguccgaugaguucgacgcuucuauuucgcagguuaacgagaaaaucaaucagagccucgccuuuauccggaaguccgaugaacuguuacacaacguaaaugucgggaagucaacgacaaacauuaugauaaccacuaucauuaucgugauuaucguuauacugcuacuccugaucgcggugggacuuuucuuguauugcaaagcccgcugaggacuaguacuggcugcaucucccuuuccucuguccuccauccuucucccaggauggugaagggggaccugguacccagugauccccaccccaggauccuaaaucaugacuuaccugcuaauaaaaacucauuggaaaagugagaagaucuaaaaaaaaaaaaaaaaaaaaaaaaaaaaaaaaaaaaaaaaaaaaaaaaaaaaaaaaaaaaaaaaugcaucccccccccccccccccccccccccccccccaaaggcucuuuucagagccaccagaauu

SEQ ID NO: 16736 - RNA, 1914 nt, Artificial Sequence
  mRNA product Design e-6 comprising derived and/or modified sequence from HRSV(Memphis-37)__AIY60640.1__F-del_DSCav1_mut4 (opt4)
gggagagcggcucggccauuuugucccagucaguccggaggcugcggcugcagaaguaccgccugcggaguaacugcaaagaagcuuaccauggagcugcccauccugaagaccaacgccaucaccaccauccuggccgccgugacccugugcuucgccagcagccagaacaucaccgaggaguucuaccagagcaccugcagcgccgugagcaagggcuaccugagcgcccugagaaccggcugguacaccagcgugaucaccaucgagcugagcaacaucaaggagaacaagugcaacggcaccgacgccaaggugaagcugaucaagcaggagcuggacaaguacaagaacgccgugaccgagcugcagcugcugaugcagagcacccccgccgccggcagcggcagcgccaucugcagcggcaucgccgugugcaaggugcugcaccuggagggcgaggugaacaagaucaagaacgcccugcugagcaccaacaaggccguggugagccugagcaacggcgugagcgugcugaccuucaaggugcuggaccugaagaacuacaucgacaagcagcugcugcccauccugaacaagcagagcugcagcaucagcaacaucgagaccgugaucgaguuccagcagaagaacaacagacugcuggagaucaccagagaguucagcgugaacgccggcgugaccacccccgugagcaccuacaugcugaccaacagcgagcugcugagccugaucaacgacaugcccaucaccaacgaccagaagaagcugaugagcaacaacgugcagaucgugagacagcagagcuacagcaucaugugcaucaucaaggaggaggugcuggccuacguggugcagcugccccuguacggcgugaucgacacccccugcuggaagcugcacaccagcccccugugcaccaccaacaccaaggagggcagcaacaucugccugaccagaaccgacagaggcugguacugcgacaacgccggcagcgugagcuucuucccccaggccgagaccugcaaggugcagagcaacagaguguucugcgacaccaugaacagcagaacccugcccagcgaggugaaccugugcaacaucgacaucuucaaccccaaguacgacugcaagaucaugaccagcaagaccgacgugagcagcagcgugaucaccagccugggcgccaucgugagcugcuacggcaagaccaagugcaccgccagcaacaagaacagaggcaucaucaagaccuucagcaacggcugcgacuacgugagcaacaagggcguggacaccgugagcgugggcaacacccuguacugcgugaacaagcaggagggcaagagccuguacgugaagggcgagcccaucaucaacuucuacgacccccugguguuccccagcgacgaguucgacgccagcaucagccaggugaacgagaagaucaaccagagccuggccuucaucagaaagagcgacgagcugcugcacaacgugaacgugggcaagagcaccaccaacaucaugaucaccaccaucaucaucgugaucaucgugauccugcugcugcugaucgccgugggccuguuccuguacugcaaggccagaugaggacuaguacuggcugcaucucccuuuccucuguccuccauccuucucccaggauggugaagggggaccugguacccagugauccccaccccaggauccuaaaucaugacuuaccugcuaauaaaaacucauuggaaaagugagaagaucuaaaaaaaaaaaaaaaaaaaaaaaaaaaaaaaaaaaaaaaaaaaaaaaaaaaaaaaaaaaaaaaaugcaucccccccccccccccccccccccccccccccaaaggcucuuuucagagccaccagaauu

SEQ ID NO: 16737 - RNA, 1914 nt, Artificial Sequence
  mRNA product Design e-6 comprising derived and/or modified sequence from HRSV(Memphis-37)__AIY60640.1__F-del_DSCav1_mut4 (opt5)
gggagagcggcucggccauuuugucccagucaguccggaggcugcggcugcagaaguaccgccugcggaguaacugcaaagaagcuuaccauggagcugcccauccucaagaccaacgccauuacaacgauccuggcugccgugacccuuugcuucgcgagcucccagaauauuacagaagaguuuuaccaaucuaccuguagcgcugucuccaaaggcuaucugucugcccucagaacagggugguacaccagcguuaucacaauugaacuguccaacaucaaggagaauaaaugcaacggaaccgacgccaaggugaaacuuaucaagcaggaacuggauaaguauaaaaaugcugugacggagcuccagcugcugaugcagucuaccccugccgcuggcagcggguccgccauuuguagcggaaucgcggucugcaaggugcuccaccuggagggcgaaguuaacaaaauuaagaaugcccuucugucuacaaacaaagcuguggucucccucagcaauggggugucuguucugaccuucaaggugcuugaccugaagaacuacaucgauaaacaacuccugccgauucugaauaagcaguccuguagcaucucuaacauugagacagucaucgaauuucagcagaaaaauaaccggcuccuggagaucacccgcgaguucuccgugaaugccggagugacgacacccgucagcaccuauaugcuuacaaacuccgaacugcucucucugauuaacgacaugccuaucaccaaugaucaaaagaaacuuaugagcaacaauguucagauugugagacagcaguccuacagcaucaugugcauuaucaaggaggaagugcuggcuuaugucgugcaacucccccuguacggcguuaucgacaccccuuguuggaaacugcauacaucuccccucugcacgaccaacacaaaggagggcuccaauauuugucugacccggacagaucgcgggugguacugcgacaacgccggaagcgugagcuuuuucccucaggcggaaaccuguaagguccagucuaauagaguguuuugcgauacgaugaacuccagaacacugccgucugagguuaaucucugcaacaucgacauuuucaaucccaaauaugauuguaagaucaugaccagcaaaaccgacguguccagcucugucauuacaucccugggcgccaucgugagcugcuacgggaagaccaaauguacagcuucuaacaagaaucggggaaucauuaagacguuuuccaacggcugcgauuaugucagcaauaaagggguggacaccguuuccgugggaaacacacuuuacugugucaacaagcaagagggcaaaucucuguaugugaagggcgaaccuaucauuaauuucuacgacccccucguuuuuccuagcgaugaguucgacgccuccaucucucaggugaacgaaaagauuaaucagagccuggcuuuuauccgcaaguccgaugagcugcuccacaacgucaauguggggaaaagcaccacaaacauuaugaucaccacgaucauuaucgugauuaucguuauucugcuucugcucaucgccgucggacuguuccuguauugcaaagccagaugaggacuaguacuggcugcaucucccuuuccucuguccuccauccuucucccaggauggugaagggggaccugguacccagugauccccaccccaggauccuaaaucaugacuuaccugcuaauaaaaacucauuggaaaagugagaagaucuaaaaaaaaaaaaaaaaaaaaaaaaaaaaaaaaaaaaaaaaaaaaaaaaaaaaaaaaaaaaaaaaugcaucccccccccccccccccccccccccccccccaaaggcucuuuucagagccaccagaauu

SEQ ID NO: 16738 - RNA, 1914 nt, Artificial Sequence
  mRNA product Design e-6 comprising derived and/or modified sequence from HRSV(Memphis-37)__AIY60640.1__F-del_DSCav1_mut4 (opt6)
gggagagcggcucggccauuuugucccagucaguccggaggcugcggcugcagaaguaccgccugcggaguaacugcaaagaagcuuaccauggaacuaccaauacucaaaacaaacgcaauaacaacuauacuagccgcaguuacacucugcuucgcuucaucacaaaauaucacagaagaauuuuaccaaucuacauguucagcuguauccaaagguuaccuuucagcacuacgaacaggaugguauaccucaguaaucaccaucgaacucucgaacauaaaagaaaacaaauguaacggaaccgaugcuaaagucaagcucauaaaacaagaacuagacaaauacaaaaacgcaguaaccgaacuacaacuacuuaugcaaucaacaccagcugcaggcucaggcucagcaaucugcucaggcauagcuguaugcaaaguacuacaucuagaaggagaaguaaacaaaauaaaaaacgcauuauuaucaacaaauaaagcaguaguaucacuaucaaauggaguaucaguacucacauucaaaguacuagaucuaaaaaacuacauugacaaacaauuacuaccaauccucaacaaacaaucaugcucaauauccaacauagaaacaguaauagaauuucaacaaaaaaacaaucgacuacuagaaauaacaagagaauuuucagucaaugccggaguuacaacacccguaagcacuuacaugcuaaccaacucagaacuacuaucacuaauaaacgacaugccaauuacaaacgaccaaaaaaaacuaaugucaaauaacguacaaauaguacgucaacaaucauacucaauaaugugcauaauaaaagaagaaguccuagcauacguaguacaauuacccuuauauggcguaauagacacaccaugcuggaaacuacacacauccccacucugcaccaccaacaccaaagaaggcuccaacauaugucuaacccgaaccgacagagguugguauugugauaacgcuggcuccguaucauucuucccacaagcagaaacauguaaaguacaaucaaacagaguauucugcgauacaaugaauagcagaacacuaccaucagaaguaaacuuaugcaacaucgacaucuucaaucccaaauacgacugcaaaauaaugacauccaaaacugacguuucuucaagcguaauaacaucuuuaggagcaauaguauccugcuacggaaaaacuaaaugcacagcauccaauaaaaaccguggaauaauaaaaacauucucaaauggcugcgacuacgucucaaacaaaggcguagacaccguuagugucggaaacacacuauauugcguaaauaaacaagaaggaaaauccuuauacguaaaaggcgaaccaauaauuaacuucuaugacccccucguauuuccauccgaugaauuugacgcaucaaucucgcaaguaaacgaaaaaauaaaccaaagccuagcauucauaagaaaauccgacgaacuacuccacaauguaaauguaggaaaaucaacuaccaacauaaugauuacuacuauaauaauaguaauuauagucaucuuacuacuauuaauagcagucggauuauuccuauacugcaaagcaagauagggacuaguacuggcugcaucucccuuuccucuguccuccauccuucucccaggauggugaagggggaccugguacccagugauccccaccccaggauccuaaaucaugacuuaccugcuaauaaaaacucauuggaaaagugagaagaucuaaaaaaaaaaaaaaaaaaaaaaaaaaaaaaaaaaaaaaaaaaaaaaaaaaaaaaaaaaaaaaaaugcaucccccccccccccccccccccccccccccccaaaggcucuuuucagagccaccagaauu

SEQ ID NO: 16739 - RNA, 1914 nt, Artificial Sequence
  mRNA product Design e-6 comprising derived and/or modified sequence from HRSV(Memphis-37)__AIY60640.1__F-del_DSCav1_mut4 (opt11)
gggagagcggcucggccauuuugucccagucaguccggaggcugcggcugcagaaguaccgccugcggaguaacugcaaagaagcuuaccauggagcuccccauccuaaaaaccaacgccaucaccaccauccucgccgccgucacccuaugcuucgcuucaucacaaaacaucaccgaagaauuuuaccaaucuaccugcuccgccgucuccaaaggauaucucagcgcccuacggaccggcugguacaccuccgucauaaccaucgaacucaguaacaucaaagaaaacaaaugcaacggcaccgacgccaaagucaaacuaaucaaacaagaacuagauaaauacaaaaacgcggucaccgaacuacaacuccuaaugcaaagcacccccgccgccggauccggcuccgccauaugcuccggcauugcugucugcaaaguacuacaccucgagggcgaggucaacaaaaucaaaaacgcacuacucagcacuaauaaagccguaguaucccuaucaaacggugucucagucuuaacauucaaaguacucgaccuaaagaacuacaucgacaaacaacuccuacccauccucaacaagcaguccuguucuaucucaaacaucgaaaccgucaucgaauuucaacaaaagaacaaccgccuccucgaaaucacacgcgaguucuccgucaacgcaggaguaaccacccccgucuccaccuacaugcucacaaacucggaacuccucucacuaaucaacgacaugcccaucaccaacgaccaaaagaaacucaugagcaacaacguucaaaucguccgccaacaaucauacuccaucaugugcauaaucaaagaagaaguccuagcuuacgucguccagcugccccucuacggagucaucgacacgcccugcuggaaacuacacacaagcccccucugcaccaccaacaccaaagaaggcuccaacauaugccucacacggaccgaccgcgguugguacugcgacaacgccggcuccgucuccuucuucccccaagcagaaacuugcaaaguccaauccaaccgcguauucugcgacacaaugaacagcagaacacucccuagcgaagucaaccucugcaacaucgacauauucaaccccaaauacgacugcaaaaucaugacgucaaaaaccgacgucuccagcuccguuaucaccucacucggcgccaucgucagcugcuacggcaaaacuaaaugcaccgccuccaacaaaaaccgcggcaucauuaaaaccuucagcaacggcugcgacuacgucuccaacaaaggugucgauacgguauccgucggaaacacccuauacugcgucaacaaacaagaaggcaaaucucucuacgucaaaggcgaacccauaaucaauuucuacgacccccuagucuuccccuccgaugaauuugacgccuccaucagccaagucaacgagaaaaucaaccaaucacuagccuucauccggaaauccgacgaacuccuacacaacguaaacgucggcaaauccaccaccaauauaaugaucacaaccaucaucaucguaaucaucgucauccuccuccuacucaucgccgucggauuauucuuauacugcaaagcccgcuaaggacuaguacuggcugcaucucccuuuccucuguccuccauccuucucccaggauggugaagggggaccugguacccagugauccccaccccaggauccuaaaucaugacuuaccugcuaauaaaaacucauuggaaaagugagaagaucuaaaaaaaaaaaaaaaaaaaaaaaaaaaaaaaaaaaaaaaaaaaaaaaaaaaaaaaaaaaaaaaaugcaucccccccccccccccccccccccccccccccaaaggcucuuuucagagccaccagaauu

SEQ ID NO: 16740 - RNA, 2130 nt, Artificial Sequence
  mRNA product Design f-1 comprising derived and/or modified sequence from HRSV(Memphis-37)__AIY60640.1__F-del_DSCav1_mut4 (opt1)
gggagagcggcucggccauuuugucccagucaguccggaggcugcggcugcagaaguaccgccugcggaguaacugcaaagaagcuuaccauggagcugcccauccucaagaccaacgccaucaccacgauccuggccgcggugacccugugcuucgccagcucccagaacaucaccgaggaguucuaccagagcacgugcuccgccgucagcaagggcuaccucuccgcccugcgcaccgggugguacaccagcgugaucaccaucgagcuguccaacaucaaggagaacaagugcaacggcaccgacgccaaggugaagcucaucaagcaggagcuggacaaguacaagaacgcggucacggagcugcagcuccugaugcagagcaccccggccgccggcuccgggagcgcgaucugcuccggcaucgccgucugcaaggugcugcaccucgagggcgaggugaacaagaucaagaacgcccugcuguccaccaacaaggccgucgugagccucuccaacggggugagcguccugaccuucaaggugcuggaccucaagaacuacaucgacaagcagcugcugcccauccugaacaagcagagcugcuccaucagcaacaucgagaccgucaucgaguuccagcagaagaacaaccgccuccuggagaucacgcgggaguucagcgugaacgcgggcgugaccacccccgucuccaccuacaugcugacgaacagcgagcuccugucccugaucaacgacaugccgaucaccaacgaccagaagaagcucaugagcaacaacgugcagaucgugcgccagcaguccuacagcaucaugugcaucaucaaggaggagguccuggccuacguggugcagcugccccucuacggggucaucgacacccccugcuggaagcugcacaccagcccccugugcacgaccaacaccaaggagggcuccaacaucugccucacccggacggaccgcgggugguacugcgacaacgccggcagcguguccuucuucccgcaggccgagaccugcaagguccagagcaaccggguguucugcgacaccaugaacucccggacccugcccagcgaggugaaccucugcaacaucgacaucuucaaccccaaguacgacugcaagaucaugacguccaagaccgacgucagcuccagcgugaucaccucccugggcgccaucgugagcugcuacgggaagaccaagugcacggcgagcaacaagaaccgcggcaucaucaagaccuucuccaacgggugcgacuacgucagcaacaagggcguggacaccguguccgucggcaacacccuguacugcgugaacaagcaggagggcaagagccucuacgugaagggggagcccaucaucaacuucuacgacccgcuggucuuccccuccgacgaguucgacgccagcaucucccaggugaacgagaagaucaaccagagccuggccuucauccggaaguccgacgagcuccugcacaacgugaacgucggcaagagcaccacgaacaucaugaucaccaccaucaucaucgugaucaucgugauccugcugcuccugaucgccgucgggcuguuccucuacugcaaggcccgcugaggacuagugaagggaacacccaaauuuaauucagccuuaagcacaauuaauuaagagugaaacguaauuguacaagcaguuggucacccaccauagggcaugaucaacaccgcaaccuuuccuuuuucccccagugauucugaaaaaccccucuucccuucagcuugcuuagauguuccaaauuuaguaagcuuaaggcggccuacagaagaaaaagaaaaaaaaggccacaaaaguucccucucacuuucaguaaauaaaauaaaagcagcaacagaaauaaagaaauaaaugaaauucaaaaugaaauaaauauuguguugugcagcauuaaaaaaucaauaaaaauuaaaaaugagcaagaucuaaaaaaaaaaaaaaaaaaaaaaaaaaaaaaaaaaaaaaaaaaaaaaaaaaaaaaaaaaaaaaaaugcaucccccccccccccccccccccccccccccccaaaggcucuuuucagagccaccagaauu

SEQ ID NO: 16741 - RNA, 2130 nt, Artificial Sequence
  mRNA product Design f-1 comprising derived and/or modified sequence from HRSV(Memphis-37)__AIY60640.1__F-del_DSCav1_mut4 (opt1)
gggagagcggcucggccauuuugucccagucaguccggaggcugcggcugcagaaguaccgccugcggaguaacugcaaagaagcuuaccauggagcugcccauccucaagaccaacgccaucaccacgauccuggccgcggugacccugugcuucgccagcucccagaacaucaccgaggaguucuaccagagcacgugcuccgccgucagcaagggcuaccucuccgcccugcgcaccgggugguacaccagcgugaucaccaucgagcuguccaacaucaaggagaacaagugcaacggcaccgacgccaaggugaagcucaucaagcaggagcuggacaaguacaagaacgcggucacggagcugcagcuccugaugcagagcaccccggccgccggguccggcagcgccaucugcuccgggaucgcggugugcaaggugcugcaccucgagggcgaggucaacaagaucaagaacgcccugcugagcaccaacaaggccguggugucccucagcaacggcgucuccgugcugaccuucaaggugcuggaccucaagaacuacaucgacaagcagcugcugcccauccucaacaagcagagcugcuccaucagcaacaucgagacggucaucgaguuccagcagaagaacaaccggcugcuggagaucacccgcgaguucuccgugaacgccggggugaccacccccgucagcacguacaugcucaccaacagcgagcugcugucccucaucaacgacaugcccaucaccaacgaccagaagaagcugaugagcaacaacgugcagaucgugcggcagcaguccuacagcaucaugugcaucaucaaggaggagguccuggccuacguggugcagcucccgcuguacggcgucaucgacacccccugcuggaagcugcacacgagcccccucugcaccaccaacaccaaggagggguccaacaucugccugacgcgcaccgaccggggcugguacugcgacaacgcgggguccgugagcuucuucccccaggccgagaccugcaaggugcaguccaaccgcgucuucugcgacaccaugaacagccggacgcucccguccgaggugaaccugugcaacaucgacaucuucaaccccaaguacgacugcaagaucaugaccagcaagaccgacgucuccagcuccgugaucaccagccugggcgccaucguguccugcuacggcaagacgaagugcaccgccagcaacaagaaccgggggaucaucaagaccuucuccaacggcugcgacuacgucagcaacaaggggguggacaccgugagcgucggcaacacgcucuacugcgugaacaagcaggagggcaagucccuguacgugaagggggagcccaucaucaacuucuacgacccccuggucuucccgagcgacgaguucgacgccuccaucagccaggugaacgagaagaucaaccagucccucgcguucauccgcaagagcgacgagcugcugcacaacgugaacgucggcaaguccaccaccaacaucaugaucaccaccaucaucaucgugaucaucgugauccuccugcugcucaucgccgucgggcuguuccuguacugcaaggcccggugaggacuagugaagggaacacccaaauuuaauucagccuuaagcacaauuaauuaagagugaaacguaauuguacaagcaguuggucacccaccauagggcaugaucaacaccgcaaccuuuccuuuuucccccagugauucugaaaaaccccucuucccuucagcuugcuuagauguuccaaauuuaguaagcuuaaggcggccuacagaagaaaaagaaaaaaaaggccacaaaaguucccucucacuuucaguaaauaaaauaaaagcagcaacagaaauaaagaaauaaaugaaauucaaaaugaaauaaauauuguguugugcagcauuaaaaaaucaauaaaaauuaaaaaugagcaagaucuaaaaaaaaaaaaaaaaaaaaaaaaaaaaaaaaaaaaaaaaaaaaaaaaaaaaaaaaaaaaaaaaugcaucccccccccccccccccccccccccccccccaaaggcucuuuucagagccaccagaauu

SEQ ID NO: 16742 - RNA, 2130 nt, Artificial Sequence
  mRNA product Design f-1 comprising derived and/or modified sequence from HRSV(Memphis-37)__AIY60640.1__F-del_DSCav1_mut4 (opt2)
gggagagcggcucggccauuuugucccagucaguccggaggcugcggcugcagaaguaccgccugcggaguaacugcaaagaagcuuaccauggagcuccccauccucaagaccaacgccaucaccaccauccucgccgccgucacccucugcuucgccuccucccagaacaucaccgaggaguucuaccaguccaccugcuccgccgucuccaagggcuaccucuccgcccuccgcaccggcugguacaccuccgucaucaccaucgagcucuccaacaucaaggagaacaagugcaacggcaccgacgccaaggucaagcucaucaagcaggagcucgacaaguacaagaacgccgucaccgagcuccagcuccucaugcaguccacccccgccgccggcuccggcuccgccaucugcuccggcaucgccgucugcaagguccuccaccucgagggcgaggucaacaagaucaagaacgcccuccucuccaccaacaaggccgucgucucccucuccaacggcgucuccguccucaccuucaagguccucgaccucaagaacuacaucgacaagcagcuccuccccauccucaacaagcaguccugcuccaucuccaacaucgagaccgucaucgaguuccagcagaagaacaaccgccuccucgagaucacccgcgaguucuccgucaacgccggcgucaccacccccgucuccaccuacaugcucaccaacuccgagcuccucucccucaucaacgacaugcccaucaccaacgaccagaagaagcucauguccaacaacguccagaucguccgccagcaguccuacuccaucaugugcaucaucaaggaggagguccucgccuacgucguccagcucccccucuacggcgucaucgacacccccugcuggaagcuccacaccuccccccucugcaccaccaacaccaaggagggcuccaacaucugccucacccgcaccgaccgcggcugguacugcgacaacgccggcuccgucuccuucuucccccaggccgagaccugcaagguccaguccaaccgcgucuucugcgacaccaugaacucccgcacccuccccuccgaggucaaccucugcaacaucgacaucuucaaccccaaguacgacugcaagaucaugaccuccaagaccgacgucuccuccuccgucaucaccucccucggcgccaucgucuccugcuacggcaagaccaagugcaccgccuccaacaagaaccgcggcaucaucaagaccuucuccaacggcugcgacuacgucuccaacaagggcgucgacaccgucuccgucggcaacacccucuacugcgucaacaagcaggagggcaagucccucuacgucaagggcgagcccaucaucaacuucuacgacccccucgucuuccccuccgacgaguucgacgccuccaucucccaggucaacgagaagaucaaccagucccucgccuucauccgcaaguccgacgagcuccuccacaacgucaacgucggcaaguccaccaccaacaucaugaucaccaccaucaucaucgucaucaucgucauccuccuccuccucaucgccgucggccucuuccucuacugcaaggcccgcugaggacuagugaagggaacacccaaauuuaauucagccuuaagcacaauuaauuaagagugaaacguaauuguacaagcaguuggucacccaccauagggcaugaucaacaccgcaaccuuuccuuuuucccccagugauucugaaaaaccccucuucccuucagcuugcuuagauguuccaaauuuaguaagcuuaaggcggccuacagaagaaaaagaaaaaaaaggccacaaaaguucccucucacuuucaguaaauaaaauaaaagcagcaacagaaauaaagaaauaaaugaaauucaaaaugaaauaaauauuguguugugcagcauuaaaaaaucaauaaaaauuaaaaaugagcaagaucuaaaaaaaaaaaaaaaaaaaaaaaaaaaaaaaaaaaaaaaaaaaaaaaaaaaaaaaaaaaaaaaaugcaucccccccccccccccccccccccccccccccaaaggcucuuuucagagccaccagaauu

SEQ ID NO: 16743 - RNA, 2130 nt, Artificial Sequence
  mRNA product Design f-1 comprising derived and/or modified sequence from HRSV(Memphis-37)__AIY60640.1__F-del_DSCav1_mut4 (opt3)
gggagagcggcucggccauuuugucccagucaguccggaggcugcggcugcagaaguaccgccugcggaguaacugcaaagaagcuuaccauggagcugcccauccucaagaccaacgccauuacaacuauacuugcugcagugacgcugugcuucgccagcucccagaauaucaccgaagaguuuuaccaaucuacauguucagcggucaguaaaggcuauuugagcgcuuuaagaacugggugguacaccuccguuauuacaaucgaacugucuaacauuaaggagaauaaaugcaacggaaccgacgccaaggugaaacuaaucaagcaggaacucgauaaguauaaaaaugcaguaacugagcugcagcuucugaugcagucgaccccugccgcugguucaggcagcgcaauauguagugggaucgccgugugcaaggucuugcaccucgagggagaagugaacaaaauuaagaaugcucugcuguccacaaacaaagccguugugucucucagcaauggcgucuccguguuaacguucaagguacuggaccuuaagaacuacaucgauaaacaauugcugccaauucuaaauaagcagucauguaguaucagcaacauagagacuguuauugaauuucagcagaaaaauaacaggcuccuggagaucacccgggaguucucugugaaugcgggugucacaacuccgguguccaccuauaugcuuacaaacucagaacuguugagccucauuaacgacaugcccaucaccaaugaucaaaagaaacugaugaguaacaaugugcagaucguccgccagcagucuuacuccauuaugugcauaaucaaggaggaaguuuuagcauaugugguacaacugccucucuacggggugauugacacgccauguuggaaacuucauacuagcccccugugcacaaccaacacuaaggagggaucgaauaucuguuugacacgaaccgaucguggcugguacugcgacaacgccggcucugucuccuuuuucccucaggcugaaacguguaaggugcagucaaauagaguguuuugcgauaccaugaacaguagaacacugccaagcgaggugaaucucugcaacauagacauuuucaaucccaaauaugauuguaagaucaugacuuccaaaaccgacgucucuagcucagugaucacaagucugggggccauuguauccugcuacggaaagacuaaauguaccgcaagcaacaagaauagggguaucauuaagacauuuucuaacggcugcgauuauguuucaaauaaagggguggacaccgucagugugggaaacacucuuuacugugucaacaagcaagagggcaaaagccuguaugugaagggugaaccuauaaucaauuucuacgacccauugguuuuuccguccgaugaguucgacgcuucuauuucgcagguuaacgagaaaaucaaucagagccucgccuuuauccggaaguccgaugaacuguuacacaacguaaaugucgggaagucaacgacaaacauuaugauaaccacuaucauuaucgugauuaucguuauacugcuacuccugaucgcggugggacuuuucuuguauugcaaagcccgcugaggacuagugaagggaacacccaaauuuaauucagccuuaagcacaauuaauuaagagugaaacguaauuguacaagcaguuggucacccaccauagggcaugaucaacaccgcaaccuuuccuuuuucccccagugauucugaaaaaccccucuucccuucagcuugcuuagauguuccaaauuuaguaagcuuaaggcggccuacagaagaaaaagaaaaaaaaggccacaaaaguucccucucacuuucaguaaauaaaauaaaagcagcaacagaaauaaagaaauaaaugaaauucaaaaugaaauaaauauuguguugugcagcauuaaaaaaucaauaaaaauuaaaaaugagcaagaucuaaaaaaaaaaaaaaaaaaaaaaaaaaaaaaaaaaaaaaaaaaaaaaaaaaaaaaaaaaaaaaaaugcaucccccccccccccccccccccccccccccccaaaggcucuuuucagagccaccagaauu

SEQ ID NO: 16744 - RNA, 2130 nt, Artificial Sequence
  mRNA product Design f-1 comprising derived and/or modified sequence from HRSV(Memphis-37)__AIY60640.1__F-del_DSCav1_mut4 (opt4)
gggagagcggcucggccauuuugucccagucaguccggaggcugcggcugcagaaguaccgccugcggaguaacugcaaagaagcuuaccauggagcugcccauccugaagaccaacgccaucaccaccauccuggccgccgugacccugugcuucgccagcagccagaacaucaccgaggaguucuaccagagcaccugcagcgccgugagcaagggcuaccugagcgcccugagaaccggcugguacaccagcgugaucaccaucgagcugagcaacaucaaggagaacaagugcaacggcaccgacgccaaggugaagcugaucaagcaggagcuggacaaguacaagaacgccgugaccgagcugcagcugcugaugcagagcacccccgccgccggcagcggcagcgccaucugcagcggcaucgccgugugcaaggugcugcaccuggagggcgaggugaacaagaucaagaacgcccugcugagcaccaacaaggccguggugagccugagcaacggcgugagcgugcugaccuucaaggugcuggaccugaagaacuacaucgacaagcagcugcugcccauccugaacaagcagagcugcagcaucagcaacaucgagaccgugaucgaguuccagcagaagaacaacagacugcuggagaucaccagagaguucagcgugaacgccggcgugaccacccccgugagcaccuacaugcugaccaacagcgagcugcugagccugaucaacgacaugcccaucaccaacgaccagaagaagcugaugagcaacaacgugcagaucgugagacagcagagcuacagcaucaugugcaucaucaaggaggaggugcuggccuacguggugcagcugccccuguacggcgugaucgacacccccugcuggaagcugcacaccagcccccugugcaccaccaacaccaaggagggcagcaacaucugccugaccagaaccgacagaggcugguacugcgacaacgccggcagcgugagcuucuucccccaggccgagaccugcaaggugcagagcaacagaguguucugcgacaccaugaacagcagaacccugcccagcgaggugaaccugugcaacaucgacaucuucaaccccaaguacgacugcaagaucaugaccagcaagaccgacgugagcagcagcgugaucaccagccugggcgccaucgugagcugcuacggcaagaccaagugcaccgccagcaacaagaacagaggcaucaucaagaccuucagcaacggcugcgacuacgugagcaacaagggcguggacaccgugagcgugggcaacacccuguacugcgugaacaagcaggagggcaagagccuguacgugaagggcgagcccaucaucaacuucuacgacccccugguguuccccagcgacgaguucgacgccagcaucagccaggugaacgagaagaucaaccagagccuggccuucaucagaaagagcgacgagcugcugcacaacgugaacgugggcaagagcaccaccaacaucaugaucaccaccaucaucaucgugaucaucgugauccugcugcugcugaucgccgugggccuguuccuguacugcaaggccagaugaggacuagugaagggaacacccaaauuuaauucagccuuaagcacaauuaauuaagagugaaacguaauuguacaagcaguuggucacccaccauagggcaugaucaacaccgcaaccuuuccuuuuucccccagugauucugaaaaaccccucuucccuucagcuugcuuagauguuccaaauuuaguaagcuuaaggcggccuacagaagaaaaagaaaaaaaaggccacaaaaguucccucucacuuucaguaaauaaaauaaaagcagcaacagaaauaaagaaauaaaugaaauucaaaaugaaauaaauauuguguugugcagcauuaaaaaaucaauaaaaauuaaaaaugagcaagaucuaaaaaaaaaaaaaaaaaaaaaaaaaaaaaaaaaaaaaaaaaaaaaaaaaaaaaaaaaaaaaaaaugcaucccccccccccccccccccccccccccccccaaaggcucuuuucagagccaccagaauu

SEQ ID NO: 16745 - RNA, 2130 nt, Artificial Sequence
  mRNA product Design f-1 comprising derived and/or modified sequence from HRSV(Memphis-37)__AIY60640.1__F-del_DSCav1_mut4 (opt5)
gggagagcggcucggccauuuugucccagucaguccggaggcugcggcugcagaaguaccgccugcggaguaacugcaaagaagcuuaccauggagcugcccauccucaagaccaacgccauuacaacgauccuggcugccgugacccuuugcuucgcgagcucccagaauauuacagaagaguuuuaccaaucuaccuguagcgcugucuccaaaggcuaucugucugcccucagaacagggugguacaccagcguuaucacaauugaacuguccaacaucaaggagaauaaaugcaacggaaccgacgccaaggugaaacuuaucaagcaggaacuggauaaguauaaaaaugcugugacggagcuccagcugcugaugcagucuaccccugccgcuggcagcggguccgccauuuguagcggaaucgcggucugcaaggugcuccaccuggagggcgaaguuaacaaaauuaagaaugcccuucugucuacaaacaaagcuguggucucccucagcaauggggugucuguucugaccuucaaggugcuugaccugaagaacuacaucgauaaacaacuccugccgauucugaauaagcaguccuguagcaucucuaacauugagacagucaucgaauuucagcagaaaaauaaccggcuccuggagaucacccgcgaguucuccgugaaugccggagugacgacacccgucagcaccuauaugcuuacaaacuccgaacugcucucucugauuaacgacaugccuaucaccaaugaucaaaagaaacuuaugagcaacaauguucagauugugagacagcaguccuacagcaucaugugcauuaucaaggaggaagugcuggcuuaugucgugcaacucccccuguacggcguuaucgacaccccuuguuggaaacugcauacaucuccccucugcacgaccaacacaaaggagggcuccaauauuugucugacccggacagaucgcgggugguacugcgacaacgccggaagcgugagcuuuuucccucaggcggaaaccuguaagguccagucuaauagaguguuuugcgauacgaugaacuccagaacacugccgucugagguuaaucucugcaacaucgacauuuucaaucccaaauaugauuguaagaucaugaccagcaaaaccgacguguccagcucugucauuacaucccugggcgccaucgugagcugcuacgggaagaccaaauguacagcuucuaacaagaaucggggaaucauuaagacguuuuccaacggcugcgauuaugucagcaauaaagggguggacaccguuuccgugggaaacacacuuuacugugucaacaagcaagagggcaaaucucuguaugugaagggcgaaccuaucauuaauuucuacgacccccucguuuuuccuagcgaugaguucgacgccuccaucucucaggugaacgaaaagauuaaucagagccuggcuuuuauccgcaaguccgaugagcugcuccacaacgucaauguggggaaaagcaccacaaacauuaugaucaccacgaucauuaucgugauuaucguuauucugcuucugcucaucgccgucggacuguuccuguauugcaaagccagaugaggacuagugaagggaacacccaaauuuaauucagccuuaagcacaauuaauuaagagugaaacguaauuguacaagcaguuggucacccaccauagggcaugaucaacaccgcaaccuuuccuuuuucccccagugauucugaaaaaccccucuucccuucagcuugcuuagauguuccaaauuuaguaagcuuaaggcggccuacagaagaaaaagaaaaaaaaggccacaaaaguucccucucacuuucaguaaauaaaauaaaagcagcaacagaaauaaagaaauaaaugaaauucaaaaugaaauaaauauuguguugugcagcauuaaaaaaucaauaaaaauuaaaaaugagcaagaucuaaaaaaaaaaaaaaaaaaaaaaaaaaaaaaaaaaaaaaaaaaaaaaaaaaaaaaaaaaaaaaaaugcaucccccccccccccccccccccccccccccccaaaggcucuuuucagagccaccagaauu

SEQ ID NO: 16746 - RNA, 2130 nt, Artificial Sequence
  mRNA product Design f-1 comprising derived and/or modified sequence from HRSV(Memphis-37)__AIY60640.1__F-del_DSCav1_mut4 (opt6)
gggagagcggcucggccauuuugucccagucaguccggaggcugcggcugcagaaguaccgccugcggaguaacugcaaagaagcuuaccauggaacuaccaauacucaaaacaaacgcaauaacaacuauacuagccgcaguuacacucugcuucgcuucaucacaaaauaucacagaagaauuuuaccaaucuacauguucagcuguauccaaagguuaccuuucagcacuacgaacaggaugguauaccucaguaaucaccaucgaacucucgaacauaaaagaaaacaaauguaacggaaccgaugcuaaagucaagcucauaaaacaagaacuagacaaauacaaaaacgcaguaaccgaacuacaacuacuuaugcaaucaacaccagcugcaggcucaggcucagcaaucugcucaggcauagcuguaugcaaaguacuacaucuagaaggagaaguaaacaaaauaaaaaacgcauuauuaucaacaaauaaagcaguaguaucacuaucaaauggaguaucaguacucacauucaaaguacuagaucuaaaaaacuacauugacaaacaauuacuaccaauccucaacaaacaaucaugcucaauauccaacauagaaacaguaauagaauuucaacaaaaaaacaaucgacuacuagaaauaacaagagaauuuucagucaaugccggaguuacaacacccguaagcacuuacaugcuaaccaacucagaacuacuaucacuaauaaacgacaugccaauuacaaacgaccaaaaaaaacuaaugucaaauaacguacaaauaguacgucaacaaucauacucaauaaugugcauaauaaaagaagaaguccuagcauacguaguacaauuacccuuauauggcguaauagacacaccaugcuggaaacuacacacauccccacucugcaccaccaacaccaaagaaggcuccaacauaugucuaacccgaaccgacagagguugguauugugauaacgcuggcuccguaucauucuucccacaagcagaaacauguaaaguacaaucaaacagaguauucugcgauacaaugaauagcagaacacuaccaucagaaguaaacuuaugcaacaucgacaucuucaaucccaaauacgacugcaaaauaaugacauccaaaacugacguuucuucaagcguaauaacaucuuuaggagcaauaguauccugcuacggaaaaacuaaaugcacagcauccaauaaaaaccguggaauaauaaaaacauucucaaauggcugcgacuacgucucaaacaaaggcguagacaccguuagugucggaaacacacuauauugcguaaauaaacaagaaggaaaauccuuauacguaaaaggcgaaccaauaauuaacuucuaugacccccucguauuuccauccgaugaauuugacgcaucaaucucgcaaguaaacgaaaaaauaaaccaaagccuagcauucauaagaaaauccgacgaacuacuccacaauguaaauguaggaaaaucaacuaccaacauaaugauuacuacuauaauaauaguaauuauagucaucuuacuacuauuaauagcagucggauuauuccuauacugcaaagcaagauagggacuagugaagggaacacccaaauuuaauucagccuuaagcacaauuaauuaagagugaaacguaauuguacaagcaguuggucacccaccauagggcaugaucaacaccgcaaccuuuccuuuuucccccagugauucugaaaaaccccucuucccuucagcuugcuuagauguuccaaauuuaguaagcuuaaggcggccuacagaagaaaaagaaaaaaaaggccacaaaaguucccucucacuuucaguaaauaaaauaaaagcagcaacagaaauaaagaaauaaaugaaauucaaaaugaaauaaauauuguguugugcagcauuaaaaaaucaauaaaaauuaaaaaugagcaagaucuaaaaaaaaaaaaaaaaaaaaaaaaaaaaaaaaaaaaaaaaaaaaaaaaaaaaaaaaaaaaaaaaugcaucccccccccccccccccccccccccccccccaaaggcucuuuucagagccaccagaauu

SEQ ID NO: 16747 - RNA, 2130 nt, Artificial Sequence
  mRNA product Design f-1 comprising derived and/or modified sequence from HRSV(Memphis-37)__AIY60640.1__F-del_DSCav1_mut4 (opt11)
gggagagcggcucggccauuuugucccagucaguccggaggcugcggcugcagaaguaccgccugcggaguaacugcaaagaagcuuaccauggagcuccccauccuaaaaaccaacgccaucaccaccauccucgccgccgucacccuaugcuucgcuucaucacaaaacaucaccgaagaauuuuaccaaucuaccugcuccgccgucuccaaaggauaucucagcgcccuacggaccggcugguacaccuccgucauaaccaucgaacucaguaacaucaaagaaaacaaaugcaacggcaccgacgccaaagucaaacuaaucaaacaagaacuagauaaauacaaaaacgcggucaccgaacuacaacuccuaaugcaaagcacccccgccgccggauccggcuccgccauaugcuccggcauugcugucugcaaaguacuacaccucgagggcgaggucaacaaaaucaaaaacgcacuacucagcacuaauaaagccguaguaucccuaucaaacggugucucagucuuaacauucaaaguacucgaccuaaagaacuacaucgacaaacaacuccuacccauccucaacaagcaguccuguucuaucucaaacaucgaaaccgucaucgaauuucaacaaaagaacaaccgccuccucgaaaucacacgcgaguucuccgucaacgcaggaguaaccacccccgucuccaccuacaugcucacaaacucggaacuccucucacuaaucaacgacaugcccaucaccaacgaccaaaagaaacucaugagcaacaacguucaaaucguccgccaacaaucauacuccaucaugugcauaaucaaagaagaaguccuagcuuacgucguccagcugccccucuacggagucaucgacacgcccugcuggaaacuacacacaagcccccucugcaccaccaacaccaaagaaggcuccaacauaugccucacacggaccgaccgcgguugguacugcgacaacgccggcuccgucuccuucuucccccaagcagaaacuugcaaaguccaauccaaccgcguauucugcgacacaaugaacagcagaacacucccuagcgaagucaaccucugcaacaucgacauauucaaccccaaauacgacugcaaaaucaugacgucaaaaaccgacgucuccagcuccguuaucaccucacucggcgccaucgucagcugcuacggcaaaacuaaaugcaccgccuccaacaaaaaccgcggcaucauuaaaaccuucagcaacggcugcgacuacgucuccaacaaaggugucgauacgguauccgucggaaacacccuauacugcgucaacaaacaagaaggcaaaucucucuacgucaaaggcgaacccauaaucaauuucuacgacccccuagucuuccccuccgaugaauuugacgccuccaucagccaagucaacgagaaaaucaaccaaucacuagccuucauccggaaauccgacgaacuccuacacaacguaaacgucggcaaauccaccaccaauauaaugaucacaaccaucaucaucguaaucaucgucauccuccuccuacucaucgccgucggauuauucuuauacugcaaagcccgcuaaggacuagugaagggaacacccaaauuuaauucagccuuaagcacaauuaauuaagagugaaacguaauuguacaagcaguuggucacccaccauagggcaugaucaacaccgcaaccuuuccuuuuucccccagugauucugaaaaaccccucuucccuucagcuugcuuagauguuccaaauuuaguaagcuuaaggcggccuacagaagaaaaagaaaaaaaaggccacaaaaguucccucucacuuucaguaaauaaaauaaaagcagcaacagaaauaaagaaauaaaugaaauucaaaaugaaauaaauauuguguugugcagcauuaaaaaaucaauaaaaauuaaaaaugagcaagaucuaaaaaaaaaaaaaaaaaaaaaaaaaaaaaaaaaaaaaaaaaaaaaaaaaaaaaaaaaaaaaaaaugcaucccccccccccccccccccccccccccccccaaaggcucuuuucagagccaccagaauu

SEQ ID NO: 16748 - RNA, 1910 nt, Artificial Sequence
  mRNA product Design f-2 comprising derived and/or modified sequence from HRSV(Memphis-37)__AIY60640.1__F-del_DSCav1_mut4 (opt1)
gggagagcggcucggccauuuugucccagucaguccggaggcugcggcugcagaaguaccgccugcggaguaacugcaaagaagcuuaccauggagcugcccauccucaagaccaacgccaucaccacgauccuggccgcggugacccugugcuucgccagcucccagaacaucaccgaggaguucuaccagagcacgugcuccgccgucagcaagggcuaccucuccgcccugcgcaccgggugguacaccagcgugaucaccaucgagcuguccaacaucaaggagaacaagugcaacggcaccgacgccaaggugaagcucaucaagcaggagcuggacaaguacaagaacgcggucacggagcugcagcuccugaugcagagcaccccggccgccggcuccgggagcgcgaucugcuccggcaucgccgucugcaaggugcugcaccucgagggcgaggugaacaagaucaagaacgcccugcuguccaccaacaaggccgucgugagccucuccaacggggugagcguccugaccuucaaggugcuggaccucaagaacuacaucgacaagcagcugcugcccauccugaacaagcagagcugcuccaucagcaacaucgagaccgucaucgaguuccagcagaagaacaaccgccuccuggagaucacgcgggaguucagcgugaacgcgggcgugaccacccccgucuccaccuacaugcugacgaacagcgagcuccugucccugaucaacgacaugccgaucaccaacgaccagaagaagcucaugagcaacaacgugcagaucgugcgccagcaguccuacagcaucaugugcaucaucaaggaggagguccuggccuacguggugcagcugccccucuacggggucaucgacacccccugcuggaagcugcacaccagcccccugugcacgaccaacaccaaggagggcuccaacaucugccucacccggacggaccgcgggugguacugcgacaacgccggcagcguguccuucuucccgcaggccgagaccugcaagguccagagcaaccggguguucugcgacaccaugaacucccggacccugcccagcgaggugaaccucugcaacaucgacaucuucaaccccaaguacgacugcaagaucaugacguccaagaccgacgucagcuccagcgugaucaccucccugggcgccaucgugagcugcuacgggaagaccaagugcacggcgagcaacaagaaccgcggcaucaucaagaccuucuccaacgggugcgacuacgucagcaacaagggcguggacaccguguccgucggcaacacccuguacugcgugaacaagcaggagggcaagagccucuacgugaagggggagcccaucaucaacuucuacgacccgcuggucuuccccuccgacgaguucgacgccagcaucucccaggugaacgagaagaucaaccagagccuggccuucauccggaaguccgacgagcuccugcacaacgugaacgucggcaagagcaccacgaacaucaugaucaccaccaucaucaucgugaucaucgugauccugcugcuccugaucgccgucgggcuguuccucuacugcaaggcccgcugaggacuaguggaagcauuuuccuggcugauuaaaagaaauuacucagcuauggucaucuguuccuguuagaaggcuaugcagcauauuauauacuaugcgcauguuaugaaaugcauaauaaaaaauuuuaaaaaaucuaaaagaucuaaaaaaaaaaaaaaaaaaaaaaaaaaaaaaaaaaaaaaaaaaaaaaaaaaaaaaaaaaaaaaaaugcaucccccccccccccccccccccccccccccccaaaggcucuuuucagagccaccagaauu

SEQ ID NO: 16749 - RNA, 1910 nt, Artificial Sequence
  mRNA product Design f-2 comprising derived and/or modified sequence from HRSV(Memphis-37)__AIY60640.1__F-del_DSCav1_mut4 (opt1)
gggagagcggcucggccauuuugucccagucaguccggaggcugcggcugcagaaguaccgccugcggaguaacugcaaagaagcuuaccauggagcugcccauccucaagaccaacgccaucaccacgauccuggccgcggugacccugugcuucgccagcucccagaacaucaccgaggaguucuaccagagcacgugcuccgccgucagcaagggcuaccucuccgcccugcgcaccgggugguacaccagcgugaucaccaucgagcuguccaacaucaaggagaacaagugcaacggcaccgacgccaaggugaagcucaucaagcaggagcuggacaaguacaagaacgcggucacggagcugcagcuccugaugcagagcaccccggccgccggguccggcagcgccaucugcuccgggaucgcggugugcaaggugcugcaccucgagggcgaggucaacaagaucaagaacgcccugcugagcaccaacaaggccguggugucccucagcaacggcgucuccgugcugaccuucaaggugcuggaccucaagaacuacaucgacaagcagcugcugcccauccucaacaagcagagcugcuccaucagcaacaucgagacggucaucgaguuccagcagaagaacaaccggcugcuggagaucacccgcgaguucuccgugaacgccggggugaccacccccgucagcacguacaugcucaccaacagcgagcugcugucccucaucaacgacaugcccaucaccaacgaccagaagaagcugaugagcaacaacgugcagaucgugcggcagcaguccuacagcaucaugugcaucaucaaggaggagguccuggccuacguggugcagcucccgcuguacggcgucaucgacacccccugcuggaagcugcacacgagcccccucugcaccaccaacaccaaggagggguccaacaucugccugacgcgcaccgaccggggcugguacugcgacaacgcgggguccgugagcuucuucccccaggccgagaccugcaaggugcaguccaaccgcgucuucugcgacaccaugaacagccggacgcucccguccgaggugaaccugugcaacaucgacaucuucaaccccaaguacgacugcaagaucaugaccagcaagaccgacgucuccagcuccgugaucaccagccugggcgccaucguguccugcuacggcaagacgaagugcaccgccagcaacaagaaccgggggaucaucaagaccuucuccaacggcugcgacuacgucagcaacaaggggguggacaccgugagcgucggcaacacgcucuacugcgugaacaagcaggagggcaagucccuguacgugaagggggagcccaucaucaacuucuacgacccccuggucuucccgagcgacgaguucgacgccuccaucagccaggugaacgagaagaucaaccagucccucgcguucauccgcaagagcgacgagcugcugcacaacgugaacgucggcaaguccaccaccaacaucaugaucaccaccaucaucaucgugaucaucgugauccuccugcugcucaucgccgucgggcuguuccuguacugcaaggcccggugaggacuaguggaagcauuuuccuggcugauuaaaagaaauuacucagcuauggucaucuguuccuguuagaaggcuaugcagcauauuauauacuaugcgcauguuaugaaaugcauaauaaaaaauuuuaaaaaaucuaaaagaucuaaaaaaaaaaaaaaaaaaaaaaaaaaaaaaaaaaaaaaaaaaaaaaaaaaaaaaaaaaaaaaaaugcaucccccccccccccccccccccccccccccccaaaggcucuuuucagagccaccagaauu

SEQ ID NO: 16750 - RNA, 1910 nt, Artificial Sequence
  mRNA product Design f-2 comprising derived and/or modified sequence from HRSV(Memphis-37)__AIY60640.1__F-del_DSCav1_mut4 (opt2)
gggagagcggcucggccauuuugucccagucaguccggaggcugcggcugcagaaguaccgccugcggaguaacugcaaagaagcuuaccauggagcuccccauccucaagaccaacgccaucaccaccauccucgccgccgucacccucugcuucgccuccucccagaacaucaccgaggaguucuaccaguccaccugcuccgccgucuccaagggcuaccucuccgcccuccgcaccggcugguacaccuccgucaucaccaucgagcucuccaacaucaaggagaacaagugcaacggcaccgacgccaaggucaagcucaucaagcaggagcucgacaaguacaagaacgccgucaccgagcuccagcuccucaugcaguccacccccgccgccggcuccggcuccgccaucugcuccggcaucgccgucugcaagguccuccaccucgagggcgaggucaacaagaucaagaacgcccuccucuccaccaacaaggccgucgucucccucuccaacggcgucuccguccucaccuucaagguccucgaccucaagaacuacaucgacaagcagcuccuccccauccucaacaagcaguccugcuccaucuccaacaucgagaccgucaucgaguuccagcagaagaacaaccgccuccucgagaucacccgcgaguucuccgucaacgccggcgucaccacccccgucuccaccuacaugcucaccaacuccgagcuccucucccucaucaacgacaugcccaucaccaacgaccagaagaagcucauguccaacaacguccagaucguccgccagcaguccuacuccaucaugugcaucaucaaggaggagguccucgccuacgucguccagcucccccucuacggcgucaucgacacccccugcuggaagcuccacaccuccccccucugcaccaccaacaccaaggagggcuccaacaucugccucacccgcaccgaccgcggcugguacugcgacaacgccggcuccgucuccuucuucccccaggccgagaccugcaagguccaguccaaccgcgucuucugcgacaccaugaacucccgcacccuccccuccgaggucaaccucugcaacaucgacaucuucaaccccaaguacgacugcaagaucaugaccuccaagaccgacgucuccuccuccgucaucaccucccucggcgccaucgucuccugcuacggcaagaccaagugcaccgccuccaacaagaaccgcggcaucaucaagaccuucuccaacggcugcgacuacgucuccaacaagggcgucgacaccgucuccgucggcaacacccucuacugcgucaacaagcaggagggcaagucccucuacgucaagggcgagcccaucaucaacuucuacgacccccucgucuuccccuccgacgaguucgacgccuccaucucccaggucaacgagaagaucaaccagucccucgccuucauccgcaaguccgacgagcuccuccacaacgucaacgucggcaaguccaccaccaacaucaugaucaccaccaucaucaucgucaucaucgucauccuccuccuccucaucgccgucggccucuuccucuacugcaaggcccgcugaggacuaguggaagcauuuuccuggcugauuaaaagaaauuacucagcuauggucaucuguuccuguuagaaggcuaugcagcauauuauauacuaugcgcauguuaugaaaugcauaauaaaaaauuuuaaaaaaucuaaaagaucuaaaaaaaaaaaaaaaaaaaaaaaaaaaaaaaaaaaaaaaaaaaaaaaaaaaaaaaaaaaaaaaaugcaucccccccccccccccccccccccccccccccaaaggcucuuuucagagccaccagaauu

SEQ ID NO: 16751 - RNA, 1910 nt, Artificial Sequence
  mRNA product Design f-2 comprising derived and/or modified sequence from HRSV(Memphis-37)__AIY60640.1__F-del_DSCav1_mut4 (opt3)
gggagagcggcucggccauuuugucccagucaguccggaggcugcggcugcagaaguaccgccugcggaguaacugcaaagaagcuuaccauggagcugcccauccucaagaccaacgccauuacaacuauacuugcugcagugacgcugugcuucgccagcucccagaauaucaccgaagaguuuuaccaaucuacauguucagcggucaguaaaggcuauuugagcgcuuuaagaacugggugguacaccuccguuauuacaaucgaacugucuaacauuaaggagaauaaaugcaacggaaccgacgccaaggugaaacuaaucaagcaggaacucgauaaguauaaaaaugcaguaacugagcugcagcuucugaugcagucgaccccugccgcugguucaggcagcgcaauauguagugggaucgccgugugcaaggucuugcaccucgagggagaagugaacaaaauuaagaaugcucugcuguccacaaacaaagccguugugucucucagcaauggcgucuccguguuaacguucaagguacuggaccuuaagaacuacaucgauaaacaauugcugccaauucuaaauaagcagucauguaguaucagcaacauagagacuguuauugaauuucagcagaaaaauaacaggcuccuggagaucacccgggaguucucugugaaugcgggugucacaacuccgguguccaccuauaugcuuacaaacucagaacuguugagccucauuaacgacaugcccaucaccaaugaucaaaagaaacugaugaguaacaaugugcagaucguccgccagcagucuuacuccauuaugugcauaaucaaggaggaaguuuuagcauaugugguacaacugccucucuacggggugauugacacgccauguuggaaacuucauacuagcccccugugcacaaccaacacuaaggagggaucgaauaucuguuugacacgaaccgaucguggcugguacugcgacaacgccggcucugucuccuuuuucccucaggcugaaacguguaaggugcagucaaauagaguguuuugcgauaccaugaacaguagaacacugccaagcgaggugaaucucugcaacauagacauuuucaaucccaaauaugauuguaagaucaugacuuccaaaaccgacgucucuagcucagugaucacaagucugggggccauuguauccugcuacggaaagacuaaauguaccgcaagcaacaagaauagggguaucauuaagacauuuucuaacggcugcgauuauguuucaaauaaagggguggacaccgucagugugggaaacacucuuuacugugucaacaagcaagagggcaaaagccuguaugugaagggugaaccuauaaucaauuucuacgacccauugguuuuuccguccgaugaguucgacgcuucuauuucgcagguuaacgagaaaaucaaucagagccucgccuuuauccggaaguccgaugaacuguuacacaacguaaaugucgggaagucaacgacaaacauuaugauaaccacuaucauuaucgugauuaucguuauacugcuacuccugaucgcggugggacuuuucuuguauugcaaagcccgcugaggacuaguggaagcauuuuccuggcugauuaaaagaaauuacucagcuauggucaucuguuccuguuagaaggcuaugcagcauauuauauacuaugcgcauguuaugaaaugcauaauaaaaaauuuuaaaaaaucuaaaagaucuaaaaaaaaaaaaaaaaaaaaaaaaaaaaaaaaaaaaaaaaaaaaaaaaaaaaaaaaaaaaaaaaugcaucccccccccccccccccccccccccccccccaaaggcucuuuucagagccaccagaauu

SEQ ID NO: 16752 - RNA, 1910 nt, Artificial Sequence
  mRNA product Design f-2 comprising derived and/or modified sequence from HRSV(Memphis-37)__AIY60640.1__F-del_DSCav1_mut4 (opt4)
gggagagcggcucggccauuuugucccagucaguccggaggcugcggcugcagaaguaccgccugcggaguaacugcaaagaagcuuaccauggagcugcccauccugaagaccaacgccaucaccaccauccuggccgccgugacccugugcuucgccagcagccagaacaucaccgaggaguucuaccagagcaccugcagcgccgugagcaagggcuaccugagcgcccugagaaccggcugguacaccagcgugaucaccaucgagcugagcaacaucaaggagaacaagugcaacggcaccgacgccaaggugaagcugaucaagcaggagcuggacaaguacaagaacgccgugaccgagcugcagcugcugaugcagagcacccccgccgccggcagcggcagcgccaucugcagcggcaucgccgugugcaaggugcugcaccuggagggcgaggugaacaagaucaagaacgcccugcugagcaccaacaaggccguggugagccugagcaacggcgugagcgugcugaccuucaaggugcuggaccugaagaacuacaucgacaagcagcugcugcccauccugaacaagcagagcugcagcaucagcaacaucgagaccgugaucgaguuccagcagaagaacaacagacugcuggagaucaccagagaguucagcgugaacgccggcgugaccacccccgugagcaccuacaugcugaccaacagcgagcugcugagccugaucaacgacaugcccaucaccaacgaccagaagaagcugaugagcaacaacgugcagaucgugagacagcagagcuacagcaucaugugcaucaucaaggaggaggugcuggccuacguggugcagcugccccuguacggcgugaucgacacccccugcuggaagcugcacaccagcccccugugcaccaccaacaccaaggagggcagcaacaucugccugaccagaaccgacagaggcugguacugcgacaacgccggcagcgugagcuucuucccccaggccgagaccugcaaggugcagagcaacagaguguucugcgacaccaugaacagcagaacccugcccagcgaggugaaccugugcaacaucgacaucuucaaccccaaguacgacugcaagaucaugaccagcaagaccgacgugagcagcagcgugaucaccagccugggcgccaucgugagcugcuacggcaagaccaagugcaccgccagcaacaagaacagaggcaucaucaagaccuucagcaacggcugcgacuacgugagcaacaagggcguggacaccgugagcgugggcaacacccuguacugcgugaacaagcaggagggcaagagccuguacgugaagggcgagcccaucaucaacuucuacgacccccugguguuccccagcgacgaguucgacgccagcaucagccaggugaacgagaagaucaaccagagccuggccuucaucagaaagagcgacgagcugcugcacaacgugaacgugggcaagagcaccaccaacaucaugaucaccaccaucaucaucgugaucaucgugauccugcugcugcugaucgccgugggccuguuccuguacugcaaggccagaugaggacuaguggaagcauuuuccuggcugauuaaaagaaauuacucagcuauggucaucuguuccuguuagaaggcuaugcagcauauuauauacuaugcgcauguuaugaaaugcauaauaaaaaauuuuaaaaaaucuaaaagaucuaaaaaaaaaaaaaaaaaaaaaaaaaaaaaaaaaaaaaaaaaaaaaaaaaaaaaaaaaaaaaaaaugcaucccccccccccccccccccccccccccccccaaaggcucuuuucagagccaccagaauu

SEQ ID NO: 16753 - RNA, 1910 nt, Artificial Sequence
  mRNA product Design f-2 comprising derived and/or modified sequence from HRSV(Memphis-37)__AIY60640.1__F-del_DSCav1_mut4 (opt5)
gggagagcggcucggccauuuugucccagucaguccggaggcugcggcugcagaaguaccgccugcggaguaacugcaaagaagcuuaccauggagcugcccauccucaagaccaacgccauuacaacgauccuggcugccgugacccuuugcuucgcgagcucccagaauauuacagaagaguuuuaccaaucuaccuguagcgcugucuccaaaggcuaucugucugcccucagaacagggugguacaccagcguuaucacaauugaacuguccaacaucaaggagaauaaaugcaacggaaccgacgccaaggugaaacuuaucaagcaggaacuggauaaguauaaaaaugcugugacggagcuccagcugcugaugcagucuaccccugccgcuggcagcggguccgccauuuguagcggaaucgcggucugcaaggugcuccaccuggagggcgaaguuaacaaaauuaagaaugcccuucugucuacaaacaaagcuguggucucccucagcaauggggugucuguucugaccuucaaggugcuugaccugaagaacuacaucgauaaacaacuccugccgauucugaauaagcaguccuguagcaucucuaacauugagacagucaucgaauuucagcagaaaaauaaccggcuccuggagaucacccgcgaguucuccgugaaugccggagugacgacacccgucagcaccuauaugcuuacaaacuccgaacugcucucucugauuaacgacaugccuaucaccaaugaucaaaagaaacuuaugagcaacaauguucagauugugagacagcaguccuacagcaucaugugcauuaucaaggaggaagugcuggcuuaugucgugcaacucccccuguacggcguuaucgacaccccuuguuggaaacugcauacaucuccccucugcacgaccaacacaaaggagggcuccaauauuugucugacccggacagaucgcgggugguacugcgacaacgccggaagcgugagcuuuuucccucaggcggaaaccuguaagguccagucuaauagaguguuuugcgauacgaugaacuccagaacacugccgucugagguuaaucucugcaacaucgacauuuucaaucccaaauaugauuguaagaucaugaccagcaaaaccgacguguccagcucugucauuacaucccugggcgccaucgugagcugcuacgggaagaccaaauguacagcuucuaacaagaaucggggaaucauuaagacguuuuccaacggcugcgauuaugucagcaauaaagggguggacaccguuuccgugggaaacacacuuuacugugucaacaagcaagagggcaaaucucuguaugugaagggcgaaccuaucauuaauuucuacgacccccucguuuuuccuagcgaugaguucgacgccuccaucucucaggugaacgaaaagauuaaucagagccuggcuuuuauccgcaaguccgaugagcugcuccacaacgucaauguggggaaaagcaccacaaacauuaugaucaccacgaucauuaucgugauuaucguuauucugcuucugcucaucgccgucggacuguuccuguauugcaaagccagaugaggacuaguggaagcauuuuccuggcugauuaaaagaaauuacucagcuauggucaucuguuccuguuagaaggcuaugcagcauauuauauacuaugcgcauguuaugaaaugcauaauaaaaaauuuuaaaaaaucuaaaagaucuaaaaaaaaaaaaaaaaaaaaaaaaaaaaaaaaaaaaaaaaaaaaaaaaaaaaaaaaaaaaaaaaugcaucccccccccccccccccccccccccccccccaaaggcucuuuucagagccaccagaauu

SEQ ID NO: 16754 - RNA, 1910 nt, Artificial Sequence
  mRNA product Design f-2 comprising derived and/or modified sequence from HRSV(Memphis-37)__AIY60640.1__F-del_DSCav1_mut4 (opt6)
gggagagcggcucggccauuuugucccagucaguccggaggcugcggcugcagaaguaccgccugcggaguaacugcaaagaagcuuaccauggaacuaccaauacucaaaacaaacgcaauaacaacuauacuagccgcaguuacacucugcuucgcuucaucacaaaauaucacagaagaauuuuaccaaucuacauguucagcuguauccaaagguuaccuuucagcacuacgaacaggaugguauaccucaguaaucaccaucgaacucucgaacauaaaagaaaacaaauguaacggaaccgaugcuaaagucaagcucauaaaacaagaacuagacaaauacaaaaacgcaguaaccgaacuacaacuacuuaugcaaucaacaccagcugcaggcucaggcucagcaaucugcucaggcauagcuguaugcaaaguacuacaucuagaaggagaaguaaacaaaauaaaaaacgcauuauuaucaacaaauaaagcaguaguaucacuaucaaauggaguaucaguacucacauucaaaguacuagaucuaaaaaacuacauugacaaacaauuacuaccaauccucaacaaacaaucaugcucaauauccaacauagaaacaguaauagaauuucaacaaaaaaacaaucgacuacuagaaauaacaagagaauuuucagucaaugccggaguuacaacacccguaagcacuuacaugcuaaccaacucagaacuacuaucacuaauaaacgacaugccaauuacaaacgaccaaaaaaaacuaaugucaaauaacguacaaauaguacgucaacaaucauacucaauaaugugcauaauaaaagaagaaguccuagcauacguaguacaauuacccuuauauggcguaauagacacaccaugcuggaaacuacacacauccccacucugcaccaccaacaccaaagaaggcuccaacauaugucuaacccgaaccgacagagguugguauugugauaacgcuggcuccguaucauucuucccacaagcagaaacauguaaaguacaaucaaacagaguauucugcgauacaaugaauagcagaacacuaccaucagaaguaaacuuaugcaacaucgacaucuucaaucccaaauacgacugcaaaauaaugacauccaaaacugacguuucuucaagcguaauaacaucuuuaggagcaauaguauccugcuacggaaaaacuaaaugcacagcauccaauaaaaaccguggaauaauaaaaacauucucaaauggcugcgacuacgucucaaacaaaggcguagacaccguuagugucggaaacacacuauauugcguaaauaaacaagaaggaaaauccuuauacguaaaaggcgaaccaauaauuaacuucuaugacccccucguauuuccauccgaugaauuugacgcaucaaucucgcaaguaaacgaaaaaauaaaccaaagccuagcauucauaagaaaauccgacgaacuacuccacaauguaaauguaggaaaaucaacuaccaacauaaugauuacuacuauaauaauaguaauuauagucaucuuacuacuauuaauagcagucggauuauuccuauacugcaaagcaagauagggacuaguggaagcauuuuccuggcugauuaaaagaaauuacucagcuauggucaucuguuccuguuagaaggcuaugcagcauauuauauacuaugcgcauguuaugaaaugcauaauaaaaaauuuuaaaaaaucuaaaagaucuaaaaaaaaaaaaaaaaaaaaaaaaaaaaaaaaaaaaaaaaaaaaaaaaaaaaaaaaaaaaaaaaugcaucccccccccccccccccccccccccccccccaaaggcucuuuucagagccaccagaauu

SEQ ID NO: 16755 - RNA, 1910 nt, Artificial Sequence
  mRNA product Design f-2 comprising derived and/or modified sequence from HRSV(Memphis-37)__AIY60640.1__F-del_DSCav1_mut4 (opt11)
gggagagcggcucggccauuuugucccagucaguccggaggcugcggcugcagaaguaccgccugcggaguaacugcaaagaagcuuaccauggagcuccccauccuaaaaaccaacgccaucaccaccauccucgccgccgucacccuaugcuucgcuucaucacaaaacaucaccgaagaauuuuaccaaucuaccugcuccgccgucuccaaaggauaucucagcgcccuacggaccggcugguacaccuccgucauaaccaucgaacucaguaacaucaaagaaaacaaaugcaacggcaccgacgccaaagucaaacuaaucaaacaagaacuagauaaauacaaaaacgcggucaccgaacuacaacuccuaaugcaaagcacccccgccgccggauccggcuccgccauaugcuccggcauugcugucugcaaaguacuacaccucgagggcgaggucaacaaaaucaaaaacgcacuacucagcacuaauaaagccguaguaucccuaucaaacggugucucagucuuaacauucaaaguacucgaccuaaagaacuacaucgacaaacaacuccuacccauccucaacaagcaguccuguucuaucucaaacaucgaaaccgucaucgaauuucaacaaaagaacaaccgccuccucgaaaucacacgcgaguucuccgucaacgcaggaguaaccacccccgucuccaccuacaugcucacaaacucggaacuccucucacuaaucaacgacaugcccaucaccaacgaccaaaagaaacucaugagcaacaacguucaaaucguccgccaacaaucauacuccaucaugugcauaaucaaagaagaaguccuagcuuacgucguccagcugccccucuacggagucaucgacacgcccugcuggaaacuacacacaagcccccucugcaccaccaacaccaaagaaggcuccaacauaugccucacacggaccgaccgcgguugguacugcgacaacgccggcuccgucuccuucuucccccaagcagaaacuugcaaaguccaauccaaccgcguauucugcgacacaaugaacagcagaacacucccuagcgaagucaaccucugcaacaucgacauauucaaccccaaauacgacugcaaaaucaugacgucaaaaaccgacgucuccagcuccguuaucaccucacucggcgccaucgucagcugcuacggcaaaacuaaaugcaccgccuccaacaaaaaccgcggcaucauuaaaaccuucagcaacggcugcgacuacgucuccaacaaaggugucgauacgguauccgucggaaacacccuauacugcgucaacaaacaagaaggcaaaucucucuacgucaaaggcgaacccauaaucaauuucuacgacccccuagucuuccccuccgaugaauuugacgccuccaucagccaagucaacgagaaaaucaaccaaucacuagccuucauccggaaauccgacgaacuccuacacaacguaaacgucggcaaauccaccaccaauauaaugaucacaaccaucaucaucguaaucaucgucauccuccuccuacucaucgccgucggauuauucuuauacugcaaagcccgcuaaggacuaguggaagcauuuuccuggcugauuaaaagaaauuacucagcuauggucaucuguuccuguuagaaggcuaugcagcauauuauauacuaugcgcauguuaugaaaugcauaauaaaaaauuuuaaaaaaucuaaaagaucuaaaaaaaaaaaaaaaaaaaaaaaaaaaaaaaaaaaaaaaaaaaaaaaaaaaaaaaaaaaaaaaaugcaucccccccccccccccccccccccccccccccaaaggcucuuuucagagccaccagaauu

SEQ ID NO: 16756 - RNA, 1901 nt, Artificial Sequence
  mRNA product Design f-3 comprising derived and/or modified sequence from HRSV(Memphis-37)__AIY60640.1__F-del_DSCav1_mut4 (opt1)
gggagagucccgcagucggcguccagcggcucugcuuguucgugugugugucguugcaggccuuauucaagcuuaccauggagcugcccauccucaagaccaacgccaucaccacgauccuggccgcggugacccugugcuucgccagcucccagaacaucaccgaggaguucuaccagagcacgugcuccgccgucagcaagggcuaccucuccgcccugcgcaccgggugguacaccagcgugaucaccaucgagcuguccaacaucaaggagaacaagugcaacggcaccgacgccaaggugaagcucaucaagcaggagcuggacaaguacaagaacgcggucacggagcugcagcuccugaugcagagcaccccggccgccggcuccgggagcgcgaucugcuccggcaucgccgucugcaaggugcugcaccucgagggcgaggugaacaagaucaagaacgcccugcuguccaccaacaaggccgucgugagccucuccaacggggugagcguccugaccuucaaggugcuggaccucaagaacuacaucgacaagcagcugcugcccauccugaacaagcagagcugcuccaucagcaacaucgagaccgucaucgaguuccagcagaagaacaaccgccuccuggagaucacgcgggaguucagcgugaacgcgggcgugaccacccccgucuccaccuacaugcugacgaacagcgagcuccugucccugaucaacgacaugccgaucaccaacgaccagaagaagcucaugagcaacaacgugcagaucgugcgccagcaguccuacagcaucaugugcaucaucaaggaggagguccuggccuacguggugcagcugccccucuacggggucaucgacacccccugcuggaagcugcacaccagcccccugugcacgaccaacaccaaggagggcuccaacaucugccucacccggacggaccgcgggugguacugcgacaacgccggcagcguguccuucuucccgcaggccgagaccugcaagguccagagcaaccggguguucugcgacaccaugaacucccggacccugcccagcgaggugaaccucugcaacaucgacaucuucaaccccaaguacgacugcaagaucaugacguccaagaccgacgucagcuccagcgugaucaccucccugggcgccaucgugagcugcuacgggaagaccaagugcacggcgagcaacaagaaccgcggcaucaucaagaccuucuccaacgggugcgacuacgucagcaacaagggcguggacaccguguccgucggcaacacccuguacugcgugaacaagcaggagggcaagagccucuacgugaagggggagcccaucaucaacuucuacgacccgcuggucuuccccuccgacgaguucgacgccagcaucucccaggugaacgagaagaucaaccagagccuggccuucauccggaaguccgacgagcuccugcacaacgugaacgucggcaagagcaccacgaacaucaugaucaccaccaucaucaucgugaucaucgugauccugcugcuccugaucgccgucgggcuguuccucuacugcaaggcccgcugaggacuaguacuggcugcaucucccuuuccucuguccuccauccuucucccaggauggugaagggggaccugguacccagugauccccaccccaggauccuaaaucaugacuuaccugcuaauaaaaacucauuggaaaagugagaagaucuaaaaaaaaaaaaaaaaaaaaaaaaaaaaaaaaaaaaaaaaaaaaaaaaaaaaaaaaaaaaaaaaugcaucccccccccccccccccccccccccccccccaaaggcucuuuucagagccaccagaauu

SEQ ID NO: 16757 - RNA, 1901 nt, Artificial Sequence
  mRNA product Design f-3 comprising derived and/or modified sequence from HRSV(Memphis-37)__AIY60640.1__F-del_DSCav1_mut4 (opt1)
gggagagucccgcagucggcguccagcggcucugcuuguucgugugugugucguugcaggccuuauucaagcuuaccauggagcugcccauccucaagaccaacgccaucaccacgauccuggccgcggugacccugugcuucgccagcucccagaacaucaccgaggaguucuaccagagcacgugcuccgccgucagcaagggcuaccucuccgcccugcgcaccgggugguacaccagcgugaucaccaucgagcuguccaacaucaaggagaacaagugcaacggcaccgacgccaaggugaagcucaucaagcaggagcuggacaaguacaagaacgcggucacggagcugcagcuccugaugcagagcaccccggccgccggguccggcagcgccaucugcuccgggaucgcggugugcaaggugcugcaccucgagggcgaggucaacaagaucaagaacgcccugcugagcaccaacaaggccguggugucccucagcaacggcgucuccgugcugaccuucaaggugcuggaccucaagaacuacaucgacaagcagcugcugcccauccucaacaagcagagcugcuccaucagcaacaucgagacggucaucgaguuccagcagaagaacaaccggcugcuggagaucacccgcgaguucuccgugaacgccggggugaccacccccgucagcacguacaugcucaccaacagcgagcugcugucccucaucaacgacaugcccaucaccaacgaccagaagaagcugaugagcaacaacgugcagaucgugcggcagcaguccuacagcaucaugugcaucaucaaggaggagguccuggccuacguggugcagcucccgcuguacggcgucaucgacacccccugcuggaagcugcacacgagcccccucugcaccaccaacaccaaggagggguccaacaucugccugacgcgcaccgaccggggcugguacugcgacaacgcgggguccgugagcuucuucccccaggccgagaccugcaaggugcaguccaaccgcgucuucugcgacaccaugaacagccggacgcucccguccgaggugaaccugugcaacaucgacaucuucaaccccaaguacgacugcaagaucaugaccagcaagaccgacgucuccagcuccgugaucaccagccugggcgccaucguguccugcuacggcaagacgaagugcaccgccagcaacaagaaccgggggaucaucaagaccuucuccaacggcugcgacuacgucagcaacaaggggguggacaccgugagcgucggcaacacgcucuacugcgugaacaagcaggagggcaagucccuguacgugaagggggagcccaucaucaacuucuacgacccccuggucuucccgagcgacgaguucgacgccuccaucagccaggugaacgagaagaucaaccagucccucgcguucauccgcaagagcgacgagcugcugcacaacgugaacgucggcaaguccaccaccaacaucaugaucaccaccaucaucaucgugaucaucgugauccuccugcugcucaucgccgucgggcuguuccuguacugcaaggcccggugaggacuaguacuggcugcaucucccuuuccucuguccuccauccuucucccaggauggugaagggggaccugguacccagugauccccaccccaggauccuaaaucaugacuuaccugcuaauaaaaacucauuggaaaagugagaagaucuaaaaaaaaaaaaaaaaaaaaaaaaaaaaaaaaaaaaaaaaaaaaaaaaaaaaaaaaaaaaaaaaugcaucccccccccccccccccccccccccccccccaaaggcucuuuucagagccaccagaauu

SEQ ID NO: 16758 - RNA, 1901 nt, Artificial Sequence
  mRNA product Design f-3 comprising derived and/or modified sequence from HRSV(Memphis-37)__AIY60640.1__F-del_DSCav1_mut4 (opt2)
gggagagucccgcagucggcguccagcggcucugcuuguucgugugugugucguugcaggccuuauucaagcuuaccauggagcuccccauccucaagaccaacgccaucaccaccauccucgccgccgucacccucugcuucgccuccucccagaacaucaccgaggaguucuaccaguccaccugcuccgccgucuccaagggcuaccucuccgcccuccgcaccggcugguacaccuccgucaucaccaucgagcucuccaacaucaaggagaacaagugcaacggcaccgacgccaaggucaagcucaucaagcaggagcucgacaaguacaagaacgccgucaccgagcuccagcuccucaugcaguccacccccgccgccggcuccggcuccgccaucugcuccggcaucgccgucugcaagguccuccaccucgagggcgaggucaacaagaucaagaacgcccuccucuccaccaacaaggccgucgucucccucuccaacggcgucuccguccucaccuucaagguccucgaccucaagaacuacaucgacaagcagcuccuccccauccucaacaagcaguccugcuccaucuccaacaucgagaccgucaucgaguuccagcagaagaacaaccgccuccucgagaucacccgcgaguucuccgucaacgccggcgucaccacccccgucuccaccuacaugcucaccaacuccgagcuccucucccucaucaacgacaugcccaucaccaacgaccagaagaagcucauguccaacaacguccagaucguccgccagcaguccuacuccaucaugugcaucaucaaggaggagguccucgccuacgucguccagcucccccucuacggcgucaucgacacccccugcuggaagcuccacaccuccccccucugcaccaccaacaccaaggagggcuccaacaucugccucacccgcaccgaccgcggcugguacugcgacaacgccggcuccgucuccuucuucccccaggccgagaccugcaagguccaguccaaccgcgucuucugcgacaccaugaacucccgcacccuccccuccgaggucaaccucugcaacaucgacaucuucaaccccaaguacgacugcaagaucaugaccuccaagaccgacgucuccuccuccgucaucaccucccucggcgccaucgucuccugcuacggcaagaccaagugcaccgccuccaacaagaaccgcggcaucaucaagaccuucuccaacggcugcgacuacgucuccaacaagggcgucgacaccgucuccgucggcaacacccucuacugcgucaacaagcaggagggcaagucccucuacgucaagggcgagcccaucaucaacuucuacgacccccucgucuuccccuccgacgaguucgacgccuccaucucccaggucaacgagaagaucaaccagucccucgccuucauccgcaaguccgacgagcuccuccacaacgucaacgucggcaaguccaccaccaacaucaugaucaccaccaucaucaucgucaucaucgucauccuccuccuccucaucgccgucggccucuuccucuacugcaaggcccgcugaggacuaguacuggcugcaucucccuuuccucuguccuccauccuucucccaggauggugaagggggaccugguacccagugauccccaccccaggauccuaaaucaugacuuaccugcuaauaaaaacucauuggaaaagugagaagaucuaaaaaaaaaaaaaaaaaaaaaaaaaaaaaaaaaaaaaaaaaaaaaaaaaaaaaaaaaaaaaaaaugcaucccccccccccccccccccccccccccccccaaaggcucuuuucagagccaccagaauu

SEQ ID NO: 16759 - RNA, 1901 nt, Artificial Sequence
  mRNA product Design f-3 comprising derived and/or modified sequence from HRSV(Memphis-37)__AIY60640.1__F-del_DSCav1_mut4 (opt3)
gggagagucccgcagucggcguccagcggcucugcuuguucgugugugugucguugcaggccuuauucaagcuuaccauggagcugcccauccucaagaccaacgccauuacaacuauacuugcugcagugacgcugugcuucgccagcucccagaauaucaccgaagaguuuuaccaaucuacauguucagcggucaguaaaggcuauuugagcgcuuuaagaacugggugguacaccuccguuauuacaaucgaacugucuaacauuaaggagaauaaaugcaacggaaccgacgccaaggugaaacuaaucaagcaggaacucgauaaguauaaaaaugcaguaacugagcugcagcuucugaugcagucgaccccugccgcugguucaggcagcgcaauauguagugggaucgccgugugcaaggucuugcaccucgagggagaagugaacaaaauuaagaaugcucugcuguccacaaacaaagccguugugucucucagcaauggcgucuccguguuaacguucaagguacuggaccuuaagaacuacaucgauaaacaauugcugccaauucuaaauaagcagucauguaguaucagcaacauagagacuguuauugaauuucagcagaaaaauaacaggcuccuggagaucacccgggaguucucugugaaugcgggugucacaacuccgguguccaccuauaugcuuacaaacucagaacuguugagccucauuaacgacaugcccaucaccaaugaucaaaagaaacugaugaguaacaaugugcagaucguccgccagcagucuuacuccauuaugugcauaaucaaggaggaaguuuuagcauaugugguacaacugccucucuacggggugauugacacgccauguuggaaacuucauacuagcccccugugcacaaccaacacuaaggagggaucgaauaucuguuugacacgaaccgaucguggcugguacugcgacaacgccggcucugucuccuuuuucccucaggcugaaacguguaaggugcagucaaauagaguguuuugcgauaccaugaacaguagaacacugccaagcgaggugaaucucugcaacauagacauuuucaaucccaaauaugauuguaagaucaugacuuccaaaaccgacgucucuagcucagugaucacaagucugggggccauuguauccugcuacggaaagacuaaauguaccgcaagcaacaagaauagggguaucauuaagacauuuucuaacggcugcgauuauguuucaaauaaagggguggacaccgucagugugggaaacacucuuuacugugucaacaagcaagagggcaaaagccuguaugugaagggugaaccuauaaucaauuucuacgacccauugguuuuuccguccgaugaguucgacgcuucuauuucgcagguuaacgagaaaaucaaucagagccucgccuuuauccggaaguccgaugaacuguuacacaacguaaaugucgggaagucaacgacaaacauuaugauaaccacuaucauuaucgugauuaucguuauacugcuacuccugaucgcggugggacuuuucuuguauugcaaagcccgcugaggacuaguacuggcugcaucucccuuuccucuguccuccauccuucucccaggauggugaagggggaccugguacccagugauccccaccccaggauccuaaaucaugacuuaccugcuaauaaaaacucauuggaaaagugagaagaucuaaaaaaaaaaaaaaaaaaaaaaaaaaaaaaaaaaaaaaaaaaaaaaaaaaaaaaaaaaaaaaaaugcaucccccccccccccccccccccccccccccccaaaggcucuuuucagagccaccagaauu

SEQ ID NO: 16760 - RNA, 1901 nt, Artificial Sequence
  mRNA product Design f-3 comprising derived and/or modified sequence from HRSV(Memphis-37)__AIY60640.1__F-del_DSCav1_mut4 (opt4)
gggagagucccgcagucggcguccagcggcucugcuuguucgugugugugucguugcaggccuuauucaagcuuaccauggagcugcccauccugaagaccaacgccaucaccaccauccuggccgccgugacccugugcuucgccagcagccagaacaucaccgaggaguucuaccagagcaccugcagcgccgugagcaagggcuaccugagcgcccugagaaccggcugguacaccagcgugaucaccaucgagcugagcaacaucaaggagaacaagugcaacggcaccgacgccaaggugaagcugaucaagcaggagcuggacaaguacaagaacgccgugaccgagcugcagcugcugaugcagagcacccccgccgccggcagcggcagcgccaucugcagcggcaucgccgugugcaaggugcugcaccuggagggcgaggugaacaagaucaagaacgcccugcugagcaccaacaaggccguggugagccugagcaacggcgugagcgugcugaccuucaaggugcuggaccugaagaacuacaucgacaagcagcugcugcccauccugaacaagcagagcugcagcaucagcaacaucgagaccgugaucgaguuccagcagaagaacaacagacugcuggagaucaccagagaguucagcgugaacgccggcgugaccacccccgugagcaccuacaugcugaccaacagcgagcugcugagccugaucaacgacaugcccaucaccaacgaccagaagaagcugaugagcaacaacgugcagaucgugagacagcagagcuacagcaucaugugcaucaucaaggaggaggugcuggccuacguggugcagcugccccuguacggcgugaucgacacccccugcuggaagcugcacaccagcccccugugcaccaccaacaccaaggagggcagcaacaucugccugaccagaaccgacagaggcugguacugcgacaacgccggcagcgugagcuucuucccccaggccgagaccugcaaggugcagagcaacagaguguucugcgacaccaugaacagcagaacccugcccagcgaggugaaccugugcaacaucgacaucuucaaccccaaguacgacugcaagaucaugaccagcaagaccgacgugagcagcagcgugaucaccagccugggcgccaucgugagcugcuacggcaagaccaagugcaccgccagcaacaagaacagaggcaucaucaagaccuucagcaacggcugcgacuacgugagcaacaagggcguggacaccgugagcgugggcaacacccuguacugcgugaacaagcaggagggcaagagccuguacgugaagggcgagcccaucaucaacuucuacgacccccugguguuccccagcgacgaguucgacgccagcaucagccaggugaacgagaagaucaaccagagccuggccuucaucagaaagagcgacgagcugcugcacaacgugaacgugggcaagagcaccaccaacaucaugaucaccaccaucaucaucgugaucaucgugauccugcugcugcugaucgccgugggccuguuccuguacugcaaggccagaugaggacuaguacuggcugcaucucccuuuccucuguccuccauccuucucccaggauggugaagggggaccugguacccagugauccccaccccaggauccuaaaucaugacuuaccugcuaauaaaaacucauuggaaaagugagaagaucuaaaaaaaaaaaaaaaaaaaaaaaaaaaaaaaaaaaaaaaaaaaaaaaaaaaaaaaaaaaaaaaaugcaucccccccccccccccccccccccccccccccaaaggcucuuuucagagccaccagaauu

SEQ ID NO: 16761 - RNA, 1901 nt, Artificial Sequence
  mRNA product Design f-3 comprising derived and/or modified sequence from HRSV(Memphis-37)__AIY60640.1__F-del_DSCav1_mut4 (opt5)
gggagagucccgcagucggcguccagcggcucugcuuguucgugugugugucguugcaggccuuauucaagcuuaccauggagcugcccauccucaagaccaacgccauuacaacgauccuggcugccgugacccuuugcuucgcgagcucccagaauauuacagaagaguuuuaccaaucuaccuguagcgcugucuccaaaggcuaucugucugcccucagaacagggugguacaccagcguuaucacaauugaacuguccaacaucaaggagaauaaaugcaacggaaccgacgccaaggugaaacuuaucaagcaggaacuggauaaguauaaaaaugcugugacggagcuccagcugcugaugcagucuaccccugccgcuggcagcggguccgccauuuguagcggaaucgcggucugcaaggugcuccaccuggagggcgaaguuaacaaaauuaagaaugcccuucugucuacaaacaaagcuguggucucccucagcaauggggugucuguucugaccuucaaggugcuugaccugaagaacuacaucgauaaacaacuccugccgauucugaauaagcaguccuguagcaucucuaacauugagacagucaucgaauuucagcagaaaaauaaccggcuccuggagaucacccgcgaguucuccgugaaugccggagugacgacacccgucagcaccuauaugcuuacaaacuccgaacugcucucucugauuaacgacaugccuaucaccaaugaucaaaagaaacuuaugagcaacaauguucagauugugagacagcaguccuacagcaucaugugcauuaucaaggaggaagugcuggcuuaugucgugcaacucccccuguacggcguuaucgacaccccuuguuggaaacugcauacaucuccccucugcacgaccaacacaaaggagggcuccaauauuugucugacccggacagaucgcgggugguacugcgacaacgccggaagcgugagcuuuuucccucaggcggaaaccuguaagguccagucuaauagaguguuuugcgauacgaugaacuccagaacacugccgucugagguuaaucucugcaacaucgacauuuucaaucccaaauaugauuguaagaucaugaccagcaaaaccgacguguccagcucugucauuacaucccugggcgccaucgugagcugcuacgggaagaccaaauguacagcuucuaacaagaaucggggaaucauuaagacguuuuccaacggcugcgauuaugucagcaauaaagggguggacaccguuuccgugggaaacacacuuuacugugucaacaagcaagagggcaaaucucuguaugugaagggcgaaccuaucauuaauuucuacgacccccucguuuuuccuagcgaugaguucgacgccuccaucucucaggugaacgaaaagauuaaucagagccuggcuuuuauccgcaaguccgaugagcugcuccacaacgucaauguggggaaaagcaccacaaacauuaugaucaccacgaucauuaucgugauuaucguuauucugcuucugcucaucgccgucggacuguuccuguauugcaaagccagaugaggacuaguacuggcugcaucucccuuuccucuguccuccauccuucucccaggauggugaagggggaccugguacccagugauccccaccccaggauccuaaaucaugacuuaccugcuaauaaaaacucauuggaaaagugagaagaucuaaaaaaaaaaaaaaaaaaaaaaaaaaaaaaaaaaaaaaaaaaaaaaaaaaaaaaaaaaaaaaaaugcaucccccccccccccccccccccccccccccccaaaggcucuuuucagagccaccagaauu

SEQ ID NO: 16762 - RNA, 1901 nt, Artificial Sequence
  mRNA product Design f-3 comprising derived and/or modified sequence from HRSV(Memphis-37)__AIY60640.1__F-del_DSCav1_mut4 (opt6)
gggagagucccgcagucggcguccagcggcucugcuuguucgugugugugucguugcaggccuuauucaagcuuaccauggaacuaccaauacucaaaacaaacgcaauaacaacuauacuagccgcaguuacacucugcuucgcuucaucacaaaauaucacagaagaauuuuaccaaucuacauguucagcuguauccaaagguuaccuuucagcacuacgaacaggaugguauaccucaguaaucaccaucgaacucucgaacauaaaagaaaacaaauguaacggaaccgaugcuaaagucaagcucauaaaacaagaacuagacaaauacaaaaacgcaguaaccgaacuacaacuacuuaugcaaucaacaccagcugcaggcucaggcucagcaaucugcucaggcauagcuguaugcaaaguacuacaucuagaaggagaaguaaacaaaauaaaaaacgcauuauuaucaacaaauaaagcaguaguaucacuaucaaauggaguaucaguacucacauucaaaguacuagaucuaaaaaacuacauugacaaacaauuacuaccaauccucaacaaacaaucaugcucaauauccaacauagaaacaguaauagaauuucaacaaaaaaacaaucgacuacuagaaauaacaagagaauuuucagucaaugccggaguuacaacacccguaagcacuuacaugcuaaccaacucagaacuacuaucacuaauaaacgacaugccaauuacaaacgaccaaaaaaaacuaaugucaaauaacguacaaauaguacgucaacaaucauacucaauaaugugcauaauaaaagaagaaguccuagcauacguaguacaauuacccuuauauggcguaauagacacaccaugcuggaaacuacacacauccccacucugcaccaccaacaccaaagaaggcuccaacauaugucuaacccgaaccgacagagguugguauugugauaacgcuggcuccguaucauucuucccacaagcagaaacauguaaaguacaaucaaacagaguauucugcgauacaaugaauagcagaacacuaccaucagaaguaaacuuaugcaacaucgacaucuucaaucccaaauacgacugcaaaauaaugacauccaaaacugacguuucuucaagcguaauaacaucuuuaggagcaauaguauccugcuacggaaaaacuaaaugcacagcauccaauaaaaaccguggaauaauaaaaacauucucaaauggcugcgacuacgucucaaacaaaggcguagacaccguuagugucggaaacacacuauauugcguaaauaaacaagaaggaaaauccuuauacguaaaaggcgaaccaauaauuaacuucuaugacccccucguauuuccauccgaugaauuugacgcaucaaucucgcaaguaaacgaaaaaauaaaccaaagccuagcauucauaagaaaauccgacgaacuacuccacaauguaaauguaggaaaaucaacuaccaacauaaugauuacuacuauaauaauaguaauuauagucaucuuacuacuauuaauagcagucggauuauuccuauacugcaaagcaagauagggacuaguacuggcugcaucucccuuuccucuguccuccauccuucucccaggauggugaagggggaccugguacccagugauccccaccccaggauccuaaaucaugacuuaccugcuaauaaaaacucauuggaaaagugagaagaucuaaaaaaaaaaaaaaaaaaaaaaaaaaaaaaaaaaaaaaaaaaaaaaaaaaaaaaaaaaaaaaaaugcaucccccccccccccccccccccccccccccccaaaggcucuuuucagagccaccagaauu

SEQ ID NO: 16763 - RNA, 1901 nt, Artificial Sequence
  mRNA product Design f-3 comprising derived and/or modified sequence from HRSV(Memphis-37)__AIY60640.1__F-del_DSCav1_mut4 (opt11)
gggagagucccgcagucggcguccagcggcucugcuuguucgugugugugucguugcaggccuuauucaagcuuaccauggagcuccccauccuaaaaaccaacgccaucaccaccauccucgccgccgucacccuaugcuucgcuucaucacaaaacaucaccgaagaauuuuaccaaucuaccugcuccgccgucuccaaaggauaucucagcgcccuacggaccggcugguacaccuccgucauaaccaucgaacucaguaacaucaaagaaaacaaaugcaacggcaccgacgccaaagucaaacuaaucaaacaagaacuagauaaauacaaaaacgcggucaccgaacuacaacuccuaaugcaaagcacccccgccgccggauccggcuccgccauaugcuccggcauugcugucugcaaaguacuacaccucgagggcgaggucaacaaaaucaaaaacgcacuacucagcacuaauaaagccguaguaucccuaucaaacggugucucagucuuaacauucaaaguacucgaccuaaagaacuacaucgacaaacaacuccuacccauccucaacaagcaguccuguucuaucucaaacaucgaaaccgucaucgaauuucaacaaaagaacaaccgccuccucgaaaucacacgcgaguucuccgucaacgcaggaguaaccacccccgucuccaccuacaugcucacaaacucggaacuccucucacuaaucaacgacaugcccaucaccaacgaccaaaagaaacucaugagcaacaacguucaaaucguccgccaacaaucauacuccaucaugugcauaaucaaagaagaaguccuagcuuacgucguccagcugccccucuacggagucaucgacacgcccugcuggaaacuacacacaagcccccucugcaccaccaacaccaaagaaggcuccaacauaugccucacacggaccgaccgcgguugguacugcgacaacgccggcuccgucuccuucuucccccaagcagaaacuugcaaaguccaauccaaccgcguauucugcgacacaaugaacagcagaacacucccuagcgaagucaaccucugcaacaucgacauauucaaccccaaauacgacugcaaaaucaugacgucaaaaaccgacgucuccagcuccguuaucaccucacucggcgccaucgucagcugcuacggcaaaacuaaaugcaccgccuccaacaaaaaccgcggcaucauuaaaaccuucagcaacggcugcgacuacgucuccaacaaaggugucgauacgguauccgucggaaacacccuauacugcgucaacaaacaagaaggcaaaucucucuacgucaaaggcgaacccauaaucaauuucuacgacccccuagucuuccccuccgaugaauuugacgccuccaucagccaagucaacgagaaaaucaaccaaucacuagccuucauccggaaauccgacgaacuccuacacaacguaaacgucggcaaauccaccaccaauauaaugaucacaaccaucaucaucguaaucaucgucauccuccuccuacucaucgccgucggauuauucuuauacugcaaagcccgcuaaggacuaguacuggcugcaucucccuuuccucuguccuccauccuucucccaggauggugaagggggaccugguacccagugauccccaccccaggauccuaaaucaugacuuaccugcuaauaaaaacucauuggaaaagugagaagaucuaaaaaaaaaaaaaaaaaaaaaaaaaaaaaaaaaaaaaaaaaaaaaaaaaaaaaaaaaaaaaaaaugcaucccccccccccccccccccccccccccccccaaaggcucuuuucagagccaccagaauu

SEQ ID NO: 16764 - RNA, 2117 nt, Artificial Sequence
  mRNA product Design f-4 comprising derived and/or modified sequence from HRSV(Memphis-37)__AIY60640.1__F-del_DSCav1_mut4 (opt1)
gggagagucccgcagucggcguccagcggcucugcuuguucgugugugugucguugcaggccuuauucaagcuuaccauggagcugcccauccucaagaccaacgccaucaccacgauccuggccgcggugacccugugcuucgccagcucccagaacaucaccgaggaguucuaccagagcacgugcuccgccgucagcaagggcuaccucuccgcccugcgcaccgggugguacaccagcgugaucaccaucgagcuguccaacaucaaggagaacaagugcaacggcaccgacgccaaggugaagcucaucaagcaggagcuggacaaguacaagaacgcggucacggagcugcagcuccugaugcagagcaccccggccgccggcuccgggagcgcgaucugcuccggcaucgccgucugcaaggugcugcaccucgagggcgaggugaacaagaucaagaacgcccugcuguccaccaacaaggccgucgugagccucuccaacggggugagcguccugaccuucaaggugcuggaccucaagaacuacaucgacaagcagcugcugcccauccugaacaagcagagcugcuccaucagcaacaucgagaccgucaucgaguuccagcagaagaacaaccgccuccuggagaucacgcgggaguucagcgugaacgcgggcgugaccacccccgucuccaccuacaugcugacgaacagcgagcuccugucccugaucaacgacaugccgaucaccaacgaccagaagaagcucaugagcaacaacgugcagaucgugcgccagcaguccuacagcaucaugugcaucaucaaggaggagguccuggccuacguggugcagcugccccucuacggggucaucgacacccccugcuggaagcugcacaccagcccccugugcacgaccaacaccaaggagggcuccaacaucugccucacccggacggaccgcgggugguacugcgacaacgccggcagcguguccuucuucccgcaggccgagaccugcaagguccagagcaaccggguguucugcgacaccaugaacucccggacccugcccagcgaggugaaccucugcaacaucgacaucuucaaccccaaguacgacugcaagaucaugacguccaagaccgacgucagcuccagcgugaucaccucccugggcgccaucgugagcugcuacgggaagaccaagugcacggcgagcaacaagaaccgcggcaucaucaagaccuucuccaacgggugcgacuacgucagcaacaagggcguggacaccguguccgucggcaacacccuguacugcgugaacaagcaggagggcaagagccucuacgugaagggggagcccaucaucaacuucuacgacccgcuggucuuccccuccgacgaguucgacgccagcaucucccaggugaacgagaagaucaaccagagccuggccuucauccggaaguccgacgagcuccugcacaacgugaacgucggcaagagcaccacgaacaucaugaucaccaccaucaucaucgugaucaucgugauccugcugcuccugaucgccgucgggcuguuccucuacugcaaggcccgcugaggacuagugaagggaacacccaaauuuaauucagccuuaagcacaauuaauuaagagugaaacguaauuguacaagcaguuggucacccaccauagggcaugaucaacaccgcaaccuuuccuuuuucccccagugauucugaaaaaccccucuucccuucagcuugcuuagauguuccaaauuuaguaagcuuaaggcggccuacagaagaaaaagaaaaaaaaggccacaaaaguucccucucacuuucaguaaauaaaauaaaagcagcaacagaaauaaagaaauaaaugaaauucaaaaugaaauaaauauuguguugugcagcauuaaaaaaucaauaaaaauuaaaaaugagcaagaucuaaaaaaaaaaaaaaaaaaaaaaaaaaaaaaaaaaaaaaaaaaaaaaaaaaaaaaaaaaaaaaaaugcaucccccccccccccccccccccccccccccccaaaggcucuuuucagagccaccagaauu

SEQ ID NO: 16765 - RNA, 2117 nt, Artificial Sequence
  mRNA product Design f-4 comprising derived and/or modified sequence from HRSV(Memphis-37)__AIY60640.1__F-del_DSCav1_mut4 (opt1)
gggagagucccgcagucggcguccagcggcucugcuuguucgugugugugucguugcaggccuuauucaagcuuaccauggagcugcccauccucaagaccaacgccaucaccacgauccuggccgcggugacccugugcuucgccagcucccagaacaucaccgaggaguucuaccagagcacgugcuccgccgucagcaagggcuaccucuccgcccugcgcaccgggugguacaccagcgugaucaccaucgagcuguccaacaucaaggagaacaagugcaacggcaccgacgccaaggugaagcucaucaagcaggagcuggacaaguacaagaacgcggucacggagcugcagcuccugaugcagagcaccccggccgccggguccggcagcgccaucugcuccgggaucgcggugugcaaggugcugcaccucgagggcgaggucaacaagaucaagaacgcccugcugagcaccaacaaggccguggugucccucagcaacggcgucuccgugcugaccuucaaggugcuggaccucaagaacuacaucgacaagcagcugcugcccauccucaacaagcagagcugcuccaucagcaacaucgagacggucaucgaguuccagcagaagaacaaccggcugcuggagaucacccgcgaguucuccgugaacgccggggugaccacccccgucagcacguacaugcucaccaacagcgagcugcugucccucaucaacgacaugcccaucaccaacgaccagaagaagcugaugagcaacaacgugcagaucgugcggcagcaguccuacagcaucaugugcaucaucaaggaggagguccuggccuacguggugcagcucccgcuguacggcgucaucgacacccccugcuggaagcugcacacgagcccccucugcaccaccaacaccaaggagggguccaacaucugccugacgcgcaccgaccggggcugguacugcgacaacgcgggguccgugagcuucuucccccaggccgagaccugcaaggugcaguccaaccgcgucuucugcgacaccaugaacagccggacgcucccguccgaggugaaccugugcaacaucgacaucuucaaccccaaguacgacugcaagaucaugaccagcaagaccgacgucuccagcuccgugaucaccagccugggcgccaucguguccugcuacggcaagacgaagugcaccgccagcaacaagaaccgggggaucaucaagaccuucuccaacggcugcgacuacgucagcaacaaggggguggacaccgugagcgucggcaacacgcucuacugcgugaacaagcaggagggcaagucccuguacgugaagggggagcccaucaucaacuucuacgacccccuggucuucccgagcgacgaguucgacgccuccaucagccaggugaacgagaagaucaaccagucccucgcguucauccgcaagagcgacgagcugcugcacaacgugaacgucggcaaguccaccaccaacaucaugaucaccaccaucaucaucgugaucaucgugauccuccugcugcucaucgccgucgggcuguuccuguacugcaaggcccggugaggacuagugaagggaacacccaaauuuaauucagccuuaagcacaauuaauuaagagugaaacguaauuguacaagcaguuggucacccaccauagggcaugaucaacaccgcaaccuuuccuuuuucccccagugauucugaaaaaccccucuucccuucagcuugcuuagauguuccaaauuuaguaagcuuaaggcggccuacagaagaaaaagaaaaaaaaggccacaaaaguucccucucacuuucaguaaauaaaauaaaagcagcaacagaaauaaagaaauaaaugaaauucaaaaugaaauaaauauuguguugugcagcauuaaaaaaucaauaaaaauuaaaaaugagcaagaucuaaaaaaaaaaaaaaaaaaaaaaaaaaaaaaaaaaaaaaaaaaaaaaaaaaaaaaaaaaaaaaaaugcaucccccccccccccccccccccccccccccccaaaggcucuuuucagagccaccagaauu

SEQ ID NO: 16766 - RNA, 2117 nt, Artificial Sequence
  mRNA product Design f-4 comprising derived and/or modified sequence from HRSV(Memphis-37)__AIY60640.1__F-del_DSCav1_mut4 (opt2)
gggagagucccgcagucggcguccagcggcucugcuuguucgugugugugucguugcaggccuuauucaagcuuaccauggagcuccccauccucaagaccaacgccaucaccaccauccucgccgccgucacccucugcuucgccuccucccagaacaucaccgaggaguucuaccaguccaccugcuccgccgucuccaagggcuaccucuccgcccuccgcaccggcugguacaccuccgucaucaccaucgagcucuccaacaucaaggagaacaagugcaacggcaccgacgccaaggucaagcucaucaagcaggagcucgacaaguacaagaacgccgucaccgagcuccagcuccucaugcaguccacccccgccgccggcuccggcuccgccaucugcuccggcaucgccgucugcaagguccuccaccucgagggcgaggucaacaagaucaagaacgcccuccucuccaccaacaaggccgucgucucccucuccaacggcgucuccguccucaccuucaagguccucgaccucaagaacuacaucgacaagcagcuccuccccauccucaacaagcaguccugcuccaucuccaacaucgagaccgucaucgaguuccagcagaagaacaaccgccuccucgagaucacccgcgaguucuccgucaacgccggcgucaccacccccgucuccaccuacaugcucaccaacuccgagcuccucucccucaucaacgacaugcccaucaccaacgaccagaagaagcucauguccaacaacguccagaucguccgccagcaguccuacuccaucaugugcaucaucaaggaggagguccucgccuacgucguccagcucccccucuacggcgucaucgacacccccugcuggaagcuccacaccuccccccucugcaccaccaacaccaaggagggcuccaacaucugccucacccgcaccgaccgcggcugguacugcgacaacgccggcuccgucuccuucuucccccaggccgagaccugcaagguccaguccaaccgcgucuucugcgacaccaugaacucccgcacccuccccuccgaggucaaccucugcaacaucgacaucuucaaccccaaguacgacugcaagaucaugaccuccaagaccgacgucuccuccuccgucaucaccucccucggcgccaucgucuccugcuacggcaagaccaagugcaccgccuccaacaagaaccgcggcaucaucaagaccuucuccaacggcugcgacuacgucuccaacaagggcgucgacaccgucuccgucggcaacacccucuacugcgucaacaagcaggagggcaagucccucuacgucaagggcgagcccaucaucaacuucuacgacccccucgucuuccccuccgacgaguucgacgccuccaucucccaggucaacgagaagaucaaccagucccucgccuucauccgcaaguccgacgagcuccuccacaacgucaacgucggcaaguccaccaccaacaucaugaucaccaccaucaucaucgucaucaucgucauccuccuccuccucaucgccgucggccucuuccucuacugcaaggcccgcugaggacuagugaagggaacacccaaauuuaauucagccuuaagcacaauuaauuaagagugaaacguaauuguacaagcaguuggucacccaccauagggcaugaucaacaccgcaaccuuuccuuuuucccccagugauucugaaaaaccccucuucccuucagcuugcuuagauguuccaaauuuaguaagcuuaaggcggccuacagaagaaaaagaaaaaaaaggccacaaaaguucccucucacuuucaguaaauaaaauaaaagcagcaacagaaauaaagaaauaaaugaaauucaaaaugaaauaaauauuguguugugcagcauuaaaaaaucaauaaaaauuaaaaaugagcaagaucuaaaaaaaaaaaaaaaaaaaaaaaaaaaaaaaaaaaaaaaaaaaaaaaaaaaaaaaaaaaaaaaaugcaucccccccccccccccccccccccccccccccaaaggcucuuuucagagccaccagaauu

SEQ ID NO: 16767 - RNA, 2117 nt, Artificial Sequence
  mRNA product Design f-4 comprising derived and/or modified sequence from HRSV(Memphis-37)__AIY60640.1__F-del_DSCav1_mut4 (opt3)
gggagagucccgcagucggcguccagcggcucugcuuguucgugugugugucguugcaggccuuauucaagcuuaccauggagcugcccauccucaagaccaacgccauuacaacuauacuugcugcagugacgcugugcuucgccagcucccagaauaucaccgaagaguuuuaccaaucuacauguucagcggucaguaaaggcuauuugagcgcuuuaagaacugggugguacaccuccguuauuacaaucgaacugucuaacauuaaggagaauaaaugcaacggaaccgacgccaaggugaaacuaaucaagcaggaacucgauaaguauaaaaaugcaguaacugagcugcagcuucugaugcagucgaccccugccgcugguucaggcagcgcaauauguagugggaucgccgugugcaaggucuugcaccucgagggagaagugaacaaaauuaagaaugcucugcuguccacaaacaaagccguugugucucucagcaauggcgucuccguguuaacguucaagguacuggaccuuaagaacuacaucgauaaacaauugcugccaauucuaaauaagcagucauguaguaucagcaacauagagacuguuauugaauuucagcagaaaaauaacaggcuccuggagaucacccgggaguucucugugaaugcgggugucacaacuccgguguccaccuauaugcuuacaaacucagaacuguugagccucauuaacgacaugcccaucaccaaugaucaaaagaaacugaugaguaacaaugugcagaucguccgccagcagucuuacuccauuaugugcauaaucaaggaggaaguuuuagcauaugugguacaacugccucucuacggggugauugacacgccauguuggaaacuucauacuagcccccugugcacaaccaacacuaaggagggaucgaauaucuguuugacacgaaccgaucguggcugguacugcgacaacgccggcucugucuccuuuuucccucaggcugaaacguguaaggugcagucaaauagaguguuuugcgauaccaugaacaguagaacacugccaagcgaggugaaucucugcaacauagacauuuucaaucccaaauaugauuguaagaucaugacuuccaaaaccgacgucucuagcucagugaucacaagucugggggccauuguauccugcuacggaaagacuaaauguaccgcaagcaacaagaauagggguaucauuaagacauuuucuaacggcugcgauuauguuucaaauaaagggguggacaccgucagugugggaaacacucuuuacugugucaacaagcaagagggcaaaagccuguaugugaagggugaaccuauaaucaauuucuacgacccauugguuuuuccguccgaugaguucgacgcuucuauuucgcagguuaacgagaaaaucaaucagagccucgccuuuauccggaaguccgaugaacuguuacacaacguaaaugucgggaagucaacgacaaacauuaugauaaccacuaucauuaucgugauuaucguuauacugcuacuccugaucgcggugggacuuuucuuguauugcaaagcccgcugaggacuagugaagggaacacccaaauuuaauucagccuuaagcacaauuaauuaagagugaaacguaauuguacaagcaguuggucacccaccauagggcaugaucaacaccgcaaccuuuccuuuuucccccagugauucugaaaaaccccucuucccuucagcuugcuuagauguuccaaauuuaguaagcuuaaggcggccuacagaagaaaaagaaaaaaaaggccacaaaaguucccucucacuuucaguaaauaaaauaaaagcagcaacagaaauaaagaaauaaaugaaauucaaaaugaaauaaauauuguguugugcagcauuaaaaaaucaauaaaaauuaaaaaugagcaagaucuaaaaaaaaaaaaaaaaaaaaaaaaaaaaaaaaaaaaaaaaaaaaaaaaaaaaaaaaaaaaaaaaugcaucccccccccccccccccccccccccccccccaaaggcucuuuucagagccaccagaauu

SEQ ID NO: 16768 - RNA, 2117 nt, Artificial Sequence
  mRNA product Design f-4 comprising derived and/or modified sequence from HRSV(Memphis-37)__AIY60640.1__F-del_DSCav1_mut4 (opt4)
gggagagucccgcagucggcguccagcggcucugcuuguucgugugugugucguugcaggccuuauucaagcuuaccauggagcugcccauccugaagaccaacgccaucaccaccauccuggccgccgugacccugugcuucgccagcagccagaacaucaccgaggaguucuaccagagcaccugcagcgccgugagcaagggcuaccugagcgcccugagaaccggcugguacaccagcgugaucaccaucgagcugagcaacaucaaggagaacaagugcaacggcaccgacgccaaggugaagcugaucaagcaggagcuggacaaguacaagaacgccgugaccgagcugcagcugcugaugcagagcacccccgccgccggcagcggcagcgccaucugcagcggcaucgccgugugcaaggugcugcaccuggagggcgaggugaacaagaucaagaacgcccugcugagcaccaacaaggccguggugagccugagcaacggcgugagcgugcugaccuucaaggugcuggaccugaagaacuacaucgacaagcagcugcugcccauccugaacaagcagagcugcagcaucagcaacaucgagaccgugaucgaguuccagcagaagaacaacagacugcuggagaucaccagagaguucagcgugaacgccggcgugaccacccccgugagcaccuacaugcugaccaacagcgagcugcugagccugaucaacgacaugcccaucaccaacgaccagaagaagcugaugagcaacaacgugcagaucgugagacagcagagcuacagcaucaugugcaucaucaaggaggaggugcuggccuacguggugcagcugccccuguacggcgugaucgacacccccugcuggaagcugcacaccagcccccugugcaccaccaacaccaaggagggcagcaacaucugccugaccagaaccgacagaggcugguacugcgacaacgccggcagcgugagcuucuucccccaggccgagaccugcaaggugcagagcaacagaguguucugcgacaccaugaacagcagaacccugcccagcgaggugaaccugugcaacaucgacaucuucaaccccaaguacgacugcaagaucaugaccagcaagaccgacgugagcagcagcgugaucaccagccugggcgccaucgugagcugcuacggcaagaccaagugcaccgccagcaacaagaacagaggcaucaucaagaccuucagcaacggcugcgacuacgugagcaacaagggcguggacaccgugagcgugggcaacacccuguacugcgugaacaagcaggagggcaagagccuguacgugaagggcgagcccaucaucaacuucuacgacccccugguguuccccagcgacgaguucgacgccagcaucagccaggugaacgagaagaucaaccagagccuggccuucaucagaaagagcgacgagcugcugcacaacgugaacgugggcaagagcaccaccaacaucaugaucaccaccaucaucaucgugaucaucgugauccugcugcugcugaucgccgugggccuguuccuguacugcaaggccagaugaggacuagugaagggaacacccaaauuuaauucagccuuaagcacaauuaauuaagagugaaacguaauuguacaagcaguuggucacccaccauagggcaugaucaacaccgcaaccuuuccuuuuucccccagugauucugaaaaaccccucuucccuucagcuugcuuagauguuccaaauuuaguaagcuuaaggcggccuacagaagaaaaagaaaaaaaaggccacaaaaguucccucucacuuucaguaaauaaaauaaaagcagcaacagaaauaaagaaauaaaugaaauucaaaaugaaauaaauauuguguugugcagcauuaaaaaaucaauaaaaauuaaaaaugagcaagaucuaaaaaaaaaaaaaaaaaaaaaaaaaaaaaaaaaaaaaaaaaaaaaaaaaaaaaaaaaaaaaaaaugcaucccccccccccccccccccccccccccccccaaaggcucuuuucagagccaccagaauu

SEQ ID NO: 16769 - RNA, 2117 nt, Artificial Sequence
  mRNA product Design f-4 comprising derived and/or modified sequence from HRSV(Memphis-37)__AIY60640.1__F-del_DSCav1_mut4 (opt5)
gggagagucccgcagucggcguccagcggcucugcuuguucgugugugugucguugcaggccuuauucaagcuuaccauggagcugcccauccucaagaccaacgccauuacaacgauccuggcugccgugacccuuugcuucgcgagcucccagaauauuacagaagaguuuuaccaaucuaccuguagcgcugucuccaaaggcuaucugucugcccucagaacagggugguacaccagcguuaucacaauugaacuguccaacaucaaggagaauaaaugcaacggaaccgacgccaaggugaaacuuaucaagcaggaacuggauaaguauaaaaaugcugugacggagcuccagcugcugaugcagucuaccccugccgcuggcagcggguccgccauuuguagcggaaucgcggucugcaaggugcuccaccuggagggcgaaguuaacaaaauuaagaaugcccuucugucuacaaacaaagcuguggucucccucagcaauggggugucuguucugaccuucaaggugcuugaccugaagaacuacaucgauaaacaacuccugccgauucugaauaagcaguccuguagcaucucuaacauugagacagucaucgaauuucagcagaaaaauaaccggcuccuggagaucacccgcgaguucuccgugaaugccggagugacgacacccgucagcaccuauaugcuuacaaacuccgaacugcucucucugauuaacgacaugccuaucaccaaugaucaaaagaaacuuaugagcaacaauguucagauugugagacagcaguccuacagcaucaugugcauuaucaaggaggaagugcuggcuuaugucgugcaacucccccuguacggcguuaucgacaccccuuguuggaaacugcauacaucuccccucugcacgaccaacacaaaggagggcuccaauauuugucugacccggacagaucgcgggugguacugcgacaacgccggaagcgugagcuuuuucccucaggcggaaaccuguaagguccagucuaauagaguguuuugcgauacgaugaacuccagaacacugccgucugagguuaaucucugcaacaucgacauuuucaaucccaaauaugauuguaagaucaugaccagcaaaaccgacguguccagcucugucauuacaucccugggcgccaucgugagcugcuacgggaagaccaaauguacagcuucuaacaagaaucggggaaucauuaagacguuuuccaacggcugcgauuaugucagcaauaaagggguggacaccguuuccgugggaaacacacuuuacugugucaacaagcaagagggcaaaucucuguaugugaagggcgaaccuaucauuaauuucuacgacccccucguuuuuccuagcgaugaguucgacgccuccaucucucaggugaacgaaaagauuaaucagagccuggcuuuuauccgcaaguccgaugagcugcuccacaacgucaauguggggaaaagcaccacaaacauuaugaucaccacgaucauuaucgugauuaucguuauucugcuucugcucaucgccgucggacuguuccuguauugcaaagccagaugaggacuagugaagggaacacccaaauuuaauucagccuuaagcacaauuaauuaagagugaaacguaauuguacaagcaguuggucacccaccauagggcaugaucaacaccgcaaccuuuccuuuuucccccagugauucugaaaaaccccucuucccuucagcuugcuuagauguuccaaauuuaguaagcuuaaggcggccuacagaagaaaaagaaaaaaaaggccacaaaaguucccucucacuuucaguaaauaaaauaaaagcagcaacagaaauaaagaaauaaaugaaauucaaaaugaaauaaauauuguguugugcagcauuaaaaaaucaauaaaaauuaaaaaugagcaagaucuaaaaaaaaaaaaaaaaaaaaaaaaaaaaaaaaaaaaaaaaaaaaaaaaaaaaaaaaaaaaaaaaugcaucccccccccccccccccccccccccccccccaaaggcucuuuucagagccaccagaauu

SEQ ID NO: 16770 - RNA, 2117 nt, Artificial Sequence
  mRNA product Design f-4 comprising derived and/or modified sequence from HRSV(Memphis-37)__AIY60640.1__F-del_DSCav1_mut4 (opt6)
gggagagucccgcagucggcguccagcggcucugcuuguucgugugugugucguugcaggccuuauucaagcuuaccauggaacuaccaauacucaaaacaaacgcaauaacaacuauacuagccgcaguuacacucugcuucgcuucaucacaaaauaucacagaagaauuuuaccaaucuacauguucagcuguauccaaagguuaccuuucagcacuacgaacaggaugguauaccucaguaaucaccaucgaacucucgaacauaaaagaaaacaaauguaacggaaccgaugcuaaagucaagcucauaaaacaagaacuagacaaauacaaaaacgcaguaaccgaacuacaacuacuuaugcaaucaacaccagcugcaggcucaggcucagcaaucugcucaggcauagcuguaugcaaaguacuacaucuagaaggagaaguaaacaaaauaaaaaacgcauuauuaucaacaaauaaagcaguaguaucacuaucaaauggaguaucaguacucacauucaaaguacuagaucuaaaaaacuacauugacaaacaauuacuaccaauccucaacaaacaaucaugcucaauauccaacauagaaacaguaauagaauuucaacaaaaaaacaaucgacuacuagaaauaacaagagaauuuucagucaaugccggaguuacaacacccguaagcacuuacaugcuaaccaacucagaacuacuaucacuaauaaacgacaugccaauuacaaacgaccaaaaaaaacuaaugucaaauaacguacaaauaguacgucaacaaucauacucaauaaugugcauaauaaaagaagaaguccuagcauacguaguacaauuacccuuauauggcguaauagacacaccaugcuggaaacuacacacauccccacucugcaccaccaacaccaaagaaggcuccaacauaugucuaacccgaaccgacagagguugguauugugauaacgcuggcuccguaucauucuucccacaagcagaaacauguaaaguacaaucaaacagaguauucugcgauacaaugaauagcagaacacuaccaucagaaguaaacuuaugcaacaucgacaucuucaaucccaaauacgacugcaaaauaaugacauccaaaacugacguuucuucaagcguaauaacaucuuuaggagcaauaguauccugcuacggaaaaacuaaaugcacagcauccaauaaaaaccguggaauaauaaaaacauucucaaauggcugcgacuacgucucaaacaaaggcguagacaccguuagugucggaaacacacuauauugcguaaauaaacaagaaggaaaauccuuauacguaaaaggcgaaccaauaauuaacuucuaugacccccucguauuuccauccgaugaauuugacgcaucaaucucgcaaguaaacgaaaaaauaaaccaaagccuagcauucauaagaaaauccgacgaacuacuccacaauguaaauguaggaaaaucaacuaccaacauaaugauuacuacuauaauaauaguaauuauagucaucuuacuacuauuaauagcagucggauuauuccuauacugcaaagcaagauagggacuagugaagggaacacccaaauuuaauucagccuuaagcacaauuaauuaagagugaaacguaauuguacaagcaguuggucacccaccauagggcaugaucaacaccgcaaccuuuccuuuuucccccagugauucugaaaaaccccucuucccuucagcuugcuuagauguuccaaauuuaguaagcuuaaggcggccuacagaagaaaaagaaaaaaaaggccacaaaaguucccucucacuuucaguaaauaaaauaaaagcagcaacagaaauaaagaaauaaaugaaauucaaaaugaaauaaauauuguguugugcagcauuaaaaaaucaauaaaaauuaaaaaugagcaagaucuaaaaaaaaaaaaaaaaaaaaaaaaaaaaaaaaaaaaaaaaaaaaaaaaaaaaaaaaaaaaaaaaugcaucccccccccccccccccccccccccccccccaaaggcucuuuucagagccaccagaauu

SEQ ID NO: 16771 - RNA, 2117 nt, Artificial Sequence
  mRNA product Design f-4 comprising derived and/or modified sequence from HRSV(Memphis-37)__AIY60640.1__F-del_DSCav1_mut4 (opt11)
gggagagucccgcagucggcguccagcggcucugcuuguucgugugugugucguugcaggccuuauucaagcuuaccauggagcuccccauccuaaaaaccaacgccaucaccaccauccucgccgccgucacccuaugcuucgcuucaucacaaaacaucaccgaagaauuuuaccaaucuaccugcuccgccgucuccaaaggauaucucagcgcccuacggaccggcugguacaccuccgucauaaccaucgaacucaguaacaucaaagaaaacaaaugcaacggcaccgacgccaaagucaaacuaaucaaacaagaacuagauaaauacaaaaacgcggucaccgaacuacaacuccuaaugcaaagcacccccgccgccggauccggcuccgccauaugcuccggcauugcugucugcaaaguacuacaccucgagggcgaggucaacaaaaucaaaaacgcacuacucagcacuaauaaagccguaguaucccuaucaaacggugucucagucuuaacauucaaaguacucgaccuaaagaacuacaucgacaaacaacuccuacccauccucaacaagcaguccuguucuaucucaaacaucgaaaccgucaucgaauuucaacaaaagaacaaccgccuccucgaaaucacacgcgaguucuccgucaacgcaggaguaaccacccccgucuccaccuacaugcucacaaacucggaacuccucucacuaaucaacgacaugcccaucaccaacgaccaaaagaaacucaugagcaacaacguucaaaucguccgccaacaaucauacuccaucaugugcauaaucaaagaagaaguccuagcuuacgucguccagcugccccucuacggagucaucgacacgcccugcuggaaacuacacacaagcccccucugcaccaccaacaccaaagaaggcuccaacauaugccucacacggaccgaccgcgguugguacugcgacaacgccggcuccgucuccuucuucccccaagcagaaacuugcaaaguccaauccaaccgcguauucugcgacacaaugaacagcagaacacucccuagcgaagucaaccucugcaacaucgacauauucaaccccaaauacgacugcaaaaucaugacgucaaaaaccgacgucuccagcuccguuaucaccucacucggcgccaucgucagcugcuacggcaaaacuaaaugcaccgccuccaacaaaaaccgcggcaucauuaaaaccuucagcaacggcugcgacuacgucuccaacaaaggugucgauacgguauccgucggaaacacccuauacugcgucaacaaacaagaaggcaaaucucucuacgucaaaggcgaacccauaaucaauuucuacgacccccuagucuuccccuccgaugaauuugacgccuccaucagccaagucaacgagaaaaucaaccaaucacuagccuucauccggaaauccgacgaacuccuacacaacguaaacgucggcaaauccaccaccaauauaaugaucacaaccaucaucaucguaaucaucgucauccuccuccuacucaucgccgucggauuauucuuauacugcaaagcccgcuaaggacuagugaagggaacacccaaauuuaauucagccuuaagcacaauuaauuaagagugaaacguaauuguacaagcaguuggucacccaccauagggcaugaucaacaccgcaaccuuuccuuuuucccccagugauucugaaaaaccccucuucccuucagcuugcuuagauguuccaaauuuaguaagcuuaaggcggccuacagaagaaaaagaaaaaaaaggccacaaaaguucccucucacuuucaguaaauaaaauaaaagcagcaacagaaauaaagaaauaaaugaaauucaaaaugaaauaaauauuguguugugcagcauuaaaaaaucaauaaaaauuaaaaaugagcaagaucuaaaaaaaaaaaaaaaaaaaaaaaaaaaaaaaaaaaaaaaaaaaaaaaaaaaaaaaaaaaaaaaaugcaucccccccccccccccccccccccccccccccaaaggcucuuuucagagccaccagaauu

SEQ ID NO: 16772 - RNA, 1893 nt, Artificial Sequence
  mRNA product Design f-5 comprising derived and/or modified sequence from HRSV(Memphis-37)__AIY60640.1__F-del_DSCav1_mut4 (opt1)
gggagacuuucccauucuguagcagaauuugguguugccuguggucuuggucccgcggagaagcuuaccauggagcugcccauccucaagaccaacgccaucaccacgauccuggccgcggugacccugugcuucgccagcucccagaacaucaccgaggaguucuaccagagcacgugcuccgccgucagcaagggcuaccucuccgcccugcgcaccgggugguacaccagcgugaucaccaucgagcuguccaacaucaaggagaacaagugcaacggcaccgacgccaaggugaagcucaucaagcaggagcuggacaaguacaagaacgcggucacggagcugcagcuccugaugcagagcaccccggccgccggcuccgggagcgcgaucugcuccggcaucgccgucugcaaggugcugcaccucgagggcgaggugaacaagaucaagaacgcccugcuguccaccaacaaggccgucgugagccucuccaacggggugagcguccugaccuucaaggugcuggaccucaagaacuacaucgacaagcagcugcugcccauccugaacaagcagagcugcuccaucagcaacaucgagaccgucaucgaguuccagcagaagaacaaccgccuccuggagaucacgcgggaguucagcgugaacgcgggcgugaccacccccgucuccaccuacaugcugacgaacagcgagcuccugucccugaucaacgacaugccgaucaccaacgaccagaagaagcucaugagcaacaacgugcagaucgugcgccagcaguccuacagcaucaugugcaucaucaaggaggagguccuggccuacguggugcagcugccccucuacggggucaucgacacccccugcuggaagcugcacaccagcccccugugcacgaccaacaccaaggagggcuccaacaucugccucacccggacggaccgcgggugguacugcgacaacgccggcagcguguccuucuucccgcaggccgagaccugcaagguccagagcaaccggguguucugcgacaccaugaacucccggacccugcccagcgaggugaaccucugcaacaucgacaucuucaaccccaaguacgacugcaagaucaugacguccaagaccgacgucagcuccagcgugaucaccucccugggcgccaucgugagcugcuacgggaagaccaagugcacggcgagcaacaagaaccgcggcaucaucaagaccuucuccaacgggugcgacuacgucagcaacaagggcguggacaccguguccgucggcaacacccuguacugcgugaacaagcaggagggcaagagccucuacgugaagggggagcccaucaucaacuucuacgacccgcuggucuuccccuccgacgaguucgacgccagcaucucccaggugaacgagaagaucaaccagagccuggccuucauccggaaguccgacgagcuccugcacaacgugaacgucggcaagagcaccacgaacaucaugaucaccaccaucaucaucgugaucaucgugauccugcugcuccugaucgccgucgggcuguuccucuacugcaaggcccgcugaggacuaguacuggcugcaucucccuuuccucuguccuccauccuucucccaggauggugaagggggaccugguacccagugauccccaccccaggauccuaaaucaugacuuaccugcuaauaaaaacucauuggaaaagugagaagaucuaaaaaaaaaaaaaaaaaaaaaaaaaaaaaaaaaaaaaaaaaaaaaaaaaaaaaaaaaaaaaaaaugcaucccccccccccccccccccccccccccccccaaaggcucuuuucagagccaccagaauu

SEQ ID NO: 16773 - RNA, 1893 nt, Artificial Sequence
  mRNA product Design f-5 comprising derived and/or modified sequence from HRSV(Memphis-37)__AIY60640.1__F-del_DSCav1_mut4 (opt1)
gggagacuuucccauucuguagcagaauuugguguugccuguggucuuggucccgcggagaagcuuaccauggagcugcccauccucaagaccaacgccaucaccacgauccuggccgcggugacccugugcuucgccagcucccagaacaucaccgaggaguucuaccagagcacgugcuccgccgucagcaagggcuaccucuccgcccugcgcaccgggugguacaccagcgugaucaccaucgagcuguccaacaucaaggagaacaagugcaacggcaccgacgccaaggugaagcucaucaagcaggagcuggacaaguacaagaacgcggucacggagcugcagcuccugaugcagagcaccccggccgccggguccggcagcgccaucugcuccgggaucgcggugugcaaggugcugcaccucgagggcgaggucaacaagaucaagaacgcccugcugagcaccaacaaggccguggugucccucagcaacggcgucuccgugcugaccuucaaggugcuggaccucaagaacuacaucgacaagcagcugcugcccauccucaacaagcagagcugcuccaucagcaacaucgagacggucaucgaguuccagcagaagaacaaccggcugcuggagaucacccgcgaguucuccgugaacgccggggugaccacccccgucagcacguacaugcucaccaacagcgagcugcugucccucaucaacgacaugcccaucaccaacgaccagaagaagcugaugagcaacaacgugcagaucgugcggcagcaguccuacagcaucaugugcaucaucaaggaggagguccuggccuacguggugcagcucccgcuguacggcgucaucgacacccccugcuggaagcugcacacgagcccccucugcaccaccaacaccaaggagggguccaacaucugccugacgcgcaccgaccggggcugguacugcgacaacgcgggguccgugagcuucuucccccaggccgagaccugcaaggugcaguccaaccgcgucuucugcgacaccaugaacagccggacgcucccguccgaggugaaccugugcaacaucgacaucuucaaccccaaguacgacugcaagaucaugaccagcaagaccgacgucuccagcuccgugaucaccagccugggcgccaucguguccugcuacggcaagacgaagugcaccgccagcaacaagaaccgggggaucaucaagaccuucuccaacggcugcgacuacgucagcaacaaggggguggacaccgugagcgucggcaacacgcucuacugcgugaacaagcaggagggcaagucccuguacgugaagggggagcccaucaucaacuucuacgacccccuggucuucccgagcgacgaguucgacgccuccaucagccaggugaacgagaagaucaaccagucccucgcguucauccgcaagagcgacgagcugcugcacaacgugaacgucggcaaguccaccaccaacaucaugaucaccaccaucaucaucgugaucaucgugauccuccugcugcucaucgccgucgggcuguuccuguacugcaaggcccggugaggacuaguacuggcugcaucucccuuuccucuguccuccauccuucucccaggauggugaagggggaccugguacccagugauccccaccccaggauccuaaaucaugacuuaccugcuaauaaaaacucauuggaaaagugagaagaucuaaaaaaaaaaaaaaaaaaaaaaaaaaaaaaaaaaaaaaaaaaaaaaaaaaaaaaaaaaaaaaaaugcaucccccccccccccccccccccccccccccccaaaggcucuuuucagagccaccagaauu

SEQ ID NO: 16774 - RNA, 1893 nt, Artificial Sequence
  mRNA product Design f-5 comprising derived and/or modified sequence from HRSV(Memphis-37)__AIY60640.1__F-del_DSCav1_mut4 (opt2)
gggagacuuucccauucuguagcagaauuugguguugccuguggucuuggucccgcggagaagcuuaccauggagcuccccauccucaagaccaacgccaucaccaccauccucgccgccgucacccucugcuucgccuccucccagaacaucaccgaggaguucuaccaguccaccugcuccgccgucuccaagggcuaccucuccgcccuccgcaccggcugguacaccuccgucaucaccaucgagcucuccaacaucaaggagaacaagugcaacggcaccgacgccaaggucaagcucaucaagcaggagcucgacaaguacaagaacgccgucaccgagcuccagcuccucaugcaguccacccccgccgccggcuccggcuccgccaucugcuccggcaucgccgucugcaagguccuccaccucgagggcgaggucaacaagaucaagaacgcccuccucuccaccaacaaggccgucgucucccucuccaacggcgucuccguccucaccuucaagguccucgaccucaagaacuacaucgacaagcagcuccuccccauccucaacaagcaguccugcuccaucuccaacaucgagaccgucaucgaguuccagcagaagaacaaccgccuccucgagaucacccgcgaguucuccgucaacgccggcgucaccacccccgucuccaccuacaugcucaccaacuccgagcuccucucccucaucaacgacaugcccaucaccaacgaccagaagaagcucauguccaacaacguccagaucguccgccagcaguccuacuccaucaugugcaucaucaaggaggagguccucgccuacgucguccagcucccccucuacggcgucaucgacacccccugcuggaagcuccacaccuccccccucugcaccaccaacaccaaggagggcuccaacaucugccucacccgcaccgaccgcggcugguacugcgacaacgccggcuccgucuccuucuucccccaggccgagaccugcaagguccaguccaaccgcgucuucugcgacaccaugaacucccgcacccuccccuccgaggucaaccucugcaacaucgacaucuucaaccccaaguacgacugcaagaucaugaccuccaagaccgacgucuccuccuccgucaucaccucccucggcgccaucgucuccugcuacggcaagaccaagugcaccgccuccaacaagaaccgcggcaucaucaagaccuucuccaacggcugcgacuacgucuccaacaagggcgucgacaccgucuccgucggcaacacccucuacugcgucaacaagcaggagggcaagucccucuacgucaagggcgagcccaucaucaacuucuacgacccccucgucuuccccuccgacgaguucgacgccuccaucucccaggucaacgagaagaucaaccagucccucgccuucauccgcaaguccgacgagcuccuccacaacgucaacgucggcaaguccaccaccaacaucaugaucaccaccaucaucaucgucaucaucgucauccuccuccuccucaucgccgucggccucuuccucuacugcaaggcccgcugaggacuaguacuggcugcaucucccuuuccucuguccuccauccuucucccaggauggugaagggggaccugguacccagugauccccaccccaggauccuaaaucaugacuuaccugcuaauaaaaacucauuggaaaagugagaagaucuaaaaaaaaaaaaaaaaaaaaaaaaaaaaaaaaaaaaaaaaaaaaaaaaaaaaaaaaaaaaaaaaugcaucccccccccccccccccccccccccccccccaaaggcucuuuucagagccaccagaauu

SEQ ID NO: 16775 - RNA, 1893 nt, Artificial Sequence
  mRNA product Design f-5 comprising derived and/or modified sequence from HRSV(Memphis-37)__AIY60640.1__F-del_DSCav1_mut4 (opt3)
gggagacuuucccauucuguagcagaauuugguguugccuguggucuuggucccgcggagaagcuuaccauggagcugcccauccucaagaccaacgccauuacaacuauacuugcugcagugacgcugugcuucgccagcucccagaauaucaccgaagaguuuuaccaaucuacauguucagcggucaguaaaggcuauuugagcgcuuuaagaacugggugguacaccuccguuauuacaaucgaacugucuaacauuaaggagaauaaaugcaacggaaccgacgccaaggugaaacuaaucaagcaggaacucgauaaguauaaaaaugcaguaacugagcugcagcuucugaugcagucgaccccugccgcugguucaggcagcgcaauauguagugggaucgccgugugcaaggucuugcaccucgagggagaagugaacaaaauuaagaaugcucugcuguccacaaacaaagccguugugucucucagcaauggcgucuccguguuaacguucaagguacuggaccuuaagaacuacaucgauaaacaauugcugccaauucuaaauaagcagucauguaguaucagcaacauagagacuguuauugaauuucagcagaaaaauaacaggcuccuggagaucacccgggaguucucugugaaugcgggugucacaacuccgguguccaccuauaugcuuacaaacucagaacuguugagccucauuaacgacaugcccaucaccaaugaucaaaagaaacugaugaguaacaaugugcagaucguccgccagcagucuuacuccauuaugugcauaaucaaggaggaaguuuuagcauaugugguacaacugccucucuacggggugauugacacgccauguuggaaacuucauacuagcccccugugcacaaccaacacuaaggagggaucgaauaucuguuugacacgaaccgaucguggcugguacugcgacaacgccggcucugucuccuuuuucccucaggcugaaacguguaaggugcagucaaauagaguguuuugcgauaccaugaacaguagaacacugccaagcgaggugaaucucugcaacauagacauuuucaaucccaaauaugauuguaagaucaugacuuccaaaaccgacgucucuagcucagugaucacaagucugggggccauuguauccugcuacggaaagacuaaauguaccgcaagcaacaagaauagggguaucauuaagacauuuucuaacggcugcgauuauguuucaaauaaagggguggacaccgucagugugggaaacacucuuuacugugucaacaagcaagagggcaaaagccuguaugugaagggugaaccuauaaucaauuucuacgacccauugguuuuuccguccgaugaguucgacgcuucuauuucgcagguuaacgagaaaaucaaucagagccucgccuuuauccggaaguccgaugaacuguuacacaacguaaaugucgggaagucaacgacaaacauuaugauaaccacuaucauuaucgugauuaucguuauacugcuacuccugaucgcggugggacuuuucuuguauugcaaagcccgcugaggacuaguacuggcugcaucucccuuuccucuguccuccauccuucucccaggauggugaagggggaccugguacccagugauccccaccccaggauccuaaaucaugacuuaccugcuaauaaaaacucauuggaaaagugagaagaucuaaaaaaaaaaaaaaaaaaaaaaaaaaaaaaaaaaaaaaaaaaaaaaaaaaaaaaaaaaaaaaaaugcaucccccccccccccccccccccccccccccccaaaggcucuuuucagagccaccagaauu

SEQ ID NO: 16776 - RNA, 1893 nt, Artificial Sequence
  mRNA product Design f-5 comprising derived and/or modified sequence from HRSV(Memphis-37)__AIY60640.1__F-del_DSCav1_mut4 (opt4)
gggagacuuucccauucuguagcagaauuugguguugccuguggucuuggucccgcggagaagcuuaccauggagcugcccauccugaagaccaacgccaucaccaccauccuggccgccgugacccugugcuucgccagcagccagaacaucaccgaggaguucuaccagagcaccugcagcgccgugagcaagggcuaccugagcgcccugagaaccggcugguacaccagcgugaucaccaucgagcugagcaacaucaaggagaacaagugcaacggcaccgacgccaaggugaagcugaucaagcaggagcuggacaaguacaagaacgccgugaccgagcugcagcugcugaugcagagcacccccgccgccggcagcggcagcgccaucugcagcggcaucgccgugugcaaggugcugcaccuggagggcgaggugaacaagaucaagaacgcccugcugagcaccaacaaggccguggugagccugagcaacggcgugagcgugcugaccuucaaggugcuggaccugaagaacuacaucgacaagcagcugcugcccauccugaacaagcagagcugcagcaucagcaacaucgagaccgugaucgaguuccagcagaagaacaacagacugcuggagaucaccagagaguucagcgugaacgccggcgugaccacccccgugagcaccuacaugcugaccaacagcgagcugcugagccugaucaacgacaugcccaucaccaacgaccagaagaagcugaugagcaacaacgugcagaucgugagacagcagagcuacagcaucaugugcaucaucaaggaggaggugcuggccuacguggugcagcugccccuguacggcgugaucgacacccccugcuggaagcugcacaccagcccccugugcaccaccaacaccaaggagggcagcaacaucugccugaccagaaccgacagaggcugguacugcgacaacgccggcagcgugagcuucuucccccaggccgagaccugcaaggugcagagcaacagaguguucugcgacaccaugaacagcagaacccugcccagcgaggugaaccugugcaacaucgacaucuucaaccccaaguacgacugcaagaucaugaccagcaagaccgacgugagcagcagcgugaucaccagccugggcgccaucgugagcugcuacggcaagaccaagugcaccgccagcaacaagaacagaggcaucaucaagaccuucagcaacggcugcgacuacgugagcaacaagggcguggacaccgugagcgugggcaacacccuguacugcgugaacaagcaggagggcaagagccuguacgugaagggcgagcccaucaucaacuucuacgacccccugguguuccccagcgacgaguucgacgccagcaucagccaggugaacgagaagaucaaccagagccuggccuucaucagaaagagcgacgagcugcugcacaacgugaacgugggcaagagcaccaccaacaucaugaucaccaccaucaucaucgugaucaucgugauccugcugcugcugaucgccgugggccuguuccuguacugcaaggccagaugaggacuaguacuggcugcaucucccuuuccucuguccuccauccuucucccaggauggugaagggggaccugguacccagugauccccaccccaggauccuaaaucaugacuuaccugcuaauaaaaacucauuggaaaagugagaagaucuaaaaaaaaaaaaaaaaaaaaaaaaaaaaaaaaaaaaaaaaaaaaaaaaaaaaaaaaaaaaaaaaugcaucccccccccccccccccccccccccccccccaaaggcucuuuucagagccaccagaauu

SEQ ID NO: 16777 - RNA, 1893 nt, Artificial Sequence
  mRNA product Design f-5 comprising derived and/or modified sequence from HRSV(Memphis-37)__AIY60640.1__F-del_DSCav1_mut4 (opt5)
gggagacuuucccauucuguagcagaauuugguguugccuguggucuuggucccgcggagaagcuuaccauggagcugcccauccucaagaccaacgccauuacaacgauccuggcugccgugacccuuugcuucgcgagcucccagaauauuacagaagaguuuuaccaaucuaccuguagcgcugucuccaaaggcuaucugucugcccucagaacagggugguacaccagcguuaucacaauugaacuguccaacaucaaggagaauaaaugcaacggaaccgacgccaaggugaaacuuaucaagcaggaacuggauaaguauaaaaaugcugugacggagcuccagcugcugaugcagucuaccccugccgcuggcagcggguccgccauuuguagcggaaucgcggucugcaaggugcuccaccuggagggcgaaguuaacaaaauuaagaaugcccuucugucuacaaacaaagcuguggucucccucagcaauggggugucuguucugaccuucaaggugcuugaccugaagaacuacaucgauaaacaacuccugccgauucugaauaagcaguccuguagcaucucuaacauugagacagucaucgaauuucagcagaaaaauaaccggcuccuggagaucacccgcgaguucuccgugaaugccggagugacgacacccgucagcaccuauaugcuuacaaacuccgaacugcucucucugauuaacgacaugccuaucaccaaugaucaaaagaaacuuaugagcaacaauguucagauugugagacagcaguccuacagcaucaugugcauuaucaaggaggaagugcuggcuuaugucgugcaacucccccuguacggcguuaucgacaccccuuguuggaaacugcauacaucuccccucugcacgaccaacacaaaggagggcuccaauauuugucugacccggacagaucgcgggugguacugcgacaacgccggaagcgugagcuuuuucccucaggcggaaaccuguaagguccagucuaauagaguguuuugcgauacgaugaacuccagaacacugccgucugagguuaaucucugcaacaucgacauuuucaaucccaaauaugauuguaagaucaugaccagcaaaaccgacguguccagcucugucauuacaucccugggcgccaucgugagcugcuacgggaagaccaaauguacagcuucuaacaagaaucggggaaucauuaagacguuuuccaacggcugcgauuaugucagcaauaaagggguggacaccguuuccgugggaaacacacuuuacugugucaacaagcaagagggcaaaucucuguaugugaagggcgaaccuaucauuaauuucuacgacccccucguuuuuccuagcgaugaguucgacgccuccaucucucaggugaacgaaaagauuaaucagagccuggcuuuuauccgcaaguccgaugagcugcuccacaacgucaauguggggaaaagcaccacaaacauuaugaucaccacgaucauuaucgugauuaucguuauucugcuucugcucaucgccgucggacuguuccuguauugcaaagccagaugaggacuaguacuggcugcaucucccuuuccucuguccuccauccuucucccaggauggugaagggggaccugguacccagugauccccaccccaggauccuaaaucaugacuuaccugcuaauaaaaacucauuggaaaagugagaagaucuaaaaaaaaaaaaaaaaaaaaaaaaaaaaaaaaaaaaaaaaaaaaaaaaaaaaaaaaaaaaaaaaugcaucccccccccccccccccccccccccccccccaaaggcucuuuucagagccaccagaauu

SEQ ID NO: 16778 - RNA, 1893 nt, Artificial Sequence
  mRNA product Design f-5 comprising derived and/or modified sequence from HRSV(Memphis-37)__AIY60640.1__F-del_DSCav1_mut4 (opt6)
gggagacuuucccauucuguagcagaauuugguguugccuguggucuuggucccgcggagaagcuuaccauggaacuaccaauacucaaaacaaacgcaauaacaacuauacuagccgcaguuacacucugcuucgcuucaucacaaaauaucacagaagaauuuuaccaaucuacauguucagcuguauccaaagguuaccuuucagcacuacgaacaggaugguauaccucaguaaucaccaucgaacucucgaacauaaaagaaaacaaauguaacggaaccgaugcuaaagucaagcucauaaaacaagaacuagacaaauacaaaaacgcaguaaccgaacuacaacuacuuaugcaaucaacaccagcugcaggcucaggcucagcaaucugcucaggcauagcuguaugcaaaguacuacaucuagaaggagaaguaaacaaaauaaaaaacgcauuauuaucaacaaauaaagcaguaguaucacuaucaaauggaguaucaguacucacauucaaaguacuagaucuaaaaaacuacauugacaaacaauuacuaccaauccucaacaaacaaucaugcucaauauccaacauagaaacaguaauagaauuucaacaaaaaaacaaucgacuacuagaaauaacaagagaauuuucagucaaugccggaguuacaacacccguaagcacuuacaugcuaaccaacucagaacuacuaucacuaauaaacgacaugccaauuacaaacgaccaaaaaaaacuaaugucaaauaacguacaaauaguacgucaacaaucauacucaauaaugugcauaauaaaagaagaaguccuagcauacguaguacaauuacccuuauauggcguaauagacacaccaugcuggaaacuacacacauccccacucugcaccaccaacaccaaagaaggcuccaacauaugucuaacccgaaccgacagagguugguauugugauaacgcuggcuccguaucauucuucccacaagcagaaacauguaaaguacaaucaaacagaguauucugcgauacaaugaauagcagaacacuaccaucagaaguaaacuuaugcaacaucgacaucuucaaucccaaauacgacugcaaaauaaugacauccaaaacugacguuucuucaagcguaauaacaucuuuaggagcaauaguauccugcuacggaaaaacuaaaugcacagcauccaauaaaaaccguggaauaauaaaaacauucucaaauggcugcgacuacgucucaaacaaaggcguagacaccguuagugucggaaacacacuauauugcguaaauaaacaagaaggaaaauccuuauacguaaaaggcgaaccaauaauuaacuucuaugacccccucguauuuccauccgaugaauuugacgcaucaaucucgcaaguaaacgaaaaaauaaaccaaagccuagcauucauaagaaaauccgacgaacuacuccacaauguaaauguaggaaaaucaacuaccaacauaaugauuacuacuauaauaauaguaauuauagucaucuuacuacuauuaauagcagucggauuauuccuauacugcaaagcaagauagggacuaguacuggcugcaucucccuuuccucuguccuccauccuucucccaggauggugaagggggaccugguacccagugauccccaccccaggauccuaaaucaugacuuaccugcuaauaaaaacucauuggaaaagugagaagaucuaaaaaaaaaaaaaaaaaaaaaaaaaaaaaaaaaaaaaaaaaaaaaaaaaaaaaaaaaaaaaaaaugcaucccccccccccccccccccccccccccccccaaaggcucuuuucagagccaccagaauu

SEQ ID NO: 16779 - RNA, 1893 nt, Artificial Sequence
  mRNA product Design f-5 comprising derived and/or modified sequence from HRSV(Memphis-37)__AIY60640.1__F-del_DSCav1_mut4 (opt11)
gggagacuuucccauucuguagcagaauuugguguugccuguggucuuggucccgcggagaagcuuaccauggagcuccccauccuaaaaaccaacgccaucaccaccauccucgccgccgucacccuaugcuucgcuucaucacaaaacaucaccgaagaauuuuaccaaucuaccugcuccgccgucuccaaaggauaucucagcgcccuacggaccggcugguacaccuccgucauaaccaucgaacucaguaacaucaaagaaaacaaaugcaacggcaccgacgccaaagucaaacuaaucaaacaagaacuagauaaauacaaaaacgcggucaccgaacuacaacuccuaaugcaaagcacccccgccgccggauccggcuccgccauaugcuccggcauugcugucugcaaaguacuacaccucgagggcgaggucaacaaaaucaaaaacgcacuacucagcacuaauaaagccguaguaucccuaucaaacggugucucagucuuaacauucaaaguacucgaccuaaagaacuacaucgacaaacaacuccuacccauccucaacaagcaguccuguucuaucucaaacaucgaaaccgucaucgaauuucaacaaaagaacaaccgccuccucgaaaucacacgcgaguucuccgucaacgcaggaguaaccacccccgucuccaccuacaugcucacaaacucggaacuccucucacuaaucaacgacaugcccaucaccaacgaccaaaagaaacucaugagcaacaacguucaaaucguccgccaacaaucauacuccaucaugugcauaaucaaagaagaaguccuagcuuacgucguccagcugccccucuacggagucaucgacacgcccugcuggaaacuacacacaagcccccucugcaccaccaacaccaaagaaggcuccaacauaugccucacacggaccgaccgcgguugguacugcgacaacgccggcuccgucuccuucuucccccaagcagaaacuugcaaaguccaauccaaccgcguauucugcgacacaaugaacagcagaacacucccuagcgaagucaaccucugcaacaucgacauauucaaccccaaauacgacugcaaaaucaugacgucaaaaaccgacgucuccagcuccguuaucaccucacucggcgccaucgucagcugcuacggcaaaacuaaaugcaccgccuccaacaaaaaccgcggcaucauuaaaaccuucagcaacggcugcgacuacgucuccaacaaaggugucgauacgguauccgucggaaacacccuauacugcgucaacaaacaagaaggcaaaucucucuacgucaaaggcgaacccauaaucaauuucuacgacccccuagucuuccccuccgaugaauuugacgccuccaucagccaagucaacgagaaaaucaaccaaucacuagccuucauccggaaauccgacgaacuccuacacaacguaaacgucggcaaauccaccaccaauauaaugaucacaaccaucaucaucguaaucaucgucauccuccuccuacucaucgccgucggauuauucuuauacugcaaagcccgcuaaggacuaguacuggcugcaucucccuuuccucuguccuccauccuucucccaggauggugaagggggaccugguacccagugauccccaccccaggauccuaaaucaugacuuaccugcuaauaaaaacucauuggaaaagugagaagaucuaaaaaaaaaaaaaaaaaaaaaaaaaaaaaaaaaaaaaaaaaaaaaaaaaaaaaaaaaaaaaaaaugcaucccccccccccccccccccccccccccccccaaaggcucuuuucagagccaccagaauu

SEQ ID NO: 16780 - RNA, 1889 nt, Artificial Sequence
  mRNA product Design g-1 comprising derived and/or modified sequence from HRSV(Memphis-37)__AIY60640.1__F-del_DSCav1_mut4 (opt1)
gggagacuuucccauucuguagcagaauuugguguugccuguggucuuggucccgcggagaagcuuaccauggagcugcccauccucaagaccaacgccaucaccacgauccuggccgcggugacccugugcuucgccagcucccagaacaucaccgaggaguucuaccagagcacgugcuccgccgucagcaagggcuaccucuccgcccugcgcaccgggugguacaccagcgugaucaccaucgagcuguccaacaucaaggagaacaagugcaacggcaccgacgccaaggugaagcucaucaagcaggagcuggacaaguacaagaacgcggucacggagcugcagcuccugaugcagagcaccccggccgccggcuccgggagcgcgaucugcuccggcaucgccgucugcaaggugcugcaccucgagggcgaggugaacaagaucaagaacgcccugcuguccaccaacaaggccgucgugagccucuccaacggggugagcguccugaccuucaaggugcuggaccucaagaacuacaucgacaagcagcugcugcccauccugaacaagcagagcugcuccaucagcaacaucgagaccgucaucgaguuccagcagaagaacaaccgccuccuggagaucacgcgggaguucagcgugaacgcgggcgugaccacccccgucuccaccuacaugcugacgaacagcgagcuccugucccugaucaacgacaugccgaucaccaacgaccagaagaagcucaugagcaacaacgugcagaucgugcgccagcaguccuacagcaucaugugcaucaucaaggaggagguccuggccuacguggugcagcugccccucuacggggucaucgacacccccugcuggaagcugcacaccagcccccugugcacgaccaacaccaaggagggcuccaacaucugccucacccggacggaccgcgggugguacugcgacaacgccggcagcguguccuucuucccgcaggccgagaccugcaagguccagagcaaccggguguucugcgacaccaugaacucccggacccugcccagcgaggugaaccucugcaacaucgacaucuucaaccccaaguacgacugcaagaucaugacguccaagaccgacgucagcuccagcgugaucaccucccugggcgccaucgugagcugcuacgggaagaccaagugcacggcgagcaacaagaaccgcggcaucaucaagaccuucuccaacgggugcgacuacgucagcaacaagggcguggacaccguguccgucggcaacacccuguacugcgugaacaagcaggagggcaagagccucuacgugaagggggagcccaucaucaacuucuacgacccgcuggucuuccccuccgacgaguucgacgccagcaucucccaggugaacgagaagaucaaccagagccuggccuucauccggaaguccgacgagcuccugcacaacgugaacgucggcaagagcaccacgaacaucaugaucaccaccaucaucaucgugaucaucgugauccugcugcuccugaucgccgucgggcuguuccucuacugcaaggcccgcugaggacuaguggaagcauuuuccuggcugauuaaaagaaauuacucagcuauggucaucuguuccuguuagaaggcuaugcagcauauuauauacuaugcgcauguuaugaaaugcauaauaaaaaauuuuaaaaaaucuaaaagaucuaaaaaaaaaaaaaaaaaaaaaaaaaaaaaaaaaaaaaaaaaaaaaaaaaaaaaaaaaaaaaaaaugcaucccccccccccccccccccccccccccccccaaaggcucuuuucagagccaccagaauu

SEQ ID NO: 16781 - RNA, 1889 nt, Artificial Sequence
  mRNA product Design g-1 comprising derived and/or modified sequence from HRSV(Memphis-37)__AIY60640.1__F-del_DSCav1_mut4 (opt1)
gggagacuuucccauucuguagcagaauuugguguugccuguggucuuggucccgcggagaagcuuaccauggagcugcccauccucaagaccaacgccaucaccacgauccuggccgcggugacccugugcuucgccagcucccagaacaucaccgaggaguucuaccagagcacgugcuccgccgucagcaagggcuaccucuccgcccugcgcaccgggugguacaccagcgugaucaccaucgagcuguccaacaucaaggagaacaagugcaacggcaccgacgccaaggugaagcucaucaagcaggagcuggacaaguacaagaacgcggucacggagcugcagcuccugaugcagagcaccccggccgccggguccggcagcgccaucugcuccgggaucgcggugugcaaggugcugcaccucgagggcgaggucaacaagaucaagaacgcccugcugagcaccaacaaggccguggugucccucagcaacggcgucuccgugcugaccuucaaggugcuggaccucaagaacuacaucgacaagcagcugcugcccauccucaacaagcagagcugcuccaucagcaacaucgagacggucaucgaguuccagcagaagaacaaccggcugcuggagaucacccgcgaguucuccgugaacgccggggugaccacccccgucagcacguacaugcucaccaacagcgagcugcugucccucaucaacgacaugcccaucaccaacgaccagaagaagcugaugagcaacaacgugcagaucgugcggcagcaguccuacagcaucaugugcaucaucaaggaggagguccuggccuacguggugcagcucccgcuguacggcgucaucgacacccccugcuggaagcugcacacgagcccccucugcaccaccaacaccaaggagggguccaacaucugccugacgcgcaccgaccggggcugguacugcgacaacgcgggguccgugagcuucuucccccaggccgagaccugcaaggugcaguccaaccgcgucuucugcgacaccaugaacagccggacgcucccguccgaggugaaccugugcaacaucgacaucuucaaccccaaguacgacugcaagaucaugaccagcaagaccgacgucuccagcuccgugaucaccagccugggcgccaucguguccugcuacggcaagacgaagugcaccgccagcaacaagaaccgggggaucaucaagaccuucuccaacggcugcgacuacgucagcaacaaggggguggacaccgugagcgucggcaacacgcucuacugcgugaacaagcaggagggcaagucccuguacgugaagggggagcccaucaucaacuucuacgacccccuggucuucccgagcgacgaguucgacgccuccaucagccaggugaacgagaagaucaaccagucccucgcguucauccgcaagagcgacgagcugcugcacaacgugaacgucggcaaguccaccaccaacaucaugaucaccaccaucaucaucgugaucaucgugauccuccugcugcucaucgccgucgggcuguuccuguacugcaaggcccggugaggacuaguggaagcauuuuccuggcugauuaaaagaaauuacucagcuauggucaucuguuccuguuagaaggcuaugcagcauauuauauacuaugcgcauguuaugaaaugcauaauaaaaaauuuuaaaaaaucuaaaagaucuaaaaaaaaaaaaaaaaaaaaaaaaaaaaaaaaaaaaaaaaaaaaaaaaaaaaaaaaaaaaaaaaugcaucccccccccccccccccccccccccccccccaaaggcucuuuucagagccaccagaauu

SEQ ID NO: 16782 - RNA, 1889 nt, Artificial Sequence
  mRNA product Design g-1 comprising derived and/or modified sequence from HRSV(Memphis-37)__AIY60640.1__F-del_DSCav1_mut4 (opt2)
gggagacuuucccauucuguagcagaauuugguguugccuguggucuuggucccgcggagaagcuuaccauggagcuccccauccucaagaccaacgccaucaccaccauccucgccgccgucacccucugcuucgccuccucccagaacaucaccgaggaguucuaccaguccaccugcuccgccgucuccaagggcuaccucuccgcccuccgcaccggcugguacaccuccgucaucaccaucgagcucuccaacaucaaggagaacaagugcaacggcaccgacgccaaggucaagcucaucaagcaggagcucgacaaguacaagaacgccgucaccgagcuccagcuccucaugcaguccacccccgccgccggcuccggcuccgccaucugcuccggcaucgccgucugcaagguccuccaccucgagggcgaggucaacaagaucaagaacgcccuccucuccaccaacaaggccgucgucucccucuccaacggcgucuccguccucaccuucaagguccucgaccucaagaacuacaucgacaagcagcuccuccccauccucaacaagcaguccugcuccaucuccaacaucgagaccgucaucgaguuccagcagaagaacaaccgccuccucgagaucacccgcgaguucuccgucaacgccggcgucaccacccccgucuccaccuacaugcucaccaacuccgagcuccucucccucaucaacgacaugcccaucaccaacgaccagaagaagcucauguccaacaacguccagaucguccgccagcaguccuacuccaucaugugcaucaucaaggaggagguccucgccuacgucguccagcucccccucuacggcgucaucgacacccccugcuggaagcuccacaccuccccccucugcaccaccaacaccaaggagggcuccaacaucugccucacccgcaccgaccgcggcugguacugcgacaacgccggcuccgucuccuucuucccccaggccgagaccugcaagguccaguccaaccgcgucuucugcgacaccaugaacucccgcacccuccccuccgaggucaaccucugcaacaucgacaucuucaaccccaaguacgacugcaagaucaugaccuccaagaccgacgucuccuccuccgucaucaccucccucggcgccaucgucuccugcuacggcaagaccaagugcaccgccuccaacaagaaccgcggcaucaucaagaccuucuccaacggcugcgacuacgucuccaacaagggcgucgacaccgucuccgucggcaacacccucuacugcgucaacaagcaggagggcaagucccucuacgucaagggcgagcccaucaucaacuucuacgacccccucgucuuccccuccgacgaguucgacgccuccaucucccaggucaacgagaagaucaaccagucccucgccuucauccgcaaguccgacgagcuccuccacaacgucaacgucggcaaguccaccaccaacaucaugaucaccaccaucaucaucgucaucaucgucauccuccuccuccucaucgccgucggccucuuccucuacugcaaggcccgcugaggacuaguggaagcauuuuccuggcugauuaaaagaaauuacucagcuauggucaucuguuccuguuagaaggcuaugcagcauauuauauacuaugcgcauguuaugaaaugcauaauaaaaaauuuuaaaaaaucuaaaagaucuaaaaaaaaaaaaaaaaaaaaaaaaaaaaaaaaaaaaaaaaaaaaaaaaaaaaaaaaaaaaaaaaugcaucccccccccccccccccccccccccccccccaaaggcucuuuucagagccaccagaauu

SEQ ID NO: 16783 - RNA, 1889 nt, Artificial Sequence
  mRNA product Design g-1 comprising derived and/or modified sequence from HRSV(Memphis-37)__AIY60640.1__F-del_DSCav1_mut4 (opt3)
gggagacuuucccauucuguagcagaauuugguguugccuguggucuuggucccgcggagaagcuuaccauggagcugcccauccucaagaccaacgccauuacaacuauacuugcugcagugacgcugugcuucgccagcucccagaauaucaccgaagaguuuuaccaaucuacauguucagcggucaguaaaggcuauuugagcgcuuuaagaacugggugguacaccuccguuauuacaaucgaacugucuaacauuaaggagaauaaaugcaacggaaccgacgccaaggugaaacuaaucaagcaggaacucgauaaguauaaaaaugcaguaacugagcugcagcuucugaugcagucgaccccugccgcugguucaggcagcgcaauauguagugggaucgccgugugcaaggucuugcaccucgagggagaagugaacaaaauuaagaaugcucugcuguccacaaacaaagccguugugucucucagcaauggcgucuccguguuaacguucaagguacuggaccuuaagaacuacaucgauaaacaauugcugccaauucuaaauaagcagucauguaguaucagcaacauagagacuguuauugaauuucagcagaaaaauaacaggcuccuggagaucacccgggaguucucugugaaugcgggugucacaacuccgguguccaccuauaugcuuacaaacucagaacuguugagccucauuaacgacaugcccaucaccaaugaucaaaagaaacugaugaguaacaaugugcagaucguccgccagcagucuuacuccauuaugugcauaaucaaggaggaaguuuuagcauaugugguacaacugccucucuacggggugauugacacgccauguuggaaacuucauacuagcccccugugcacaaccaacacuaaggagggaucgaauaucuguuugacacgaaccgaucguggcugguacugcgacaacgccggcucugucuccuuuuucccucaggcugaaacguguaaggugcagucaaauagaguguuuugcgauaccaugaacaguagaacacugccaagcgaggugaaucucugcaacauagacauuuucaaucccaaauaugauuguaagaucaugacuuccaaaaccgacgucucuagcucagugaucacaagucugggggccauuguauccugcuacggaaagacuaaauguaccgcaagcaacaagaauagggguaucauuaagacauuuucuaacggcugcgauuauguuucaaauaaagggguggacaccgucagugugggaaacacucuuuacugugucaacaagcaagagggcaaaagccuguaugugaagggugaaccuauaaucaauuucuacgacccauugguuuuuccguccgaugaguucgacgcuucuauuucgcagguuaacgagaaaaucaaucagagccucgccuuuauccggaaguccgaugaacuguuacacaacguaaaugucgggaagucaacgacaaacauuaugauaaccacuaucauuaucgugauuaucguuauacugcuacuccugaucgcggugggacuuuucuuguauugcaaagcccgcugaggacuaguggaagcauuuuccuggcugauuaaaagaaauuacucagcuauggucaucuguuccuguuagaaggcuaugcagcauauuauauacuaugcgcauguuaugaaaugcauaauaaaaaauuuuaaaaaaucuaaaagaucuaaaaaaaaaaaaaaaaaaaaaaaaaaaaaaaaaaaaaaaaaaaaaaaaaaaaaaaaaaaaaaaaugcaucccccccccccccccccccccccccccccccaaaggcucuuuucagagccaccagaauu

SEQ ID NO: 16784 - RNA, 1889 nt, Artificial Sequence
  mRNA product Design g-1 comprising derived and/or modified sequence from HRSV(Memphis-37)__AIY60640.1__F-del_DSCav1_mut4 (opt4)
gggagacuuucccauucuguagcagaauuugguguugccuguggucuuggucccgcggagaagcuuaccauggagcugcccauccugaagaccaacgccaucaccaccauccuggccgccgugacccugugcuucgccagcagccagaacaucaccgaggaguucuaccagagcaccugcagcgccgugagcaagggcuaccugagcgcccugagaaccggcugguacaccagcgugaucaccaucgagcugagcaacaucaaggagaacaagugcaacggcaccgacgccaaggugaagcugaucaagcaggagcuggacaaguacaagaacgccgugaccgagcugcagcugcugaugcagagcacccccgccgccggcagcggcagcgccaucugcagcggcaucgccgugugcaaggugcugcaccuggagggcgaggugaacaagaucaagaacgcccugcugagcaccaacaaggccguggugagccugagcaacggcgugagcgugcugaccuucaaggugcuggaccugaagaacuacaucgacaagcagcugcugcccauccugaacaagcagagcugcagcaucagcaacaucgagaccgugaucgaguuccagcagaagaacaacagacugcuggagaucaccagagaguucagcgugaacgccggcgugaccacccccgugagcaccuacaugcugaccaacagcgagcugcugagccugaucaacgacaugcccaucaccaacgaccagaagaagcugaugagcaacaacgugcagaucgugagacagcagagcuacagcaucaugugcaucaucaaggaggaggugcuggccuacguggugcagcugccccuguacggcgugaucgacacccccugcuggaagcugcacaccagcccccugugcaccaccaacaccaaggagggcagcaacaucugccugaccagaaccgacagaggcugguacugcgacaacgccggcagcgugagcuucuucccccaggccgagaccugcaaggugcagagcaacagaguguucugcgacaccaugaacagcagaacccugcccagcgaggugaaccugugcaacaucgacaucuucaaccccaaguacgacugcaagaucaugaccagcaagaccgacgugagcagcagcgugaucaccagccugggcgccaucgugagcugcuacggcaagaccaagugcaccgccagcaacaagaacagaggcaucaucaagaccuucagcaacggcugcgacuacgugagcaacaagggcguggacaccgugagcgugggcaacacccuguacugcgugaacaagcaggagggcaagagccuguacgugaagggcgagcccaucaucaacuucuacgacccccugguguuccccagcgacgaguucgacgccagcaucagccaggugaacgagaagaucaaccagagccuggccuucaucagaaagagcgacgagcugcugcacaacgugaacgugggcaagagcaccaccaacaucaugaucaccaccaucaucaucgugaucaucgugauccugcugcugcugaucgccgugggccuguuccuguacugcaaggccagaugaggacuaguggaagcauuuuccuggcugauuaaaagaaauuacucagcuauggucaucuguuccuguuagaaggcuaugcagcauauuauauacuaugcgcauguuaugaaaugcauaauaaaaaauuuuaaaaaaucuaaaagaucuaaaaaaaaaaaaaaaaaaaaaaaaaaaaaaaaaaaaaaaaaaaaaaaaaaaaaaaaaaaaaaaaugcaucccccccccccccccccccccccccccccccaaaggcucuuuucagagccaccagaauu

SEQ ID NO: 16785 - RNA, 1889 nt, Artificial Sequence
  mRNA product Design g-1 comprising derived and/or modified sequence from HRSV(Memphis-37)__AIY60640.1__F-del_DSCav1_mut4 (opt5)
gggagacuuucccauucuguagcagaauuugguguugccuguggucuuggucccgcggagaagcuuaccauggagcugcccauccucaagaccaacgccauuacaacgauccuggcugccgugacccuuugcuucgcgagcucccagaauauuacagaagaguuuuaccaaucuaccuguagcgcugucuccaaaggcuaucugucugcccucagaacagggugguacaccagcguuaucacaauugaacuguccaacaucaaggagaauaaaugcaacggaaccgacgccaaggugaaacuuaucaagcaggaacuggauaaguauaaaaaugcugugacggagcuccagcugcugaugcagucuaccccugccgcuggcagcggguccgccauuuguagcggaaucgcggucugcaaggugcuccaccuggagggcgaaguuaacaaaauuaagaaugcccuucugucuacaaacaaagcuguggucucccucagcaauggggugucuguucugaccuucaaggugcuugaccugaagaacuacaucgauaaacaacuccugccgauucugaauaagcaguccuguagcaucucuaacauugagacagucaucgaauuucagcagaaaaauaaccggcuccuggagaucacccgcgaguucuccgugaaugccggagugacgacacccgucagcaccuauaugcuuacaaacuccgaacugcucucucugauuaacgacaugccuaucaccaaugaucaaaagaaacuuaugagcaacaauguucagauugugagacagcaguccuacagcaucaugugcauuaucaaggaggaagugcuggcuuaugucgugcaacucccccuguacggcguuaucgacaccccuuguuggaaacugcauacaucuccccucugcacgaccaacacaaaggagggcuccaauauuugucugacccggacagaucgcgggugguacugcgacaacgccggaagcgugagcuuuuucccucaggcggaaaccuguaagguccagucuaauagaguguuuugcgauacgaugaacuccagaacacugccgucugagguuaaucucugcaacaucgacauuuucaaucccaaauaugauuguaagaucaugaccagcaaaaccgacguguccagcucugucauuacaucccugggcgccaucgugagcugcuacgggaagaccaaauguacagcuucuaacaagaaucggggaaucauuaagacguuuuccaacggcugcgauuaugucagcaauaaagggguggacaccguuuccgugggaaacacacuuuacugugucaacaagcaagagggcaaaucucuguaugugaagggcgaaccuaucauuaauuucuacgacccccucguuuuuccuagcgaugaguucgacgccuccaucucucaggugaacgaaaagauuaaucagagccuggcuuuuauccgcaaguccgaugagcugcuccacaacgucaauguggggaaaagcaccacaaacauuaugaucaccacgaucauuaucgugauuaucguuauucugcuucugcucaucgccgucggacuguuccuguauugcaaagccagaugaggacuaguggaagcauuuuccuggcugauuaaaagaaauuacucagcuauggucaucuguuccuguuagaaggcuaugcagcauauuauauacuaugcgcauguuaugaaaugcauaauaaaaaauuuuaaaaaaucuaaaagaucuaaaaaaaaaaaaaaaaaaaaaaaaaaaaaaaaaaaaaaaaaaaaaaaaaaaaaaaaaaaaaaaaugcaucccccccccccccccccccccccccccccccaaaggcucuuuucagagccaccagaauu

SEQ ID NO: 16786 - RNA, 1889 nt, Artificial Sequence
  mRNA product Design g-1 comprising derived and/or modified sequence from HRSV(Memphis-37)__AIY60640.1__F-del_DSCav1_mut4 (opt6)
gggagacuuucccauucuguagcagaauuugguguugccuguggucuuggucccgcggagaagcuuaccauggaacuaccaauacucaaaacaaacgcaauaacaacuauacuagccgcaguuacacucugcuucgcuucaucacaaaauaucacagaagaauuuuaccaaucuacauguucagcuguauccaaagguuaccuuucagcacuacgaacaggaugguauaccucaguaaucaccaucgaacucucgaacauaaaagaaaacaaauguaacggaaccgaugcuaaagucaagcucauaaaacaagaacuagacaaauacaaaaacgcaguaaccgaacuacaacuacuuaugcaaucaacaccagcugcaggcucaggcucagcaaucugcucaggcauagcuguaugcaaaguacuacaucuagaaggagaaguaaacaaaauaaaaaacgcauuauuaucaacaaauaaagcaguaguaucacuaucaaauggaguaucaguacucacauucaaaguacuagaucuaaaaaacuacauugacaaacaauuacuaccaauccucaacaaacaaucaugcucaauauccaacauagaaacaguaauagaauuucaacaaaaaaacaaucgacuacuagaaauaacaagagaauuuucagucaaugccggaguuacaacacccguaagcacuuacaugcuaaccaacucagaacuacuaucacuaauaaacgacaugccaauuacaaacgaccaaaaaaaacuaaugucaaauaacguacaaauaguacgucaacaaucauacucaauaaugugcauaauaaaagaagaaguccuagcauacguaguacaauuacccuuauauggcguaauagacacaccaugcuggaaacuacacacauccccacucugcaccaccaacaccaaagaaggcuccaacauaugucuaacccgaaccgacagagguugguauugugauaacgcuggcuccguaucauucuucccacaagcagaaacauguaaaguacaaucaaacagaguauucugcgauacaaugaauagcagaacacuaccaucagaaguaaacuuaugcaacaucgacaucuucaaucccaaauacgacugcaaaauaaugacauccaaaacugacguuucuucaagcguaauaacaucuuuaggagcaauaguauccugcuacggaaaaacuaaaugcacagcauccaauaaaaaccguggaauaauaaaaacauucucaaauggcugcgacuacgucucaaacaaaggcguagacaccguuagugucggaaacacacuauauugcguaaauaaacaagaaggaaaauccuuauacguaaaaggcgaaccaauaauuaacuucuaugacccccucguauuuccauccgaugaauuugacgcaucaaucucgcaaguaaacgaaaaaauaaaccaaagccuagcauucauaagaaaauccgacgaacuacuccacaauguaaauguaggaaaaucaacuaccaacauaaugauuacuacuauaauaauaguaauuauagucaucuuacuacuauuaauagcagucggauuauuccuauacugcaaagcaagauagggacuaguggaagcauuuuccuggcugauuaaaagaaauuacucagcuauggucaucuguuccuguuagaaggcuaugcagcauauuauauacuaugcgcauguuaugaaaugcauaauaaaaaauuuuaaaaaaucuaaaagaucuaaaaaaaaaaaaaaaaaaaaaaaaaaaaaaaaaaaaaaaaaaaaaaaaaaaaaaaaaaaaaaaaugcaucccccccccccccccccccccccccccccccaaaggcucuuuucagagccaccagaauu

SEQ ID NO: 16787 - RNA, 1889 nt, Artificial Sequence
  mRNA product Design g-1 comprising derived and/or modified sequence from HRSV(Memphis-37)__AIY60640.1__F-del_DSCav1_mut4 (opt11)
gggagacuuucccauucuguagcagaauuugguguugccuguggucuuggucccgcggagaagcuuaccauggagcuccccauccuaaaaaccaacgccaucaccaccauccucgccgccgucacccuaugcuucgcuucaucacaaaacaucaccgaagaauuuuaccaaucuaccugcuccgccgucuccaaaggauaucucagcgcccuacggaccggcugguacaccuccgucauaaccaucgaacucaguaacaucaaagaaaacaaaugcaacggcaccgacgccaaagucaaacuaaucaaacaagaacuagauaaauacaaaaacgcggucaccgaacuacaacuccuaaugcaaagcacccccgccgccggauccggcuccgccauaugcuccggcauugcugucugcaaaguacuacaccucgagggcgaggucaacaaaaucaaaaacgcacuacucagcacuaauaaagccguaguaucccuaucaaacggugucucagucuuaacauucaaaguacucgaccuaaagaacuacaucgacaaacaacuccuacccauccucaacaagcaguccuguucuaucucaaacaucgaaaccgucaucgaauuucaacaaaagaacaaccgccuccucgaaaucacacgcgaguucuccgucaacgcaggaguaaccacccccgucuccaccuacaugcucacaaacucggaacuccucucacuaaucaacgacaugcccaucaccaacgaccaaaagaaacucaugagcaacaacguucaaaucguccgccaacaaucauacuccaucaugugcauaaucaaagaagaaguccuagcuuacgucguccagcugccccucuacggagucaucgacacgcccugcuggaaacuacacacaagcccccucugcaccaccaacaccaaagaaggcuccaacauaugccucacacggaccgaccgcgguugguacugcgacaacgccggcuccgucuccuucuucccccaagcagaaacuugcaaaguccaauccaaccgcguauucugcgacacaaugaacagcagaacacucccuagcgaagucaaccucugcaacaucgacauauucaaccccaaauacgacugcaaaaucaugacgucaaaaaccgacgucuccagcuccguuaucaccucacucggcgccaucgucagcugcuacggcaaaacuaaaugcaccgccuccaacaaaaaccgcggcaucauuaaaaccuucagcaacggcugcgacuacgucuccaacaaaggugucgauacgguauccgucggaaacacccuauacugcgucaacaaacaagaaggcaaaucucucuacgucaaaggcgaacccauaaucaauuucuacgacccccuagucuuccccuccgaugaauuugacgccuccaucagccaagucaacgagaaaaucaaccaaucacuagccuucauccggaaauccgacgaacuccuacacaacguaaacgucggcaaauccaccaccaauauaaugaucacaaccaucaucaucguaaucaucgucauccuccuccuacucaucgccgucggauuauucuuauacugcaaagcccgcuaaggacuaguggaagcauuuuccuggcugauuaaaagaaauuacucagcuauggucaucuguuccuguuagaaggcuaugcagcauauuauauacuaugcgcauguuaugaaaugcauaauaaaaaauuuuaaaaaaucuaaaagaucuaaaaaaaaaaaaaaaaaaaaaaaaaaaaaaaaaaaaaaaaaaaaaaaaaaaaaaaaaaaaaaaaugcaucccccccccccccccccccccccccccccccaaaggcucuuuucagagccaccagaauu

SEQ ID NO: 16788 - RNA, 1904 nt, Artificial Sequence
  mRNA product Design g-2 comprising derived and/or modified sequence from HRSV(Memphis-37)__AIY60640.1__F-del_DSCav1_mut4 (opt1)
gggagaguccgcucagccagguugcagaagcggcuuagcguguguccuaaucuucucucugcguguagguaggccugugccgcaaacaagcuuaccauggagcugcccauccucaagaccaacgccaucaccacgauccuggccgcggugacccugugcuucgccagcucccagaacaucaccgaggaguucuaccagagcacgugcuccgccgucagcaagggcuaccucuccgcccugcgcaccgggugguacaccagcgugaucaccaucgagcuguccaacaucaaggagaacaagugcaacggcaccgacgccaaggugaagcucaucaagcaggagcuggacaaguacaagaacgcggucacggagcugcagcuccugaugcagagcaccccggccgccggcuccgggagcgcgaucugcuccggcaucgccgucugcaaggugcugcaccucgagggcgaggugaacaagaucaagaacgcccugcuguccaccaacaaggccgucgugagccucuccaacggggugagcguccugaccuucaaggugcuggaccucaagaacuacaucgacaagcagcugcugcccauccugaacaagcagagcugcuccaucagcaacaucgagaccgucaucgaguuccagcagaagaacaaccgccuccuggagaucacgcgggaguucagcgugaacgcgggcgugaccacccccgucuccaccuacaugcugacgaacagcgagcuccugucccugaucaacgacaugccgaucaccaacgaccagaagaagcucaugagcaacaacgugcagaucgugcgccagcaguccuacagcaucaugugcaucaucaaggaggagguccuggccuacguggugcagcugccccucuacggggucaucgacacccccugcuggaagcugcacaccagcccccugugcacgaccaacaccaaggagggcuccaacaucugccucacccggacggaccgcgggugguacugcgacaacgccggcagcguguccuucuucccgcaggccgagaccugcaagguccagagcaaccggguguucugcgacaccaugaacucccggacccugcccagcgaggugaaccucugcaacaucgacaucuucaaccccaaguacgacugcaagaucaugacguccaagaccgacgucagcuccagcgugaucaccucccugggcgccaucgugagcugcuacgggaagaccaagugcacggcgagcaacaagaaccgcggcaucaucaagaccuucuccaacgggugcgacuacgucagcaacaagggcguggacaccguguccgucggcaacacccuguacugcgugaacaagcaggagggcaagagccucuacgugaagggggagcccaucaucaacuucuacgacccgcuggucuuccccuccgacgaguucgacgccagcaucucccaggugaacgagaagaucaaccagagccuggccuucauccggaaguccgacgagcuccugcacaacgugaacgucggcaagagcaccacgaacaucaugaucaccaccaucaucaucgugaucaucgugauccugcugcuccugaucgccgucgggcuguuccucuacugcaaggcccgcugaggacuaguaauaaggaaacuguaugaaugucugugggcaggaagugaagagauccuucuguaaagguuuuuggaauuaugucugcugaauaauaaacuuuuuugaaauaauaaaucugguagaaaaaugagaucuaaaaaaaaaaaaaaaaaaaaaaaaaaaaaaaaaaaaaaaaaaaaaaaaaaaaaaaaaaaaaaaaugcaucccccccccccccccccccccccccccccccaaaggcucuuuucagagccaccagaauu

SEQ ID NO: 16789 - RNA, 1904 nt, Artificial Sequence
  mRNA product Design g-2 comprising derived and/or modified sequence from HRSV(Memphis-37)__AIY60640.1__F-del_DSCav1_mut4 (opt1)
gggagaguccgcucagccagguugcagaagcggcuuagcguguguccuaaucuucucucugcguguagguaggccugugccgcaaacaagcuuaccauggagcugcccauccucaagaccaacgccaucaccacgauccuggccgcggugacccugugcuucgccagcucccagaacaucaccgaggaguucuaccagagcacgugcuccgccgucagcaagggcuaccucuccgcccugcgcaccgggugguacaccagcgugaucaccaucgagcuguccaacaucaaggagaacaagugcaacggcaccgacgccaaggugaagcucaucaagcaggagcuggacaaguacaagaacgcggucacggagcugcagcuccugaugcagagcaccccggccgccggguccggcagcgccaucugcuccgggaucgcggugugcaaggugcugcaccucgagggcgaggucaacaagaucaagaacgcccugcugagcaccaacaaggccguggugucccucagcaacggcgucuccgugcugaccuucaaggugcuggaccucaagaacuacaucgacaagcagcugcugcccauccucaacaagcagagcugcuccaucagcaacaucgagacggucaucgaguuccagcagaagaacaaccggcugcuggagaucacccgcgaguucuccgugaacgccggggugaccacccccgucagcacguacaugcucaccaacagcgagcugcugucccucaucaacgacaugcccaucaccaacgaccagaagaagcugaugagcaacaacgugcagaucgugcggcagcaguccuacagcaucaugugcaucaucaaggaggagguccuggccuacguggugcagcucccgcuguacggcgucaucgacacccccugcuggaagcugcacacgagcccccucugcaccaccaacaccaaggagggguccaacaucugccugacgcgcaccgaccggggcugguacugcgacaacgcgggguccgugagcuucuucccccaggccgagaccugcaaggugcaguccaaccgcgucuucugcgacaccaugaacagccggacgcucccguccgaggugaaccugugcaacaucgacaucuucaaccccaaguacgacugcaagaucaugaccagcaagaccgacgucuccagcuccgugaucaccagccugggcgccaucguguccugcuacggcaagacgaagugcaccgccagcaacaagaaccgggggaucaucaagaccuucuccaacggcugcgacuacgucagcaacaaggggguggacaccgugagcgucggcaacacgcucuacugcgugaacaagcaggagggcaagucccuguacgugaagggggagcccaucaucaacuucuacgacccccuggucuucccgagcgacgaguucgacgccuccaucagccaggugaacgagaagaucaaccagucccucgcguucauccgcaagagcgacgagcugcugcacaacgugaacgucggcaaguccaccaccaacaucaugaucaccaccaucaucaucgugaucaucgugauccuccugcugcucaucgccgucgggcuguuccuguacugcaaggcccggugaggacuaguaauaaggaaacuguaugaaugucugugggcaggaagugaagagauccuucuguaaagguuuuuggaauuaugucugcugaauaauaaacuuuuuugaaauaauaaaucugguagaaaaaugagaucuaaaaaaaaaaaaaaaaaaaaaaaaaaaaaaaaaaaaaaaaaaaaaaaaaaaaaaaaaaaaaaaaugcaucccccccccccccccccccccccccccccccaaaggcucuuuucagagccaccagaauu

SEQ ID NO: 16790 - RNA, 1904 nt, Artificial Sequence
  mRNA product Design g-2 comprising derived and/or modified sequence from HRSV(Memphis-37)__AIY60640.1__F-del_DSCav1_mut4 (opt2)
gggagaguccgcucagccagguugcagaagcggcuuagcguguguccuaaucuucucucugcguguagguaggccugugccgcaaacaagcuuaccauggagcuccccauccucaagaccaacgccaucaccaccauccucgccgccgucacccucugcuucgccuccucccagaacaucaccgaggaguucuaccaguccaccugcuccgccgucuccaagggcuaccucuccgcccuccgcaccggcugguacaccuccgucaucaccaucgagcucuccaacaucaaggagaacaagugcaacggcaccgacgccaaggucaagcucaucaagcaggagcucgacaaguacaagaacgccgucaccgagcuccagcuccucaugcaguccacccccgccgccggcuccggcuccgccaucugcuccggcaucgccgucugcaagguccuccaccucgagggcgaggucaacaagaucaagaacgcccuccucuccaccaacaaggccgucgucucccucuccaacggcgucuccguccucaccuucaagguccucgaccucaagaacuacaucgacaagcagcuccuccccauccucaacaagcaguccugcuccaucuccaacaucgagaccgucaucgaguuccagcagaagaacaaccgccuccucgagaucacccgcgaguucuccgucaacgccggcgucaccacccccgucuccaccuacaugcucaccaacuccgagcuccucucccucaucaacgacaugcccaucaccaacgaccagaagaagcucauguccaacaacguccagaucguccgccagcaguccuacuccaucaugugcaucaucaaggaggagguccucgccuacgucguccagcucccccucuacggcgucaucgacacccccugcuggaagcuccacaccuccccccucugcaccaccaacaccaaggagggcuccaacaucugccucacccgcaccgaccgcggcugguacugcgacaacgccggcuccgucuccuucuucccccaggccgagaccugcaagguccaguccaaccgcgucuucugcgacaccaugaacucccgcacccuccccuccgaggucaaccucugcaacaucgacaucuucaaccccaaguacgacugcaagaucaugaccuccaagaccgacgucuccuccuccgucaucaccucccucggcgccaucgucuccugcuacggcaagaccaagugcaccgccuccaacaagaaccgcggcaucaucaagaccuucuccaacggcugcgacuacgucuccaacaagggcgucgacaccgucuccgucggcaacacccucuacugcgucaacaagcaggagggcaagucccucuacgucaagggcgagcccaucaucaacuucuacgacccccucgucuuccccuccgacgaguucgacgccuccaucucccaggucaacgagaagaucaaccagucccucgccuucauccgcaaguccgacgagcuccuccacaacgucaacgucggcaaguccaccaccaacaucaugaucaccaccaucaucaucgucaucaucgucauccuccuccuccucaucgccgucggccucuuccucuacugcaaggcccgcugaggacuaguaauaaggaaacuguaugaaugucugugggcaggaagugaagagauccuucuguaaagguuuuuggaauuaugucugcugaauaauaaacuuuuuugaaauaauaaaucugguagaaaaaugagaucuaaaaaaaaaaaaaaaaaaaaaaaaaaaaaaaaaaaaaaaaaaaaaaaaaaaaaaaaaaaaaaaaugcaucccccccccccccccccccccccccccccccaaaggcucuuuucagagccaccagaauu

SEQ ID NO: 16791 - RNA, 1904 nt, Artificial Sequence
  mRNA product Design g-2 comprising derived and/or modified sequence from HRSV(Memphis-37)__AIY60640.1__F-del_DSCav1_mut4 (opt3)
gggagaguccgcucagccagguugcagaagcggcuuagcguguguccuaaucuucucucugcguguagguaggccugugccgcaaacaagcuuaccauggagcugcccauccucaagaccaacgccauuacaacuauacuugcugcagugacgcugugcuucgccagcucccagaauaucaccgaagaguuuuaccaaucuacauguucagcggucaguaaaggcuauuugagcgcuuuaagaacugggugguacaccuccguuauuacaaucgaacugucuaacauuaaggagaauaaaugcaacggaaccgacgccaaggugaaacuaaucaagcaggaacucgauaaguauaaaaaugcaguaacugagcugcagcuucugaugcagucgaccccugccgcugguucaggcagcgcaauauguagugggaucgccgugugcaaggucuugcaccucgagggagaagugaacaaaauuaagaaugcucugcuguccacaaacaaagccguugugucucucagcaauggcgucuccguguuaacguucaagguacuggaccuuaagaacuacaucgauaaacaauugcugccaauucuaaauaagcagucauguaguaucagcaacauagagacuguuauugaauuucagcagaaaaauaacaggcuccuggagaucacccgggaguucucugugaaugcgggugucacaacuccgguguccaccuauaugcuuacaaacucagaacuguugagccucauuaacgacaugcccaucaccaaugaucaaaagaaacugaugaguaacaaugugcagaucguccgccagcagucuuacuccauuaugugcauaaucaaggaggaaguuuuagcauaugugguacaacugccucucuacggggugauugacacgccauguuggaaacuucauacuagcccccugugcacaaccaacacuaaggagggaucgaauaucuguuugacacgaaccgaucguggcugguacugcgacaacgccggcucugucuccuuuuucccucaggcugaaacguguaaggugcagucaaauagaguguuuugcgauaccaugaacaguagaacacugccaagcgaggugaaucucugcaacauagacauuuucaaucccaaauaugauuguaagaucaugacuuccaaaaccgacgucucuagcucagugaucacaagucugggggccauuguauccugcuacggaaagacuaaauguaccgcaagcaacaagaauagggguaucauuaagacauuuucuaacggcugcgauuauguuucaaauaaagggguggacaccgucagugugggaaacacucuuuacugugucaacaagcaagagggcaaaagccuguaugugaagggugaaccuauaaucaauuucuacgacccauugguuuuuccguccgaugaguucgacgcuucuauuucgcagguuaacgagaaaaucaaucagagccucgccuuuauccggaaguccgaugaacuguuacacaacguaaaugucgggaagucaacgacaaacauuaugauaaccacuaucauuaucgugauuaucguuauacugcuacuccugaucgcggugggacuuuucuuguauugcaaagcccgcugaggacuaguaauaaggaaacuguaugaaugucugugggcaggaagugaagagauccuucuguaaagguuuuuggaauuaugucugcugaauaauaaacuuuuuugaaauaauaaaucugguagaaaaaugagaucuaaaaaaaaaaaaaaaaaaaaaaaaaaaaaaaaaaaaaaaaaaaaaaaaaaaaaaaaaaaaaaaaugcaucccccccccccccccccccccccccccccccaaaggcucuuuucagagccaccagaauu

SEQ ID NO: 16792 - RNA, 1904 nt, Artificial Sequence
  mRNA product Design g-2 comprising derived and/or modified sequence from HRSV(Memphis-37)__AIY60640.1__F-del_DSCav1_mut4 (opt4)
gggagaguccgcucagccagguugcagaagcggcuuagcguguguccuaaucuucucucugcguguagguaggccugugccgcaaacaagcuuaccauggagcugcccauccugaagaccaacgccaucaccaccauccuggccgccgugacccugugcuucgccagcagccagaacaucaccgaggaguucuaccagagcaccugcagcgccgugagcaagggcuaccugagcgcccugagaaccggcugguacaccagcgugaucaccaucgagcugagcaacaucaaggagaacaagugcaacggcaccgacgccaaggugaagcugaucaagcaggagcuggacaaguacaagaacgccgugaccgagcugcagcugcugaugcagagcacccccgccgccggcagcggcagcgccaucugcagcggcaucgccgugugcaaggugcugcaccuggagggcgaggugaacaagaucaagaacgcccugcugagcaccaacaaggccguggugagccugagcaacggcgugagcgugcugaccuucaaggugcuggaccugaagaacuacaucgacaagcagcugcugcccauccugaacaagcagagcugcagcaucagcaacaucgagaccgugaucgaguuccagcagaagaacaacagacugcuggagaucaccagagaguucagcgugaacgccggcgugaccacccccgugagcaccuacaugcugaccaacagcgagcugcugagccugaucaacgacaugcccaucaccaacgaccagaagaagcugaugagcaacaacgugcagaucgugagacagcagagcuacagcaucaugugcaucaucaaggaggaggugcuggccuacguggugcagcugccccuguacggcgugaucgacacccccugcuggaagcugcacaccagcccccugugcaccaccaacaccaaggagggcagcaacaucugccugaccagaaccgacagaggcugguacugcgacaacgccggcagcgugagcuucuucccccaggccgagaccugcaaggugcagagcaacagaguguucugcgacaccaugaacagcagaacccugcccagcgaggugaaccugugcaacaucgacaucuucaaccccaaguacgacugcaagaucaugaccagcaagaccgacgugagcagcagcgugaucaccagccugggcgccaucgugagcugcuacggcaagaccaagugcaccgccagcaacaagaacagaggcaucaucaagaccuucagcaacggcugcgacuacgugagcaacaagggcguggacaccgugagcgugggcaacacccuguacugcgugaacaagcaggagggcaagagccuguacgugaagggcgagcccaucaucaacuucuacgacccccugguguuccccagcgacgaguucgacgccagcaucagccaggugaacgagaagaucaaccagagccuggccuucaucagaaagagcgacgagcugcugcacaacgugaacgugggcaagagcaccaccaacaucaugaucaccaccaucaucaucgugaucaucgugauccugcugcugcugaucgccgugggccuguuccuguacugcaaggccagaugaggacuaguaauaaggaaacuguaugaaugucugugggcaggaagugaagagauccuucuguaaagguuuuuggaauuaugucugcugaauaauaaacuuuuuugaaauaauaaaucugguagaaaaaugagaucuaaaaaaaaaaaaaaaaaaaaaaaaaaaaaaaaaaaaaaaaaaaaaaaaaaaaaaaaaaaaaaaaugcaucccccccccccccccccccccccccccccccaaaggcucuuuucagagccaccagaauu

SEQ ID NO: 16793 - RNA, 1904 nt, Artificial Sequence
  mRNA product Design g-2 comprising derived and/or modified sequence from HRSV(Memphis-37)__AIY60640.1__F-del_DSCav1_mut4 (opt5)
gggagaguccgcucagccagguugcagaagcggcuuagcguguguccuaaucuucucucugcguguagguaggccugugccgcaaacaagcuuaccauggagcugcccauccucaagaccaacgccauuacaacgauccuggcugccgugacccuuugcuucgcgagcucccagaauauuacagaagaguuuuaccaaucuaccuguagcgcugucuccaaaggcuaucugucugcccucagaacagggugguacaccagcguuaucacaauugaacuguccaacaucaaggagaauaaaugcaacggaaccgacgccaaggugaaacuuaucaagcaggaacuggauaaguauaaaaaugcugugacggagcuccagcugcugaugcagucuaccccugccgcuggcagcggguccgccauuuguagcggaaucgcggucugcaaggugcuccaccuggagggcgaaguuaacaaaauuaagaaugcccuucugucuacaaacaaagcuguggucucccucagcaauggggugucuguucugaccuucaaggugcuugaccugaagaacuacaucgauaaacaacuccugccgauucugaauaagcaguccuguagcaucucuaacauugagacagucaucgaauuucagcagaaaaauaaccggcuccuggagaucacccgcgaguucuccgugaaugccggagugacgacacccgucagcaccuauaugcuuacaaacuccgaacugcucucucugauuaacgacaugccuaucaccaaugaucaaaagaaacuuaugagcaacaauguucagauugugagacagcaguccuacagcaucaugugcauuaucaaggaggaagugcuggcuuaugucgugcaacucccccuguacggcguuaucgacaccccuuguuggaaacugcauacaucuccccucugcacgaccaacacaaaggagggcuccaauauuugucugacccggacagaucgcgggugguacugcgacaacgccggaagcgugagcuuuuucccucaggcggaaaccuguaagguccagucuaauagaguguuuugcgauacgaugaacuccagaacacugccgucugagguuaaucucugcaacaucgacauuuucaaucccaaauaugauuguaagaucaugaccagcaaaaccgacguguccagcucugucauuacaucccugggcgccaucgugagcugcuacgggaagaccaaauguacagcuucuaacaagaaucggggaaucauuaagacguuuuccaacggcugcgauuaugucagcaauaaagggguggacaccguuuccgugggaaacacacuuuacugugucaacaagcaagagggcaaaucucuguaugugaagggcgaaccuaucauuaauuucuacgacccccucguuuuuccuagcgaugaguucgacgccuccaucucucaggugaacgaaaagauuaaucagagccuggcuuuuauccgcaaguccgaugagcugcuccacaacgucaauguggggaaaagcaccacaaacauuaugaucaccacgaucauuaucgugauuaucguuauucugcuucugcucaucgccgucggacuguuccuguauugcaaagccagaugaggacuaguaauaaggaaacuguaugaaugucugugggcaggaagugaagagauccuucuguaaagguuuuuggaauuaugucugcugaauaauaaacuuuuuugaaauaauaaaucugguagaaaaaugagaucuaaaaaaaaaaaaaaaaaaaaaaaaaaaaaaaaaaaaaaaaaaaaaaaaaaaaaaaaaaaaaaaaugcaucccccccccccccccccccccccccccccccaaaggcucuuuucagagccaccagaauu

SEQ ID NO: 16794 - RNA, 1904 nt, Artificial Sequence
  mRNA product Design g-2 comprising derived and/or modified sequence from HRSV(Memphis-37)__AIY60640.1__F-del_DSCav1_mut4 (opt6)
gggagaguccgcucagccagguugcagaagcggcuuagcguguguccuaaucuucucucugcguguagguaggccugugccgcaaacaagcuuaccauggaacuaccaauacucaaaacaaacgcaauaacaacuauacuagccgcaguuacacucugcuucgcuucaucacaaaauaucacagaagaauuuuaccaaucuacauguucagcuguauccaaagguuaccuuucagcacuacgaacaggaugguauaccucaguaaucaccaucgaacucucgaacauaaaagaaaacaaauguaacggaaccgaugcuaaagucaagcucauaaaacaagaacuagacaaauacaaaaacgcaguaaccgaacuacaacuacuuaugcaaucaacaccagcugcaggcucaggcucagcaaucugcucaggcauagcuguaugcaaaguacuacaucuagaaggagaaguaaacaaaauaaaaaacgcauuauuaucaacaaauaaagcaguaguaucacuaucaaauggaguaucaguacucacauucaaaguacuagaucuaaaaaacuacauugacaaacaauuacuaccaauccucaacaaacaaucaugcucaauauccaacauagaaacaguaauagaauuucaacaaaaaaacaaucgacuacuagaaauaacaagagaauuuucagucaaugccggaguuacaacacccguaagcacuuacaugcuaaccaacucagaacuacuaucacuaauaaacgacaugccaauuacaaacgaccaaaaaaaacuaaugucaaauaacguacaaauaguacgucaacaaucauacucaauaaugugcauaauaaaagaagaaguccuagcauacguaguacaauuacccuuauauggcguaauagacacaccaugcuggaaacuacacacauccccacucugcaccaccaacaccaaagaaggcuccaacauaugucuaacccgaaccgacagagguugguauugugauaacgcuggcuccguaucauucuucccacaagcagaaacauguaaaguacaaucaaacagaguauucugcgauacaaugaauagcagaacacuaccaucagaaguaaacuuaugcaacaucgacaucuucaaucccaaauacgacugcaaaauaaugacauccaaaacugacguuucuucaagcguaauaacaucuuuaggagcaauaguauccugcuacggaaaaacuaaaugcacagcauccaauaaaaaccguggaauaauaaaaacauucucaaauggcugcgacuacgucucaaacaaaggcguagacaccguuagugucggaaacacacuauauugcguaaauaaacaagaaggaaaauccuuauacguaaaaggcgaaccaauaauuaacuucuaugacccccucguauuuccauccgaugaauuugacgcaucaaucucgcaaguaaacgaaaaaauaaaccaaagccuagcauucauaagaaaauccgacgaacuacuccacaauguaaauguaggaaaaucaacuaccaacauaaugauuacuacuauaauaauaguaauuauagucaucuuacuacuauuaauagcagucggauuauuccuauacugcaaagcaagauagggacuaguaauaaggaaacuguaugaaugucugugggcaggaagugaagagauccuucuguaaagguuuuuggaauuaugucugcugaauaauaaacuuuuuugaaauaauaaaucugguagaaaaaugagaucuaaaaaaaaaaaaaaaaaaaaaaaaaaaaaaaaaaaaaaaaaaaaaaaaaaaaaaaaaaaaaaaaugcaucccccccccccccccccccccccccccccccaaaggcucuuuucagagccaccagaauu

SEQ ID NO: 16795 - RNA, 1904 nt, Artificial Sequence
  mRNA product Design g-2 comprising derived and/or modified sequence from HRSV(Memphis-37)__AIY60640.1__F-del_DSCav1_mut4 (opt11)
gggagaguccgcucagccagguugcagaagcggcuuagcguguguccuaaucuucucucugcguguagguaggccugugccgcaaacaagcuuaccauggagcuccccauccuaaaaaccaacgccaucaccaccauccucgccgccgucacccuaugcuucgcuucaucacaaaacaucaccgaagaauuuuaccaaucuaccugcuccgccgucuccaaaggauaucucagcgcccuacggaccggcugguacaccuccgucauaaccaucgaacucaguaacaucaaagaaaacaaaugcaacggcaccgacgccaaagucaaacuaaucaaacaagaacuagauaaauacaaaaacgcggucaccgaacuacaacuccuaaugcaaagcacccccgccgccggauccggcuccgccauaugcuccggcauugcugucugcaaaguacuacaccucgagggcgaggucaacaaaaucaaaaacgcacuacucagcacuaauaaagccguaguaucccuaucaaacggugucucagucuuaacauucaaaguacucgaccuaaagaacuacaucgacaaacaacuccuacccauccucaacaagcaguccuguucuaucucaaacaucgaaaccgucaucgaauuucaacaaaagaacaaccgccuccucgaaaucacacgcgaguucuccgucaacgcaggaguaaccacccccgucuccaccuacaugcucacaaacucggaacuccucucacuaaucaacgacaugcccaucaccaacgaccaaaagaaacucaugagcaacaacguucaaaucguccgccaacaaucauacuccaucaugugcauaaucaaagaagaaguccuagcuuacgucguccagcugccccucuacggagucaucgacacgcccugcuggaaacuacacacaagcccccucugcaccaccaacaccaaagaaggcuccaacauaugccucacacggaccgaccgcgguugguacugcgacaacgccggcuccgucuccuucuucccccaagcagaaacuugcaaaguccaauccaaccgcguauucugcgacacaaugaacagcagaacacucccuagcgaagucaaccucugcaacaucgacauauucaaccccaaauacgacugcaaaaucaugacgucaaaaaccgacgucuccagcuccguuaucaccucacucggcgccaucgucagcugcuacggcaaaacuaaaugcaccgccuccaacaaaaaccgcggcaucauuaaaaccuucagcaacggcugcgacuacgucuccaacaaaggugucgauacgguauccgucggaaacacccuauacugcgucaacaaacaagaaggcaaaucucucuacgucaaaggcgaacccauaaucaauuucuacgacccccuagucuuccccuccgaugaauuugacgccuccaucagccaagucaacgagaaaaucaaccaaucacuagccuucauccggaaauccgacgaacuccuacacaacguaaacgucggcaaauccaccaccaauauaaugaucacaaccaucaucaucguaaucaucgucauccuccuccuacucaucgccgucggauuauucuuauacugcaaagcccgcuaaggacuaguaauaaggaaacuguaugaaugucugugggcaggaagugaagagauccuucuguaaagguuuuuggaauuaugucugcugaauaauaaacuuuuuugaaauaauaaaucugguagaaaaaugagaucuaaaaaaaaaaaaaaaaaaaaaaaaaaaaaaaaaaaaaaaaaaaaaaaaaaaaaaaaaaaaaaaaugcaucccccccccccccccccccccccccccccccaaaggcucuuuucagagccaccagaauu

SEQ ID NO: 16796 - RNA, 2136 nt, Artificial Sequence
  mRNA product Design g-3 comprising derived and/or modified sequence from HRSV(Memphis-37)__AIY60640.1__F-del_DSCav1_mut4 (opt1)
gggagaguccgcucagccagguugcagaagcggcuuagcguguguccuaaucuucucucugcguguagguaggccugugccgcaaacaagcuuaccauggagcugcccauccucaagaccaacgccaucaccacgauccuggccgcggugacccugugcuucgccagcucccagaacaucaccgaggaguucuaccagagcacgugcuccgccgucagcaagggcuaccucuccgcccugcgcaccgggugguacaccagcgugaucaccaucgagcuguccaacaucaaggagaacaagugcaacggcaccgacgccaaggugaagcucaucaagcaggagcuggacaaguacaagaacgcggucacggagcugcagcuccugaugcagagcaccccggccgccggcuccgggagcgcgaucugcuccggcaucgccgucugcaaggugcugcaccucgagggcgaggugaacaagaucaagaacgcccugcuguccaccaacaaggccgucgugagccucuccaacggggugagcguccugaccuucaaggugcuggaccucaagaacuacaucgacaagcagcugcugcccauccugaacaagcagagcugcuccaucagcaacaucgagaccgucaucgaguuccagcagaagaacaaccgccuccuggagaucacgcgggaguucagcgugaacgcgggcgugaccacccccgucuccaccuacaugcugacgaacagcgagcuccugucccugaucaacgacaugccgaucaccaacgaccagaagaagcucaugagcaacaacgugcagaucgugcgccagcaguccuacagcaucaugugcaucaucaaggaggagguccuggccuacguggugcagcugccccucuacggggucaucgacacccccugcuggaagcugcacaccagcccccugugcacgaccaacaccaaggagggcuccaacaucugccucacccggacggaccgcgggugguacugcgacaacgccggcagcguguccuucuucccgcaggccgagaccugcaagguccagagcaaccggguguucugcgacaccaugaacucccggacccugcccagcgaggugaaccucugcaacaucgacaucuucaaccccaaguacgacugcaagaucaugacguccaagaccgacgucagcuccagcgugaucaccucccugggcgccaucgugagcugcuacgggaagaccaagugcacggcgagcaacaagaaccgcggcaucaucaagaccuucuccaacgggugcgacuacgucagcaacaagggcguggacaccguguccgucggcaacacccuguacugcgugaacaagcaggagggcaagagccucuacgugaagggggagcccaucaucaacuucuacgacccgcuggucuuccccuccgacgaguucgacgccagcaucucccaggugaacgagaagaucaaccagagccuggccuucauccggaaguccgacgagcuccugcacaacgugaacgucggcaagagcaccacgaacaucaugaucaccaccaucaucaucgugaucaucgugauccugcugcuccugaucgccgucgggcuguuccucuacugcaaggcccgcugaggacuagugaagggaacacccaaauuuaauucagccuuaagcacaauuaauuaagagugaaacguaauuguacaagcaguuggucacccaccauagggcaugaucaacaccgcaaccuuuccuuuuucccccagugauucugaaaaaccccucuucccuucagcuugcuuagauguuccaaauuuaguaagcuuaaggcggccuacagaagaaaaagaaaaaaaaggccacaaaaguucccucucacuuucaguaaauaaaauaaaagcagcaacagaaauaaagaaauaaaugaaauucaaaaugaaauaaauauuguguugugcagcauuaaaaaaucaauaaaaauuaaaaaugagcaagaucuaaaaaaaaaaaaaaaaaaaaaaaaaaaaaaaaaaaaaaaaaaaaaaaaaaaaaaaaaaaaaaaaugcaucccccccccccccccccccccccccccccccaaaggcucuuuucagagccaccagaauu

SEQ ID NO: 16797 - RNA, 2136 nt, Artificial Sequence
  mRNA product Design g-3 comprising derived and/or modified sequence from HRSV(Memphis-37)__AIY60640.1__F-del_DSCav1_mut4 (opt1)
gggagaguccgcucagccagguugcagaagcggcuuagcguguguccuaaucuucucucugcguguagguaggccugugccgcaaacaagcuuaccauggagcugcccauccucaagaccaacgccaucaccacgauccuggccgcggugacccugugcuucgccagcucccagaacaucaccgaggaguucuaccagagcacgugcuccgccgucagcaagggcuaccucuccgcccugcgcaccgggugguacaccagcgugaucaccaucgagcuguccaacaucaaggagaacaagugcaacggcaccgacgccaaggugaagcucaucaagcaggagcuggacaaguacaagaacgcggucacggagcugcagcuccugaugcagagcaccccggccgccggguccggcagcgccaucugcuccgggaucgcggugugcaaggugcugcaccucgagggcgaggucaacaagaucaagaacgcccugcugagcaccaacaaggccguggugucccucagcaacggcgucuccgugcugaccuucaaggugcuggaccucaagaacuacaucgacaagcagcugcugcccauccucaacaagcagagcugcuccaucagcaacaucgagacggucaucgaguuccagcagaagaacaaccggcugcuggagaucacccgcgaguucuccgugaacgccggggugaccacccccgucagcacguacaugcucaccaacagcgagcugcugucccucaucaacgacaugcccaucaccaacgaccagaagaagcugaugagcaacaacgugcagaucgugcggcagcaguccuacagcaucaugugcaucaucaaggaggagguccuggccuacguggugcagcucccgcuguacggcgucaucgacacccccugcuggaagcugcacacgagcccccucugcaccaccaacaccaaggagggguccaacaucugccugacgcgcaccgaccggggcugguacugcgacaacgcgggguccgugagcuucuucccccaggccgagaccugcaaggugcaguccaaccgcgucuucugcgacaccaugaacagccggacgcucccguccgaggugaaccugugcaacaucgacaucuucaaccccaaguacgacugcaagaucaugaccagcaagaccgacgucuccagcuccgugaucaccagccugggcgccaucguguccugcuacggcaagacgaagugcaccgccagcaacaagaaccgggggaucaucaagaccuucuccaacggcugcgacuacgucagcaacaaggggguggacaccgugagcgucggcaacacgcucuacugcgugaacaagcaggagggcaagucccuguacgugaagggggagcccaucaucaacuucuacgacccccuggucuucccgagcgacgaguucgacgccuccaucagccaggugaacgagaagaucaaccagucccucgcguucauccgcaagagcgacgagcugcugcacaacgugaacgucggcaaguccaccaccaacaucaugaucaccaccaucaucaucgugaucaucgugauccuccugcugcucaucgccgucgggcuguuccuguacugcaaggcccggugaggacuagugaagggaacacccaaauuuaauucagccuuaagcacaauuaauuaagagugaaacguaauuguacaagcaguuggucacccaccauagggcaugaucaacaccgcaaccuuuccuuuuucccccagugauucugaaaaaccccucuucccuucagcuugcuuagauguuccaaauuuaguaagcuuaaggcggccuacagaagaaaaagaaaaaaaaggccacaaaaguucccucucacuuucaguaaauaaaauaaaagcagcaacagaaauaaagaaauaaaugaaauucaaaaugaaauaaauauuguguugugcagcauuaaaaaaucaauaaaaauuaaaaaugagcaagaucuaaaaaaaaaaaaaaaaaaaaaaaaaaaaaaaaaaaaaaaaaaaaaaaaaaaaaaaaaaaaaaaaugcaucccccccccccccccccccccccccccccccaaaggcucuuuucagagccaccagaauu

SEQ ID NO: 16798 - RNA, 2136 nt, Artificial Sequence
  mRNA product Design g-3 comprising derived and/or modified sequence from HRSV(Memphis-37)__AIY60640.1__F-del_DSCav1_mut4 (opt2)
gggagaguccgcucagccagguugcagaagcggcuuagcguguguccuaaucuucucucugcguguagguaggccugugccgcaaacaagcuuaccauggagcuccccauccucaagaccaacgccaucaccaccauccucgccgccgucacccucugcuucgccuccucccagaacaucaccgaggaguucuaccaguccaccugcuccgccgucuccaagggcuaccucuccgcccuccgcaccggcugguacaccuccgucaucaccaucgagcucuccaacaucaaggagaacaagugcaacggcaccgacgccaaggucaagcucaucaagcaggagcucgacaaguacaagaacgccgucaccgagcuccagcuccucaugcaguccacccccgccgccggcuccggcuccgccaucugcuccggcaucgccgucugcaagguccuccaccucgagggcgaggucaacaagaucaagaacgcccuccucuccaccaacaaggccgucgucucccucuccaacggcgucuccguccucaccuucaagguccucgaccucaagaacuacaucgacaagcagcuccuccccauccucaacaagcaguccugcuccaucuccaacaucgagaccgucaucgaguuccagcagaagaacaaccgccuccucgagaucacccgcgaguucuccgucaacgccggcgucaccacccccgucuccaccuacaugcucaccaacuccgagcuccucucccucaucaacgacaugcccaucaccaacgaccagaagaagcucauguccaacaacguccagaucguccgccagcaguccuacuccaucaugugcaucaucaaggaggagguccucgccuacgucguccagcucccccucuacggcgucaucgacacccccugcuggaagcuccacaccuccccccucugcaccaccaacaccaaggagggcuccaacaucugccucacccgcaccgaccgcggcugguacugcgacaacgccggcuccgucuccuucuucccccaggccgagaccugcaagguccaguccaaccgcgucuucugcgacaccaugaacucccgcacccuccccuccgaggucaaccucugcaacaucgacaucuucaaccccaaguacgacugcaagaucaugaccuccaagaccgacgucuccuccuccgucaucaccucccucggcgccaucgucuccugcuacggcaagaccaagugcaccgccuccaacaagaaccgcggcaucaucaagaccuucuccaacggcugcgacuacgucuccaacaagggcgucgacaccgucuccgucggcaacacccucuacugcgucaacaagcaggagggcaagucccucuacgucaagggcgagcccaucaucaacuucuacgacccccucgucuuccccuccgacgaguucgacgccuccaucucccaggucaacgagaagaucaaccagucccucgccuucauccgcaaguccgacgagcuccuccacaacgucaacgucggcaaguccaccaccaacaucaugaucaccaccaucaucaucgucaucaucgucauccuccuccuccucaucgccgucggccucuuccucuacugcaaggcccgcugaggacuagugaagggaacacccaaauuuaauucagccuuaagcacaauuaauuaagagugaaacguaauuguacaagcaguuggucacccaccauagggcaugaucaacaccgcaaccuuuccuuuuucccccagugauucugaaaaaccccucuucccuucagcuugcuuagauguuccaaauuuaguaagcuuaaggcggccuacagaagaaaaagaaaaaaaaggccacaaaaguucccucucacuuucaguaaauaaaauaaaagcagcaacagaaauaaagaaauaaaugaaauucaaaaugaaauaaauauuguguugugcagcauuaaaaaaucaauaaaaauuaaaaaugagcaagaucuaaaaaaaaaaaaaaaaaaaaaaaaaaaaaaaaaaaaaaaaaaaaaaaaaaaaaaaaaaaaaaaaugcaucccccccccccccccccccccccccccccccaaaggcucuuuucagagccaccagaauu

SEQ ID NO: 16799 - RNA, 2136 nt, Artificial Sequence
  mRNA product Design g-3 comprising derived and/or modified sequence from HRSV(Memphis-37)__AIY60640.1__F-del_DSCav1_mut4 (opt3)
gggagaguccgcucagccagguugcagaagcggcuuagcguguguccuaaucuucucucugcguguagguaggccugugccgcaaacaagcuuaccauggagcugcccauccucaagaccaacgccauuacaacuauacuugcugcagugacgcugugcuucgccagcucccagaauaucaccgaagaguuuuaccaaucuacauguucagcggucaguaaaggcuauuugagcgcuuuaagaacugggugguacaccuccguuauuacaaucgaacugucuaacauuaaggagaauaaaugcaacggaaccgacgccaaggugaaacuaaucaagcaggaacucgauaaguauaaaaaugcaguaacugagcugcagcuucugaugcagucgaccccugccgcugguucaggcagcgcaauauguagugggaucgccgugugcaaggucuugcaccucgagggagaagugaacaaaauuaagaaugcucugcuguccacaaacaaagccguugugucucucagcaauggcgucuccguguuaacguucaagguacuggaccuuaagaacuacaucgauaaacaauugcugccaauucuaaauaagcagucauguaguaucagcaacauagagacuguuauugaauuucagcagaaaaauaacaggcuccuggagaucacccgggaguucucugugaaugcgggugucacaacuccgguguccaccuauaugcuuacaaacucagaacuguugagccucauuaacgacaugcccaucaccaaugaucaaaagaaacugaugaguaacaaugugcagaucguccgccagcagucuuacuccauuaugugcauaaucaaggaggaaguuuuagcauaugugguacaacugccucucuacggggugauugacacgccauguuggaaacuucauacuagcccccugugcacaaccaacacuaaggagggaucgaauaucuguuugacacgaaccgaucguggcugguacugcgacaacgccggcucugucuccuuuuucccucaggcugaaacguguaaggugcagucaaauagaguguuuugcgauaccaugaacaguagaacacugccaagcgaggugaaucucugcaacauagacauuuucaaucccaaauaugauuguaagaucaugacuuccaaaaccgacgucucuagcucagugaucacaagucugggggccauuguauccugcuacggaaagacuaaauguaccgcaagcaacaagaauagggguaucauuaagacauuuucuaacggcugcgauuauguuucaaauaaagggguggacaccgucagugugggaaacacucuuuacugugucaacaagcaagagggcaaaagccuguaugugaagggugaaccuauaaucaauuucuacgacccauugguuuuuccguccgaugaguucgacgcuucuauuucgcagguuaacgagaaaaucaaucagagccucgccuuuauccggaaguccgaugaacuguuacacaacguaaaugucgggaagucaacgacaaacauuaugauaaccacuaucauuaucgugauuaucguuauacugcuacuccugaucgcggugggacuuuucuuguauugcaaagcccgcugaggacuagugaagggaacacccaaauuuaauucagccuuaagcacaauuaauuaagagugaaacguaauuguacaagcaguuggucacccaccauagggcaugaucaacaccgcaaccuuuccuuuuucccccagugauucugaaaaaccccucuucccuucagcuugcuuagauguuccaaauuuaguaagcuuaaggcggccuacagaagaaaaagaaaaaaaaggccacaaaaguucccucucacuuucaguaaauaaaauaaaagcagcaacagaaauaaagaaauaaaugaaauucaaaaugaaauaaauauuguguugugcagcauuaaaaaaucaauaaaaauuaaaaaugagcaagaucuaaaaaaaaaaaaaaaaaaaaaaaaaaaaaaaaaaaaaaaaaaaaaaaaaaaaaaaaaaaaaaaaugcaucccccccccccccccccccccccccccccccaaaggcucuuuucagagccaccagaauu

SEQ ID NO: 16800 - RNA, 2136 nt, Artificial Sequence
  mRNA product Design g-3 comprising derived and/or modified sequence from HRSV(Memphis-37)__AIY60640.1__F-del_DSCav1_mut4 (opt4)
gggagaguccgcucagccagguugcagaagcggcuuagcguguguccuaaucuucucucugcguguagguaggccugugccgcaaacaagcuuaccauggagcugcccauccugaagaccaacgccaucaccaccauccuggccgccgugacccugugcuucgccagcagccagaacaucaccgaggaguucuaccagagcaccugcagcgccgugagcaagggcuaccugagcgcccugagaaccggcugguacaccagcgugaucaccaucgagcugagcaacaucaaggagaacaagugcaacggcaccgacgccaaggugaagcugaucaagcaggagcuggacaaguacaagaacgccgugaccgagcugcagcugcugaugcagagcacccccgccgccggcagcggcagcgccaucugcagcggcaucgccgugugcaaggugcugcaccuggagggcgaggugaacaagaucaagaacgcccugcugagcaccaacaaggccguggugagccugagcaacggcgugagcgugcugaccuucaaggugcuggaccugaagaacuacaucgacaagcagcugcugcccauccugaacaagcagagcugcagcaucagcaacaucgagaccgugaucgaguuccagcagaagaacaacagacugcuggagaucaccagagaguucagcgugaacgccggcgugaccacccccgugagcaccuacaugcugaccaacagcgagcugcugagccugaucaacgacaugcccaucaccaacgaccagaagaagcugaugagcaacaacgugcagaucgugagacagcagagcuacagcaucaugugcaucaucaaggaggaggugcuggccuacguggugcagcugccccuguacggcgugaucgacacccccugcuggaagcugcacaccagcccccugugcaccaccaacaccaaggagggcagcaacaucugccugaccagaaccgacagaggcugguacugcgacaacgccggcagcgugagcuucuucccccaggccgagaccugcaaggugcagagcaacagaguguucugcgacaccaugaacagcagaacccugcccagcgaggugaaccugugcaacaucgacaucuucaaccccaaguacgacugcaagaucaugaccagcaagaccgacgugagcagcagcgugaucaccagccugggcgccaucgugagcugcuacggcaagaccaagugcaccgccagcaacaagaacagaggcaucaucaagaccuucagcaacggcugcgacuacgugagcaacaagggcguggacaccgugagcgugggcaacacccuguacugcgugaacaagcaggagggcaagagccuguacgugaagggcgagcccaucaucaacuucuacgacccccugguguuccccagcgacgaguucgacgccagcaucagccaggugaacgagaagaucaaccagagccuggccuucaucagaaagagcgacgagcugcugcacaacgugaacgugggcaagagcaccaccaacaucaugaucaccaccaucaucaucgugaucaucgugauccugcugcugcugaucgccgugggccuguuccuguacugcaaggccagaugaggacuagugaagggaacacccaaauuuaauucagccuuaagcacaauuaauuaagagugaaacguaauuguacaagcaguuggucacccaccauagggcaugaucaacaccgcaaccuuuccuuuuucccccagugauucugaaaaaccccucuucccuucagcuugcuuagauguuccaaauuuaguaagcuuaaggcggccuacagaagaaaaagaaaaaaaaggccacaaaaguucccucucacuuucaguaaauaaaauaaaagcagcaacagaaauaaagaaauaaaugaaauucaaaaugaaauaaauauuguguugugcagcauuaaaaaaucaauaaaaauuaaaaaugagcaagaucuaaaaaaaaaaaaaaaaaaaaaaaaaaaaaaaaaaaaaaaaaaaaaaaaaaaaaaaaaaaaaaaaugcaucccccccccccccccccccccccccccccccaaaggcucuuuucagagccaccagaauu

SEQ ID NO: 16801 - RNA, 2136 nt, Artificial Sequence
  mRNA product Design g-3 comprising derived and/or modified sequence from HRSV(Memphis-37)__AIY60640.1__F-del_DSCav1_mut4 (opt5)
gggagaguccgcucagccagguugcagaagcggcuuagcguguguccuaaucuucucucugcguguagguaggccugugccgcaaacaagcuuaccauggagcugcccauccucaagaccaacgccauuacaacgauccuggcugccgugacccuuugcuucgcgagcucccagaauauuacagaagaguuuuaccaaucuaccuguagcgcugucuccaaaggcuaucugucugcccucagaacagggugguacaccagcguuaucacaauugaacuguccaacaucaaggagaauaaaugcaacggaaccgacgccaaggugaaacuuaucaagcaggaacuggauaaguauaaaaaugcugugacggagcuccagcugcugaugcagucuaccccugccgcuggcagcggguccgccauuuguagcggaaucgcggucugcaaggugcuccaccuggagggcgaaguuaacaaaauuaagaaugcccuucugucuacaaacaaagcuguggucucccucagcaauggggugucuguucugaccuucaaggugcuugaccugaagaacuacaucgauaaacaacuccugccgauucugaauaagcaguccuguagcaucucuaacauugagacagucaucgaauuucagcagaaaaauaaccggcuccuggagaucacccgcgaguucuccgugaaugccggagugacgacacccgucagcaccuauaugcuuacaaacuccgaacugcucucucugauuaacgacaugccuaucaccaaugaucaaaagaaacuuaugagcaacaauguucagauugugagacagcaguccuacagcaucaugugcauuaucaaggaggaagugcuggcuuaugucgugcaacucccccuguacggcguuaucgacaccccuuguuggaaacugcauacaucuccccucugcacgaccaacacaaaggagggcuccaauauuugucugacccggacagaucgcgggugguacugcgacaacgccggaagcgugagcuuuuucccucaggcggaaaccuguaagguccagucuaauagaguguuuugcgauacgaugaacuccagaacacugccgucugagguuaaucucugcaacaucgacauuuucaaucccaaauaugauuguaagaucaugaccagcaaaaccgacguguccagcucugucauuacaucccugggcgccaucgugagcugcuacgggaagaccaaauguacagcuucuaacaagaaucggggaaucauuaagacguuuuccaacggcugcgauuaugucagcaauaaagggguggacaccguuuccgugggaaacacacuuuacugugucaacaagcaagagggcaaaucucuguaugugaagggcgaaccuaucauuaauuucuacgacccccucguuuuuccuagcgaugaguucgacgccuccaucucucaggugaacgaaaagauuaaucagagccuggcuuuuauccgcaaguccgaugagcugcuccacaacgucaauguggggaaaagcaccacaaacauuaugaucaccacgaucauuaucgugauuaucguuauucugcuucugcucaucgccgucggacuguuccuguauugcaaagccagaugaggacuagugaagggaacacccaaauuuaauucagccuuaagcacaauuaauuaagagugaaacguaauuguacaagcaguuggucacccaccauagggcaugaucaacaccgcaaccuuuccuuuuucccccagugauucugaaaaaccccucuucccuucagcuugcuuagauguuccaaauuuaguaagcuuaaggcggccuacagaagaaaaagaaaaaaaaggccacaaaaguucccucucacuuucaguaaauaaaauaaaagcagcaacagaaauaaagaaauaaaugaaauucaaaaugaaauaaauauuguguugugcagcauuaaaaaaucaauaaaaauuaaaaaugagcaagaucuaaaaaaaaaaaaaaaaaaaaaaaaaaaaaaaaaaaaaaaaaaaaaaaaaaaaaaaaaaaaaaaaugcaucccccccccccccccccccccccccccccccaaaggcucuuuucagagccaccagaauu

SEQ ID NO: 16802 - RNA, 2136 nt, Artificial Sequence
  mRNA product Design g-3 comprising derived and/or modified sequence from HRSV(Memphis-37)__AIY60640.1__F-del_DSCav1_mut4 (opt6)
gggagaguccgcucagccagguugcagaagcggcuuagcguguguccuaaucuucucucugcguguagguaggccugugccgcaaacaagcuuaccauggaacuaccaauacucaaaacaaacgcaauaacaacuauacuagccgcaguuacacucugcuucgcuucaucacaaaauaucacagaagaauuuuaccaaucuacauguucagcuguauccaaagguuaccuuucagcacuacgaacaggaugguauaccucaguaaucaccaucgaacucucgaacauaaaagaaaacaaauguaacggaaccgaugcuaaagucaagcucauaaaacaagaacuagacaaauacaaaaacgcaguaaccgaacuacaacuacuuaugcaaucaacaccagcugcaggcucaggcucagcaaucugcucaggcauagcuguaugcaaaguacuacaucuagaaggagaaguaaacaaaauaaaaaacgcauuauuaucaacaaauaaagcaguaguaucacuaucaaauggaguaucaguacucacauucaaaguacuagaucuaaaaaacuacauugacaaacaauuacuaccaauccucaacaaacaaucaugcucaauauccaacauagaaacaguaauagaauuucaacaaaaaaacaaucgacuacuagaaauaacaagagaauuuucagucaaugccggaguuacaacacccguaagcacuuacaugcuaaccaacucagaacuacuaucacuaauaaacgacaugccaauuacaaacgaccaaaaaaaacuaaugucaaauaacguacaaauaguacgucaacaaucauacucaauaaugugcauaauaaaagaagaaguccuagcauacguaguacaauuacccuuauauggcguaauagacacaccaugcuggaaacuacacacauccccacucugcaccaccaacaccaaagaaggcuccaacauaugucuaacccgaaccgacagagguugguauugugauaacgcuggcuccguaucauucuucccacaagcagaaacauguaaaguacaaucaaacagaguauucugcgauacaaugaauagcagaacacuaccaucagaaguaaacuuaugcaacaucgacaucuucaaucccaaauacgacugcaaaauaaugacauccaaaacugacguuucuucaagcguaauaacaucuuuaggagcaauaguauccugcuacggaaaaacuaaaugcacagcauccaauaaaaaccguggaauaauaaaaacauucucaaauggcugcgacuacgucucaaacaaaggcguagacaccguuagugucggaaacacacuauauugcguaaauaaacaagaaggaaaauccuuauacguaaaaggcgaaccaauaauuaacuucuaugacccccucguauuuccauccgaugaauuugacgcaucaaucucgcaaguaaacgaaaaaauaaaccaaagccuagcauucauaagaaaauccgacgaacuacuccacaauguaaauguaggaaaaucaacuaccaacauaaugauuacuacuauaauaauaguaauuauagucaucuuacuacuauuaauagcagucggauuauuccuauacugcaaagcaagauagggacuagugaagggaacacccaaauuuaauucagccuuaagcacaauuaauuaagagugaaacguaauuguacaagcaguuggucacccaccauagggcaugaucaacaccgcaaccuuuccuuuuucccccagugauucugaaaaaccccucuucccuucagcuugcuuagauguuccaaauuuaguaagcuuaaggcggccuacagaagaaaaagaaaaaaaaggccacaaaaguucccucucacuuucaguaaauaaaauaaaagcagcaacagaaauaaagaaauaaaugaaauucaaaaugaaauaaauauuguguugugcagcauuaaaaaaucaauaaaaauuaaaaaugagcaagaucuaaaaaaaaaaaaaaaaaaaaaaaaaaaaaaaaaaaaaaaaaaaaaaaaaaaaaaaaaaaaaaaaugcaucccccccccccccccccccccccccccccccaaaggcucuuuucagagccaccagaauu

SEQ ID NO: 16803 - RNA, 2136 nt, Artificial Sequence
  mRNA product Design g-3 comprising derived and/or modified sequence from HRSV(Memphis-37)__AIY60640.1__F-del_DSCav1_mut4 (opt11)
gggagaguccgcucagccagguugcagaagcggcuuagcguguguccuaaucuucucucugcguguagguaggccugugccgcaaacaagcuuaccauggagcuccccauccuaaaaaccaacgccaucaccaccauccucgccgccgucacccuaugcuucgcuucaucacaaaacaucaccgaagaauuuuaccaaucuaccugcuccgccgucuccaaaggauaucucagcgcccuacggaccggcugguacaccuccgucauaaccaucgaacucaguaacaucaaagaaaacaaaugcaacggcaccgacgccaaagucaaacuaaucaaacaagaacuagauaaauacaaaaacgcggucaccgaacuacaacuccuaaugcaaagcacccccgccgccggauccggcuccgccauaugcuccggcauugcugucugcaaaguacuacaccucgagggcgaggucaacaaaaucaaaaacgcacuacucagcacuaauaaagccguaguaucccuaucaaacggugucucagucuuaacauucaaaguacucgaccuaaagaacuacaucgacaaacaacuccuacccauccucaacaagcaguccuguucuaucucaaacaucgaaaccgucaucgaauuucaacaaaagaacaaccgccuccucgaaaucacacgcgaguucuccgucaacgcaggaguaaccacccccgucuccaccuacaugcucacaaacucggaacuccucucacuaaucaacgacaugcccaucaccaacgaccaaaagaaacucaugagcaacaacguucaaaucguccgccaacaaucauacuccaucaugugcauaaucaaagaagaaguccuagcuuacgucguccagcugccccucuacggagucaucgacacgcccugcuggaaacuacacacaagcccccucugcaccaccaacaccaaagaaggcuccaacauaugccucacacggaccgaccgcgguugguacugcgacaacgccggcuccgucuccuucuucccccaagcagaaacuugcaaaguccaauccaaccgcguauucugcgacacaaugaacagcagaacacucccuagcgaagucaaccucugcaacaucgacauauucaaccccaaauacgacugcaaaaucaugacgucaaaaaccgacgucuccagcuccguuaucaccucacucggcgccaucgucagcugcuacggcaaaacuaaaugcaccgccuccaacaaaaaccgcggcaucauuaaaaccuucagcaacggcugcgacuacgucuccaacaaaggugucgauacgguauccgucggaaacacccuauacugcgucaacaaacaagaaggcaaaucucucuacgucaaaggcgaacccauaaucaauuucuacgacccccuagucuuccccuccgaugaauuugacgccuccaucagccaagucaacgagaaaaucaaccaaucacuagccuucauccggaaauccgacgaacuccuacacaacguaaacgucggcaaauccaccaccaauauaaugaucacaaccaucaucaucguaaucaucgucauccuccuccuacucaucgccgucggauuauucuuauacugcaaagcccgcuaaggacuagugaagggaacacccaaauuuaauucagccuuaagcacaauuaauuaagagugaaacguaauuguacaagcaguuggucacccaccauagggcaugaucaacaccgcaaccuuuccuuuuucccccagugauucugaaaaaccccucuucccuucagcuugcuuagauguuccaaauuuaguaagcuuaaggcggccuacagaagaaaaagaaaaaaaaggccacaaaaguucccucucacuuucaguaaauaaaauaaaagcagcaacagaaauaaagaaauaaaugaaauucaaaaugaaauaaauauuguguugugcagcauuaaaaaaucaauaaaaauuaaaaaugagcaagaucuaaaaaaaaaaaaaaaaaaaaaaaaaaaaaaaaaaaaaaaaaaaaaaaaaaaaaaaaaaaaaaaaugcaucccccccccccccccccccccccccccccccaaaggcucuuuucagagccaccagaauu

SEQ ID NO: 16804 - RNA, 1931 nt, Artificial Sequence
  mRNA product Design g-4 comprising derived and/or modified sequence from HRSV(Memphis-37)__AIY60640.1__F-del_DSCav1_mut4 (opt1)
gggagacuccugucgggcggaaguaggaggaguagaguuuaaaaacaguacucuuuuuccgguucgggacguaguugaagcaacgacaagccggauaaccgcucuugagacaggaagcuuaccauggagcugcccauccucaagaccaacgccaucaccacgauccuggccgcggugacccugugcuucgccagcucccagaacaucaccgaggaguucuaccagagcacgugcuccgccgucagcaagggcuaccucuccgcccugcgcaccgggugguacaccagcgugaucaccaucgagcuguccaacaucaaggagaacaagugcaacggcaccgacgccaaggugaagcucaucaagcaggagcuggacaaguacaagaacgcggucacggagcugcagcuccugaugcagagcaccccggccgccggcuccgggagcgcgaucugcuccggcaucgccgucugcaaggugcugcaccucgagggcgaggugaacaagaucaagaacgcccugcuguccaccaacaaggccgucgugagccucuccaacggggugagcguccugaccuucaaggugcuggaccucaagaacuacaucgacaagcagcugcugcccauccugaacaagcagagcugcuccaucagcaacaucgagaccgucaucgaguuccagcagaagaacaaccgccuccuggagaucacgcgggaguucagcgugaacgcgggcgugaccacccccgucuccaccuacaugcugacgaacagcgagcuccugucccugaucaacgacaugccgaucaccaacgaccagaagaagcucaugagcaacaacgugcagaucgugcgccagcaguccuacagcaucaugugcaucaucaaggaggagguccuggccuacguggugcagcugccccucuacggggucaucgacacccccugcuggaagcugcacaccagcccccugugcacgaccaacaccaaggagggcuccaacaucugccucacccggacggaccgcgggugguacugcgacaacgccggcagcguguccuucuucccgcaggccgagaccugcaagguccagagcaaccggguguucugcgacaccaugaacucccggacccugcccagcgaggugaaccucugcaacaucgacaucuucaaccccaaguacgacugcaagaucaugacguccaagaccgacgucagcuccagcgugaucaccucccugggcgccaucgugagcugcuacgggaagaccaagugcacggcgagcaacaagaaccgcggcaucaucaagaccuucuccaacgggugcgacuacgucagcaacaagggcguggacaccguguccgucggcaacacccuguacugcgugaacaagcaggagggcaagagccucuacgugaagggggagcccaucaucaacuucuacgacccgcuggucuuccccuccgacgaguucgacgccagcaucucccaggugaacgagaagaucaaccagagccuggccuucauccggaaguccgacgagcuccugcacaacgugaacgucggcaagagcaccacgaacaucaugaucaccaccaucaucaucgugaucaucgugauccugcugcuccugaucgccgucgggcuguuccucuacugcaaggcccgcugaggacuaguaauaaggaaacuguaugaaugucugugggcaggaagugaagagauccuucuguaaagguuuuuggaauuaugucugcugaauaauaaacuuuuuugaaauaauaaaucugguagaaaaaugagaucuaaaaaaaaaaaaaaaaaaaaaaaaaaaaaaaaaaaaaaaaaaaaaaaaaaaaaaaaaaaaaaaaugcaucccccccccccccccccccccccccccccccaaaggcucuuuucagagccaccagaauu

SEQ ID NO: 16805 - RNA, 1931 nt, Artificial Sequence
  mRNA product Design g-4 comprising derived and/or modified sequence from HRSV(Memphis-37)__AIY60640.1__F-del_DSCav1_mut4 (opt1)
gggagacuccugucgggcggaaguaggaggaguagaguuuaaaaacaguacucuuuuuccgguucgggacguaguugaagcaacgacaagccggauaaccgcucuugagacaggaagcuuaccauggagcugcccauccucaagaccaacgccaucaccacgauccuggccgcggugacccugugcuucgccagcucccagaacaucaccgaggaguucuaccagagcacgugcuccgccgucagcaagggcuaccucuccgcccugcgcaccgggugguacaccagcgugaucaccaucgagcuguccaacaucaaggagaacaagugcaacggcaccgacgccaaggugaagcucaucaagcaggagcuggacaaguacaagaacgcggucacggagcugcagcuccugaugcagagcaccccggccgccggguccggcagcgccaucugcuccgggaucgcggugugcaaggugcugcaccucgagggcgaggucaacaagaucaagaacgcccugcugagcaccaacaaggccguggugucccucagcaacggcgucuccgugcugaccuucaaggugcuggaccucaagaacuacaucgacaagcagcugcugcccauccucaacaagcagagcugcuccaucagcaacaucgagacggucaucgaguuccagcagaagaacaaccggcugcuggagaucacccgcgaguucuccgugaacgccggggugaccacccccgucagcacguacaugcucaccaacagcgagcugcugucccucaucaacgacaugcccaucaccaacgaccagaagaagcugaugagcaacaacgugcagaucgugcggcagcaguccuacagcaucaugugcaucaucaaggaggagguccuggccuacguggugcagcucccgcuguacggcgucaucgacacccccugcuggaagcugcacacgagcccccucugcaccaccaacaccaaggagggguccaacaucugccugacgcgcaccgaccggggcugguacugcgacaacgcgggguccgugagcuucuucccccaggccgagaccugcaaggugcaguccaaccgcgucuucugcgacaccaugaacagccggacgcucccguccgaggugaaccugugcaacaucgacaucuucaaccccaaguacgacugcaagaucaugaccagcaagaccgacgucuccagcuccgugaucaccagccugggcgccaucguguccugcuacggcaagacgaagugcaccgccagcaacaagaaccgggggaucaucaagaccuucuccaacggcugcgacuacgucagcaacaaggggguggacaccgugagcgucggcaacacgcucuacugcgugaacaagcaggagggcaagucccuguacgugaagggggagcccaucaucaacuucuacgacccccuggucuucccgagcgacgaguucgacgccuccaucagccaggugaacgagaagaucaaccagucccucgcguucauccgcaagagcgacgagcugcugcacaacgugaacgucggcaaguccaccaccaacaucaugaucaccaccaucaucaucgugaucaucgugauccuccugcugcucaucgccgucgggcuguuccuguacugcaaggcccggugaggacuaguaauaaggaaacuguaugaaugucugugggcaggaagugaagagauccuucuguaaagguuuuuggaauuaugucugcugaauaauaaacuuuuuugaaauaauaaaucugguagaaaaaugagaucuaaaaaaaaaaaaaaaaaaaaaaaaaaaaaaaaaaaaaaaaaaaaaaaaaaaaaaaaaaaaaaaaugcaucccccccccccccccccccccccccccccccaaaggcucuuuucagagccaccagaauu

SEQ ID NO: 16806 - RNA, 1931 nt, Artificial Sequence
  mRNA product Design g-4 comprising derived and/or modified sequence from HRSV(Memphis-37)__AIY60640.1__F-del_DSCav1_mut4 (opt2)
gggagacuccugucgggcggaaguaggaggaguagaguuuaaaaacaguacucuuuuuccgguucgggacguaguugaagcaacgacaagccggauaaccgcucuugagacaggaagcuuaccauggagcuccccauccucaagaccaacgccaucaccaccauccucgccgccgucacccucugcuucgccuccucccagaacaucaccgaggaguucuaccaguccaccugcuccgccgucuccaagggcuaccucuccgcccuccgcaccggcugguacaccuccgucaucaccaucgagcucuccaacaucaaggagaacaagugcaacggcaccgacgccaaggucaagcucaucaagcaggagcucgacaaguacaagaacgccgucaccgagcuccagcuccucaugcaguccacccccgccgccggcuccggcuccgccaucugcuccggcaucgccgucugcaagguccuccaccucgagggcgaggucaacaagaucaagaacgcccuccucuccaccaacaaggccgucgucucccucuccaacggcgucuccguccucaccuucaagguccucgaccucaagaacuacaucgacaagcagcuccuccccauccucaacaagcaguccugcuccaucuccaacaucgagaccgucaucgaguuccagcagaagaacaaccgccuccucgagaucacccgcgaguucuccgucaacgccggcgucaccacccccgucuccaccuacaugcucaccaacuccgagcuccucucccucaucaacgacaugcccaucaccaacgaccagaagaagcucauguccaacaacguccagaucguccgccagcaguccuacuccaucaugugcaucaucaaggaggagguccucgccuacgucguccagcucccccucuacggcgucaucgacacccccugcuggaagcuccacaccuccccccucugcaccaccaacaccaaggagggcuccaacaucugccucacccgcaccgaccgcggcugguacugcgacaacgccggcuccgucuccuucuucccccaggccgagaccugcaagguccaguccaaccgcgucuucugcgacaccaugaacucccgcacccuccccuccgaggucaaccucugcaacaucgacaucuucaaccccaaguacgacugcaagaucaugaccuccaagaccgacgucuccuccuccgucaucaccucccucggcgccaucgucuccugcuacggcaagaccaagugcaccgccuccaacaagaaccgcggcaucaucaagaccuucuccaacggcugcgacuacgucuccaacaagggcgucgacaccgucuccgucggcaacacccucuacugcgucaacaagcaggagggcaagucccucuacgucaagggcgagcccaucaucaacuucuacgacccccucgucuuccccuccgacgaguucgacgccuccaucucccaggucaacgagaagaucaaccagucccucgccuucauccgcaaguccgacgagcuccuccacaacgucaacgucggcaaguccaccaccaacaucaugaucaccaccaucaucaucgucaucaucgucauccuccuccuccucaucgccgucggccucuuccucuacugcaaggcccgcugaggacuaguaauaaggaaacuguaugaaugucugugggcaggaagugaagagauccuucuguaaagguuuuuggaauuaugucugcugaauaauaaacuuuuuugaaauaauaaaucugguagaaaaaugagaucuaaaaaaaaaaaaaaaaaaaaaaaaaaaaaaaaaaaaaaaaaaaaaaaaaaaaaaaaaaaaaaaaugcaucccccccccccccccccccccccccccccccaaaggcucuuuucagagccaccagaauu

SEQ ID NO: 16807 - RNA, 1931 nt, Artificial Sequence
  mRNA product Design g-4 comprising derived and/or modified sequence from HRSV(Memphis-37)__AIY60640.1__F-del_DSCav1_mut4 (opt3)
gggagacuccugucgggcggaaguaggaggaguagaguuuaaaaacaguacucuuuuuccgguucgggacguaguugaagcaacgacaagccggauaaccgcucuugagacaggaagcuuaccauggagcugcccauccucaagaccaacgccauuacaacuauacuugcugcagugacgcugugcuucgccagcucccagaauaucaccgaagaguuuuaccaaucuacauguucagcggucaguaaaggcuauuugagcgcuuuaagaacugggugguacaccuccguuauuacaaucgaacugucuaacauuaaggagaauaaaugcaacggaaccgacgccaaggugaaacuaaucaagcaggaacucgauaaguauaaaaaugcaguaacugagcugcagcuucugaugcagucgaccccugccgcugguucaggcagcgcaauauguagugggaucgccgugugcaaggucuugcaccucgagggagaagugaacaaaauuaagaaugcucugcuguccacaaacaaagccguugugucucucagcaauggcgucuccguguuaacguucaagguacuggaccuuaagaacuacaucgauaaacaauugcugccaauucuaaauaagcagucauguaguaucagcaacauagagacuguuauugaauuucagcagaaaaauaacaggcuccuggagaucacccgggaguucucugugaaugcgggugucacaacuccgguguccaccuauaugcuuacaaacucagaacuguugagccucauuaacgacaugcccaucaccaaugaucaaaagaaacugaugaguaacaaugugcagaucguccgccagcagucuuacuccauuaugugcauaaucaaggaggaaguuuuagcauaugugguacaacugccucucuacggggugauugacacgccauguuggaaacuucauacuagcccccugugcacaaccaacacuaaggagggaucgaauaucuguuugacacgaaccgaucguggcugguacugcgacaacgccggcucugucuccuuuuucccucaggcugaaacguguaaggugcagucaaauagaguguuuugcgauaccaugaacaguagaacacugccaagcgaggugaaucucugcaacauagacauuuucaaucccaaauaugauuguaagaucaugacuuccaaaaccgacgucucuagcucagugaucacaagucugggggccauuguauccugcuacggaaagacuaaauguaccgcaagcaacaagaauagggguaucauuaagacauuuucuaacggcugcgauuauguuucaaauaaagggguggacaccgucagugugggaaacacucuuuacugugucaacaagcaagagggcaaaagccuguaugugaagggugaaccuauaaucaauuucuacgacccauugguuuuuccguccgaugaguucgacgcuucuauuucgcagguuaacgagaaaaucaaucagagccucgccuuuauccggaaguccgaugaacuguuacacaacguaaaugucgggaagucaacgacaaacauuaugauaaccacuaucauuaucgugauuaucguuauacugcuacuccugaucgcggugggacuuuucuuguauugcaaagcccgcugaggacuaguaauaaggaaacuguaugaaugucugugggcaggaagugaagagauccuucuguaaagguuuuuggaauuaugucugcugaauaauaaacuuuuuugaaauaauaaaucugguagaaaaaugagaucuaaaaaaaaaaaaaaaaaaaaaaaaaaaaaaaaaaaaaaaaaaaaaaaaaaaaaaaaaaaaaaaaugcaucccccccccccccccccccccccccccccccaaaggcucuuuucagagccaccagaauu

SEQ ID NO: 16808 - RNA, 1931 nt, Artificial Sequence
  mRNA product Design g-4 comprising derived and/or modified sequence from HRSV(Memphis-37)__AIY60640.1__F-del_DSCav1_mut4 (opt4)
gggagacuccugucgggcggaaguaggaggaguagaguuuaaaaacaguacucuuuuuccgguucgggacguaguugaagcaacgacaagccggauaaccgcucuugagacaggaagcuuaccauggagcugcccauccugaagaccaacgccaucaccaccauccuggccgccgugacccugugcuucgccagcagccagaacaucaccgaggaguucuaccagagcaccugcagcgccgugagcaagggcuaccugagcgcccugagaaccggcugguacaccagcgugaucaccaucgagcugagcaacaucaaggagaacaagugcaacggcaccgacgccaaggugaagcugaucaagcaggagcuggacaaguacaagaacgccgugaccgagcugcagcugcugaugcagagcacccccgccgccggcagcggcagcgccaucugcagcggcaucgccgugugcaaggugcugcaccuggagggcgaggugaacaagaucaagaacgcccugcugagcaccaacaaggccguggugagccugagcaacggcgugagcgugcugaccuucaaggugcuggaccugaagaacuacaucgacaagcagcugcugcccauccugaacaagcagagcugcagcaucagcaacaucgagaccgugaucgaguuccagcagaagaacaacagacugcuggagaucaccagagaguucagcgugaacgccggcgugaccacccccgugagcaccuacaugcugaccaacagcgagcugcugagccugaucaacgacaugcccaucaccaacgaccagaagaagcugaugagcaacaacgugcagaucgugagacagcagagcuacagcaucaugugcaucaucaaggaggaggugcuggccuacguggugcagcugccccuguacggcgugaucgacacccccugcuggaagcugcacaccagcccccugugcaccaccaacaccaaggagggcagcaacaucugccugaccagaaccgacagaggcugguacugcgacaacgccggcagcgugagcuucuucccccaggccgagaccugcaaggugcagagcaacagaguguucugcgacaccaugaacagcagaacccugcccagcgaggugaaccugugcaacaucgacaucuucaaccccaaguacgacugcaagaucaugaccagcaagaccgacgugagcagcagcgugaucaccagccugggcgccaucgugagcugcuacggcaagaccaagugcaccgccagcaacaagaacagaggcaucaucaagaccuucagcaacggcugcgacuacgugagcaacaagggcguggacaccgugagcgugggcaacacccuguacugcgugaacaagcaggagggcaagagccuguacgugaagggcgagcccaucaucaacuucuacgacccccugguguuccccagcgacgaguucgacgccagcaucagccaggugaacgagaagaucaaccagagccuggccuucaucagaaagagcgacgagcugcugcacaacgugaacgugggcaagagcaccaccaacaucaugaucaccaccaucaucaucgugaucaucgugauccugcugcugcugaucgccgugggccuguuccuguacugcaaggccagaugaggacuaguaauaaggaaacuguaugaaugucugugggcaggaagugaagagauccuucuguaaagguuuuuggaauuaugucugcugaauaauaaacuuuuuugaaauaauaaaucugguagaaaaaugagaucuaaaaaaaaaaaaaaaaaaaaaaaaaaaaaaaaaaaaaaaaaaaaaaaaaaaaaaaaaaaaaaaaugcaucccccccccccccccccccccccccccccccaaaggcucuuuucagagccaccagaauu

SEQ ID NO: 16809 - RNA, 1931 nt, Artificial Sequence
  mRNA product Design g-4 comprising derived and/or modified sequence from HRSV(Memphis-37)__AIY60640.1__F-del_DSCav1_mut4 (opt5)
gggagacuccugucgggcggaaguaggaggaguagaguuuaaaaacaguacucuuuuuccgguucgggacguaguugaagcaacgacaagccggauaaccgcucuugagacaggaagcuuaccauggagcugcccauccucaagaccaacgccauuacaacgauccuggcugccgugacccuuugcuucgcgagcucccagaauauuacagaagaguuuuaccaaucuaccuguagcgcugucuccaaaggcuaucugucugcccucagaacagggugguacaccagcguuaucacaauugaacuguccaacaucaaggagaauaaaugcaacggaaccgacgccaaggugaaacuuaucaagcaggaacuggauaaguauaaaaaugcugugacggagcuccagcugcugaugcagucuaccccugccgcuggcagcggguccgccauuuguagcggaaucgcggucugcaaggugcuccaccuggagggcgaaguuaacaaaauuaagaaugcccuucugucuacaaacaaagcuguggucucccucagcaauggggugucuguucugaccuucaaggugcuugaccugaagaacuacaucgauaaacaacuccugccgauucugaauaagcaguccuguagcaucucuaacauugagacagucaucgaauuucagcagaaaaauaaccggcuccuggagaucacccgcgaguucuccgugaaugccggagugacgacacccgucagcaccuauaugcuuacaaacuccgaacugcucucucugauuaacgacaugccuaucaccaaugaucaaaagaaacuuaugagcaacaauguucagauugugagacagcaguccuacagcaucaugugcauuaucaaggaggaagugcuggcuuaugucgugcaacucccccuguacggcguuaucgacaccccuuguuggaaacugcauacaucuccccucugcacgaccaacacaaaggagggcuccaauauuugucugacccggacagaucgcgggugguacugcgacaacgccggaagcgugagcuuuuucccucaggcggaaaccuguaagguccagucuaauagaguguuuugcgauacgaugaacuccagaacacugccgucugagguuaaucucugcaacaucgacauuuucaaucccaaauaugauuguaagaucaugaccagcaaaaccgacguguccagcucugucauuacaucccugggcgccaucgugagcugcuacgggaagaccaaauguacagcuucuaacaagaaucggggaaucauuaagacguuuuccaacggcugcgauuaugucagcaauaaagggguggacaccguuuccgugggaaacacacuuuacugugucaacaagcaagagggcaaaucucuguaugugaagggcgaaccuaucauuaauuucuacgacccccucguuuuuccuagcgaugaguucgacgccuccaucucucaggugaacgaaaagauuaaucagagccuggcuuuuauccgcaaguccgaugagcugcuccacaacgucaauguggggaaaagcaccacaaacauuaugaucaccacgaucauuaucgugauuaucguuauucugcuucugcucaucgccgucggacuguuccuguauugcaaagccagaugaggacuaguaauaaggaaacuguaugaaugucugugggcaggaagugaagagauccuucuguaaagguuuuuggaauuaugucugcugaauaauaaacuuuuuugaaauaauaaaucugguagaaaaaugagaucuaaaaaaaaaaaaaaaaaaaaaaaaaaaaaaaaaaaaaaaaaaaaaaaaaaaaaaaaaaaaaaaaugcaucccccccccccccccccccccccccccccccaaaggcucuuuucagagccaccagaauu

SEQ ID NO: 16810 - RNA, 1931 nt, Artificial Sequence
  mRNA product Design g-4 comprising derived and/or modified sequence from HRSV(Memphis-37)__AIY60640.1__F-del_DSCav1_mut4 (opt6)
gggagacuccugucgggcggaaguaggaggaguagaguuuaaaaacaguacucuuuuuccgguucgggacguaguugaagcaacgacaagccggauaaccgcucuugagacaggaagcuuaccauggaacuaccaauacucaaaacaaacgcaauaacaacuauacuagccgcaguuacacucugcuucgcuucaucacaaaauaucacagaagaauuuuaccaaucuacauguucagcuguauccaaagguuaccuuucagcacuacgaacaggaugguauaccucaguaaucaccaucgaacucucgaacauaaaagaaaacaaauguaacggaaccgaugcuaaagucaagcucauaaaacaagaacuagacaaauacaaaaacgcaguaaccgaacuacaacuacuuaugcaaucaacaccagcugcaggcucaggcucagcaaucugcucaggcauagcuguaugcaaaguacuacaucuagaaggagaaguaaacaaaauaaaaaacgcauuauuaucaacaaauaaagcaguaguaucacuaucaaauggaguaucaguacucacauucaaaguacuagaucuaaaaaacuacauugacaaacaauuacuaccaauccucaacaaacaaucaugcucaauauccaacauagaaacaguaauagaauuucaacaaaaaaacaaucgacuacuagaaauaacaagagaauuuucagucaaugccggaguuacaacacccguaagcacuuacaugcuaaccaacucagaacuacuaucacuaauaaacgacaugccaauuacaaacgaccaaaaaaaacuaaugucaaauaacguacaaauaguacgucaacaaucauacucaauaaugugcauaauaaaagaagaaguccuagcauacguaguacaauuacccuuauauggcguaauagacacaccaugcuggaaacuacacacauccccacucugcaccaccaacaccaaagaaggcuccaacauaugucuaacccgaaccgacagagguugguauugugauaacgcuggcuccguaucauucuucccacaagcagaaacauguaaaguacaaucaaacagaguauucugcgauacaaugaauagcagaacacuaccaucagaaguaaacuuaugcaacaucgacaucuucaaucccaaauacgacugcaaaauaaugacauccaaaacugacguuucuucaagcguaauaacaucuuuaggagcaauaguauccugcuacggaaaaacuaaaugcacagcauccaauaaaaaccguggaauaauaaaaacauucucaaauggcugcgacuacgucucaaacaaaggcguagacaccguuagugucggaaacacacuauauugcguaaauaaacaagaaggaaaauccuuauacguaaaaggcgaaccaauaauuaacuucuaugacccccucguauuuccauccgaugaauuugacgcaucaaucucgcaaguaaacgaaaaaauaaaccaaagccuagcauucauaagaaaauccgacgaacuacuccacaauguaaauguaggaaaaucaacuaccaacauaaugauuacuacuauaauaauaguaauuauagucaucuuacuacuauuaauagcagucggauuauuccuauacugcaaagcaagauagggacuaguaauaaggaaacuguaugaaugucugugggcaggaagugaagagauccuucuguaaagguuuuuggaauuaugucugcugaauaauaaacuuuuuugaaauaauaaaucugguagaaaaaugagaucuaaaaaaaaaaaaaaaaaaaaaaaaaaaaaaaaaaaaaaaaaaaaaaaaaaaaaaaaaaaaaaaaugcaucccccccccccccccccccccccccccccccaaaggcucuuuucagagccaccagaauu

SEQ ID NO: 16811 - RNA, 1931 nt, Artificial Sequence
  mRNA product Design g-4 comprising derived and/or modified sequence from HRSV(Memphis-37)__AIY60640.1__F-del_DSCav1_mut4 (opt11)
gggagacuccugucgggcggaaguaggaggaguagaguuuaaaaacaguacucuuuuuccgguucgggacguaguugaagcaacgacaagccggauaaccgcucuugagacaggaagcuuaccauggagcuccccauccuaaaaaccaacgccaucaccaccauccucgccgccgucacccuaugcuucgcuucaucacaaaacaucaccgaagaauuuuaccaaucuaccugcuccgccgucuccaaaggauaucucagcgcccuacggaccggcugguacaccuccgucauaaccaucgaacucaguaacaucaaagaaaacaaaugcaacggcaccgacgccaaagucaaacuaaucaaacaagaacuagauaaauacaaaaacgcggucaccgaacuacaacuccuaaugcaaagcacccccgccgccggauccggcuccgccauaugcuccggcauugcugucugcaaaguacuacaccucgagggcgaggucaacaaaaucaaaaacgcacuacucagcacuaauaaagccguaguaucccuaucaaacggugucucagucuuaacauucaaaguacucgaccuaaagaacuacaucgacaaacaacuccuacccauccucaacaagcaguccuguucuaucucaaacaucgaaaccgucaucgaauuucaacaaaagaacaaccgccuccucgaaaucacacgcgaguucuccgucaacgcaggaguaaccacccccgucuccaccuacaugcucacaaacucggaacuccucucacuaaucaacgacaugcccaucaccaacgaccaaaagaaacucaugagcaacaacguucaaaucguccgccaacaaucauacuccaucaugugcauaaucaaagaagaaguccuagcuuacgucguccagcugccccucuacggagucaucgacacgcccugcuggaaacuacacacaagcccccucugcaccaccaacaccaaagaaggcuccaacauaugccucacacggaccgaccgcgguugguacugcgacaacgccggcuccgucuccuucuucccccaagcagaaacuugcaaaguccaauccaaccgcguauucugcgacacaaugaacagcagaacacucccuagcgaagucaaccucugcaacaucgacauauucaaccccaaauacgacugcaaaaucaugacgucaaaaaccgacgucuccagcuccguuaucaccucacucggcgccaucgucagcugcuacggcaaaacuaaaugcaccgccuccaacaaaaaccgcggcaucauuaaaaccuucagcaacggcugcgacuacgucuccaacaaaggugucgauacgguauccgucggaaacacccuauacugcgucaacaaacaagaaggcaaaucucucuacgucaaaggcgaacccauaaucaauuucuacgacccccuagucuuccccuccgaugaauuugacgccuccaucagccaagucaacgagaaaaucaaccaaucacuagccuucauccggaaauccgacgaacuccuacacaacguaaacgucggcaaauccaccaccaauauaaugaucacaaccaucaucaucguaaucaucgucauccuccuccuacucaucgccgucggauuauucuuauacugcaaagcccgcuaaggacuaguaauaaggaaacuguaugaaugucugugggcaggaagugaagagauccuucuguaaagguuuuuggaauuaugucugcugaauaauaaacuuuuuugaaauaauaaaucugguagaaaaaugagaucuaaaaaaaaaaaaaaaaaaaaaaaaaaaaaaaaaaaaaaaaaaaaaaaaaaaaaaaaaaaaaaaaugcaucccccccccccccccccccccccccccccccaaaggcucuuuucagagccaccagaauu

SEQ ID NO: 16812 - RNA, 1907 nt, Artificial Sequence
  mRNA product Design g-5 comprising derived and/or modified sequence from HRSV(Memphis-37)__AIY60640.1__F-del_DSCav1_mut4 (opt1)
gggagacccgugacccggaaguuguacggcuacgcgacuuucccucccacaaacccucgcgcccuuccuuuccuacuugggcccggcagaaagcuuaccauggagcugcccauccucaagaccaacgccaucaccacgauccuggccgcggugacccugugcuucgccagcucccagaacaucaccgaggaguucuaccagagcacgugcuccgccgucagcaagggcuaccucuccgcccugcgcaccgggugguacaccagcgugaucaccaucgagcuguccaacaucaaggagaacaagugcaacggcaccgacgccaaggugaagcucaucaagcaggagcuggacaaguacaagaacgcggucacggagcugcagcuccugaugcagagcaccccggccgccggcuccgggagcgcgaucugcuccggcaucgccgucugcaaggugcugcaccucgagggcgaggugaacaagaucaagaacgcccugcuguccaccaacaaggccgucgugagccucuccaacggggugagcguccugaccuucaaggugcuggaccucaagaacuacaucgacaagcagcugcugcccauccugaacaagcagagcugcuccaucagcaacaucgagaccgucaucgaguuccagcagaagaacaaccgccuccuggagaucacgcgggaguucagcgugaacgcgggcgugaccacccccgucuccaccuacaugcugacgaacagcgagcuccugucccugaucaacgacaugccgaucaccaacgaccagaagaagcucaugagcaacaacgugcagaucgugcgccagcaguccuacagcaucaugugcaucaucaaggaggagguccuggccuacguggugcagcugccccucuacggggucaucgacacccccugcuggaagcugcacaccagcccccugugcacgaccaacaccaaggagggcuccaacaucugccucacccggacggaccgcgggugguacugcgacaacgccggcagcguguccuucuucccgcaggccgagaccugcaagguccagagcaaccggguguucugcgacaccaugaacucccggacccugcccagcgaggugaaccucugcaacaucgacaucuucaaccccaaguacgacugcaagaucaugacguccaagaccgacgucagcuccagcgugaucaccucccugggcgccaucgugagcugcuacgggaagaccaagugcacggcgagcaacaagaaccgcggcaucaucaagaccuucuccaacgggugcgacuacgucagcaacaagggcguggacaccguguccgucggcaacacccuguacugcgugaacaagcaggagggcaagagccucuacgugaagggggagcccaucaucaacuucuacgacccgcuggucuuccccuccgacgaguucgacgccagcaucucccaggugaacgagaagaucaaccagagccuggccuucauccggaaguccgacgagcuccugcacaacgugaacgucggcaagagcaccacgaacaucaugaucaccaccaucaucaucgugaucaucgugauccugcugcuccugaucgccgucgggcuguuccucuacugcaaggcccgcugaggacuaguaauaaggaaacuguaugaaugucugugggcaggaagugaagagauccuucuguaaagguuuuuggaauuaugucugcugaauaauaaacuuuuuugaaauaauaaaucugguagaaaaaugagaucuaaaaaaaaaaaaaaaaaaaaaaaaaaaaaaaaaaaaaaaaaaaaaaaaaaaaaaaaaaaaaaaaugcaucccccccccccccccccccccccccccccccaaaggcucuuuucagagccaccagaauu

SEQ ID NO: 16813 - RNA, 1907 nt, Artificial Sequence
  mRNA product Design g-5 comprising derived and/or modified sequence from HRSV(Memphis-37)__AIY60640.1__F-del_DSCav1_mut4 (opt1)
gggagacccgugacccggaaguuguacggcuacgcgacuuucccucccacaaacccucgcgcccuuccuuuccuacuugggcccggcagaaagcuuaccauggagcugcccauccucaagaccaacgccaucaccacgauccuggccgcggugacccugugcuucgccagcucccagaacaucaccgaggaguucuaccagagcacgugcuccgccgucagcaagggcuaccucuccgcccugcgcaccgggugguacaccagcgugaucaccaucgagcuguccaacaucaaggagaacaagugcaacggcaccgacgccaaggugaagcucaucaagcaggagcuggacaaguacaagaacgcggucacggagcugcagcuccugaugcagagcaccccggccgccggguccggcagcgccaucugcuccgggaucgcggugugcaaggugcugcaccucgagggcgaggucaacaagaucaagaacgcccugcugagcaccaacaaggccguggugucccucagcaacggcgucuccgugcugaccuucaaggugcuggaccucaagaacuacaucgacaagcagcugcugcccauccucaacaagcagagcugcuccaucagcaacaucgagacggucaucgaguuccagcagaagaacaaccggcugcuggagaucacccgcgaguucuccgugaacgccggggugaccacccccgucagcacguacaugcucaccaacagcgagcugcugucccucaucaacgacaugcccaucaccaacgaccagaagaagcugaugagcaacaacgugcagaucgugcggcagcaguccuacagcaucaugugcaucaucaaggaggagguccuggccuacguggugcagcucccgcuguacggcgucaucgacacccccugcuggaagcugcacacgagcccccucugcaccaccaacaccaaggagggguccaacaucugccugacgcgcaccgaccggggcugguacugcgacaacgcgggguccgugagcuucuucccccaggccgagaccugcaaggugcaguccaaccgcgucuucugcgacaccaugaacagccggacgcucccguccgaggugaaccugugcaacaucgacaucuucaaccccaaguacgacugcaagaucaugaccagcaagaccgacgucuccagcuccgugaucaccagccugggcgccaucguguccugcuacggcaagacgaagugcaccgccagcaacaagaaccgggggaucaucaagaccuucuccaacggcugcgacuacgucagcaacaaggggguggacaccgugagcgucggcaacacgcucuacugcgugaacaagcaggagggcaagucccuguacgugaagggggagcccaucaucaacuucuacgacccccuggucuucccgagcgacgaguucgacgccuccaucagccaggugaacgagaagaucaaccagucccucgcguucauccgcaagagcgacgagcugcugcacaacgugaacgucggcaaguccaccaccaacaucaugaucaccaccaucaucaucgugaucaucgugauccuccugcugcucaucgccgucgggcuguuccuguacugcaaggcccggugaggacuaguaauaaggaaacuguaugaaugucugugggcaggaagugaagagauccuucuguaaagguuuuuggaauuaugucugcugaauaauaaacuuuuuugaaauaauaaaucugguagaaaaaugagaucuaaaaaaaaaaaaaaaaaaaaaaaaaaaaaaaaaaaaaaaaaaaaaaaaaaaaaaaaaaaaaaaaugcaucccccccccccccccccccccccccccccccaaaggcucuuuucagagccaccagaauu

SEQ ID NO: 16814 - RNA, 1907 nt, Artificial Sequence
  mRNA product Design g-5 comprising derived and/or modified sequence from HRSV(Memphis-37)__AIY60640.1__F-del_DSCav1_mut4 (opt2)
gggagacccgugacccggaaguuguacggcuacgcgacuuucccucccacaaacccucgcgcccuuccuuuccuacuugggcccggcagaaagcuuaccauggagcuccccauccucaagaccaacgccaucaccaccauccucgccgccgucacccucugcuucgccuccucccagaacaucaccgaggaguucuaccaguccaccugcuccgccgucuccaagggcuaccucuccgcccuccgcaccggcugguacaccuccgucaucaccaucgagcucuccaacaucaaggagaacaagugcaacggcaccgacgccaaggucaagcucaucaagcaggagcucgacaaguacaagaacgccgucaccgagcuccagcuccucaugcaguccacccccgccgccggcuccggcuccgccaucugcuccggcaucgccgucugcaagguccuccaccucgagggcgaggucaacaagaucaagaacgcccuccucuccaccaacaaggccgucgucucccucuccaacggcgucuccguccucaccuucaagguccucgaccucaagaacuacaucgacaagcagcuccuccccauccucaacaagcaguccugcuccaucuccaacaucgagaccgucaucgaguuccagcagaagaacaaccgccuccucgagaucacccgcgaguucuccgucaacgccggcgucaccacccccgucuccaccuacaugcucaccaacuccgagcuccucucccucaucaacgacaugcccaucaccaacgaccagaagaagcucauguccaacaacguccagaucguccgccagcaguccuacuccaucaugugcaucaucaaggaggagguccucgccuacgucguccagcucccccucuacggcgucaucgacacccccugcuggaagcuccacaccuccccccucugcaccaccaacaccaaggagggcuccaacaucugccucacccgcaccgaccgcggcugguacugcgacaacgccggcuccgucuccuucuucccccaggccgagaccugcaagguccaguccaaccgcgucuucugcgacaccaugaacucccgcacccuccccuccgaggucaaccucugcaacaucgacaucuucaaccccaaguacgacugcaagaucaugaccuccaagaccgacgucuccuccuccgucaucaccucccucggcgccaucgucuccugcuacggcaagaccaagugcaccgccuccaacaagaaccgcggcaucaucaagaccuucuccaacggcugcgacuacgucuccaacaagggcgucgacaccgucuccgucggcaacacccucuacugcgucaacaagcaggagggcaagucccucuacgucaagggcgagcccaucaucaacuucuacgacccccucgucuuccccuccgacgaguucgacgccuccaucucccaggucaacgagaagaucaaccagucccucgccuucauccgcaaguccgacgagcuccuccacaacgucaacgucggcaaguccaccaccaacaucaugaucaccaccaucaucaucgucaucaucgucauccuccuccuccucaucgccgucggccucuuccucuacugcaaggcccgcugaggacuaguaauaaggaaacuguaugaaugucugugggcaggaagugaagagauccuucuguaaagguuuuuggaauuaugucugcugaauaauaaacuuuuuugaaauaauaaaucugguagaaaaaugagaucuaaaaaaaaaaaaaaaaaaaaaaaaaaaaaaaaaaaaaaaaaaaaaaaaaaaaaaaaaaaaaaaaugcaucccccccccccccccccccccccccccccccaaaggcucuuuucagagccaccagaauu

SEQ ID NO: 16815 - RNA, 1907 nt, Artificial Sequence
  mRNA product Design g-5 comprising derived and/or modified sequence from HRSV(Memphis-37)__AIY60640.1__F-del_DSCav1_mut4 (opt3)
gggagacccgugacccggaaguuguacggcuacgcgacuuucccucccacaaacccucgcgcccuuccuuuccuacuugggcccggcagaaagcuuaccauggagcugcccauccucaagaccaacgccauuacaacuauacuugcugcagugacgcugugcuucgccagcucccagaauaucaccgaagaguuuuaccaaucuacauguucagcggucaguaaaggcuauuugagcgcuuuaagaacugggugguacaccuccguuauuacaaucgaacugucuaacauuaaggagaauaaaugcaacggaaccgacgccaaggugaaacuaaucaagcaggaacucgauaaguauaaaaaugcaguaacugagcugcagcuucugaugcagucgaccccugccgcugguucaggcagcgcaauauguagugggaucgccgugugcaaggucuugcaccucgagggagaagugaacaaaauuaagaaugcucugcuguccacaaacaaagccguugugucucucagcaauggcgucuccguguuaacguucaagguacuggaccuuaagaacuacaucgauaaacaauugcugccaauucuaaauaagcagucauguaguaucagcaacauagagacuguuauugaauuucagcagaaaaauaacaggcuccuggagaucacccgggaguucucugugaaugcgggugucacaacuccgguguccaccuauaugcuuacaaacucagaacuguugagccucauuaacgacaugcccaucaccaaugaucaaaagaaacugaugaguaacaaugugcagaucguccgccagcagucuuacuccauuaugugcauaaucaaggaggaaguuuuagcauaugugguacaacugccucucuacggggugauugacacgccauguuggaaacuucauacuagcccccugugcacaaccaacacuaaggagggaucgaauaucuguuugacacgaaccgaucguggcugguacugcgacaacgccggcucugucuccuuuuucccucaggcugaaacguguaaggugcagucaaauagaguguuuugcgauaccaugaacaguagaacacugccaagcgaggugaaucucugcaacauagacauuuucaaucccaaauaugauuguaagaucaugacuuccaaaaccgacgucucuagcucagugaucacaagucugggggccauuguauccugcuacggaaagacuaaauguaccgcaagcaacaagaauagggguaucauuaagacauuuucuaacggcugcgauuauguuucaaauaaagggguggacaccgucagugugggaaacacucuuuacugugucaacaagcaagagggcaaaagccuguaugugaagggugaaccuauaaucaauuucuacgacccauugguuuuuccguccgaugaguucgacgcuucuauuucgcagguuaacgagaaaaucaaucagagccucgccuuuauccggaaguccgaugaacuguuacacaacguaaaugucgggaagucaacgacaaacauuaugauaaccacuaucauuaucgugauuaucguuauacugcuacuccugaucgcggugggacuuuucuuguauugcaaagcccgcugaggacuaguaauaaggaaacuguaugaaugucugugggcaggaagugaagagauccuucuguaaagguuuuuggaauuaugucugcugaauaauaaacuuuuuugaaauaauaaaucugguagaaaaaugagaucuaaaaaaaaaaaaaaaaaaaaaaaaaaaaaaaaaaaaaaaaaaaaaaaaaaaaaaaaaaaaaaaaugcaucccccccccccccccccccccccccccccccaaaggcucuuuucagagccaccagaauu

SEQ ID NO: 16816 - RNA, 1907 nt, Artificial Sequence
  mRNA product Design g-5 comprising derived and/or modified sequence from HRSV(Memphis-37)__AIY60640.1__F-del_DSCav1_mut4 (opt4)
gggagacccgugacccggaaguuguacggcuacgcgacuuucccucccacaaacccucgcgcccuuccuuuccuacuugggcccggcagaaagcuuaccauggagcugcccauccugaagaccaacgccaucaccaccauccuggccgccgugacccugugcuucgccagcagccagaacaucaccgaggaguucuaccagagcaccugcagcgccgugagcaagggcuaccugagcgcccugagaaccggcugguacaccagcgugaucaccaucgagcugagcaacaucaaggagaacaagugcaacggcaccgacgccaaggugaagcugaucaagcaggagcuggacaaguacaagaacgccgugaccgagcugcagcugcugaugcagagcacccccgccgccggcagcggcagcgccaucugcagcggcaucgccgugugcaaggugcugcaccuggagggcgaggugaacaagaucaagaacgcccugcugagcaccaacaaggccguggugagccugagcaacggcgugagcgugcugaccuucaaggugcuggaccugaagaacuacaucgacaagcagcugcugcccauccugaacaagcagagcugcagcaucagcaacaucgagaccgugaucgaguuccagcagaagaacaacagacugcuggagaucaccagagaguucagcgugaacgccggcgugaccacccccgugagcaccuacaugcugaccaacagcgagcugcugagccugaucaacgacaugcccaucaccaacgaccagaagaagcugaugagcaacaacgugcagaucgugagacagcagagcuacagcaucaugugcaucaucaaggaggaggugcuggccuacguggugcagcugccccuguacggcgugaucgacacccccugcuggaagcugcacaccagcccccugugcaccaccaacaccaaggagggcagcaacaucugccugaccagaaccgacagaggcugguacugcgacaacgccggcagcgugagcuucuucccccaggccgagaccugcaaggugcagagcaacagaguguucugcgacaccaugaacagcagaacccugcccagcgaggugaaccugugcaacaucgacaucuucaaccccaaguacgacugcaagaucaugaccagcaagaccgacgugagcagcagcgugaucaccagccugggcgccaucgugagcugcuacggcaagaccaagugcaccgccagcaacaagaacagaggcaucaucaagaccuucagcaacggcugcgacuacgugagcaacaagggcguggacaccgugagcgugggcaacacccuguacugcgugaacaagcaggagggcaagagccuguacgugaagggcgagcccaucaucaacuucuacgacccccugguguuccccagcgacgaguucgacgccagcaucagccaggugaacgagaagaucaaccagagccuggccuucaucagaaagagcgacgagcugcugcacaacgugaacgugggcaagagcaccaccaacaucaugaucaccaccaucaucaucgugaucaucgugauccugcugcugcugaucgccgugggccuguuccuguacugcaaggccagaugaggacuaguaauaaggaaacuguaugaaugucugugggcaggaagugaagagauccuucuguaaagguuuuuggaauuaugucugcugaauaauaaacuuuuuugaaauaauaaaucugguagaaaaaugagaucuaaaaaaaaaaaaaaaaaaaaaaaaaaaaaaaaaaaaaaaaaaaaaaaaaaaaaaaaaaaaaaaaugcaucccccccccccccccccccccccccccccccaaaggcucuuuucagagccaccagaauu

SEQ ID NO: 16817 - RNA, 1907 nt, Artificial Sequence
  mRNA product Design g-5 comprising derived and/or modified sequence from HRSV(Memphis-37)__AIY60640.1__F-del_DSCav1_mut4 (opt5)
gggagacccgugacccggaaguuguacggcuacgcgacuuucccucccacaaacccucgcgcccuuccuuuccuacuugggcccggcagaaagcuuaccauggagcugcccauccucaagaccaacgccauuacaacgauccuggcugccgugacccuuugcuucgcgagcucccagaauauuacagaagaguuuuaccaaucuaccuguagcgcugucuccaaaggcuaucugucugcccucagaacagggugguacaccagcguuaucacaauugaacuguccaacaucaaggagaauaaaugcaacggaaccgacgccaaggugaaacuuaucaagcaggaacuggauaaguauaaaaaugcugugacggagcuccagcugcugaugcagucuaccccugccgcuggcagcggguccgccauuuguagcggaaucgcggucugcaaggugcuccaccuggagggcgaaguuaacaaaauuaagaaugcccuucugucuacaaacaaagcuguggucucccucagcaauggggugucuguucugaccuucaaggugcuugaccugaagaacuacaucgauaaacaacuccugccgauucugaauaagcaguccuguagcaucucuaacauugagacagucaucgaauuucagcagaaaaauaaccggcuccuggagaucacccgcgaguucuccgugaaugccggagugacgacacccgucagcaccuauaugcuuacaaacuccgaacugcucucucugauuaacgacaugccuaucaccaaugaucaaaagaaacuuaugagcaacaauguucagauugugagacagcaguccuacagcaucaugugcauuaucaaggaggaagugcuggcuuaugucgugcaacucccccuguacggcguuaucgacaccccuuguuggaaacugcauacaucuccccucugcacgaccaacacaaaggagggcuccaauauuugucugacccggacagaucgcgggugguacugcgacaacgccggaagcgugagcuuuuucccucaggcggaaaccuguaagguccagucuaauagaguguuuugcgauacgaugaacuccagaacacugccgucugagguuaaucucugcaacaucgacauuuucaaucccaaauaugauuguaagaucaugaccagcaaaaccgacguguccagcucugucauuacaucccugggcgccaucgugagcugcuacgggaagaccaaauguacagcuucuaacaagaaucggggaaucauuaagacguuuuccaacggcugcgauuaugucagcaauaaagggguggacaccguuuccgugggaaacacacuuuacugugucaacaagcaagagggcaaaucucuguaugugaagggcgaaccuaucauuaauuucuacgacccccucguuuuuccuagcgaugaguucgacgccuccaucucucaggugaacgaaaagauuaaucagagccuggcuuuuauccgcaaguccgaugagcugcuccacaacgucaauguggggaaaagcaccacaaacauuaugaucaccacgaucauuaucgugauuaucguuauucugcuucugcucaucgccgucggacuguuccuguauugcaaagccagaugaggacuaguaauaaggaaacuguaugaaugucugugggcaggaagugaagagauccuucuguaaagguuuuuggaauuaugucugcugaauaauaaacuuuuuugaaauaauaaaucugguagaaaaaugagaucuaaaaaaaaaaaaaaaaaaaaaaaaaaaaaaaaaaaaaaaaaaaaaaaaaaaaaaaaaaaaaaaaugcaucccccccccccccccccccccccccccccccaaaggcucuuuucagagccaccagaauu

SEQ ID NO: 16818 - RNA, 1907 nt, Artificial Sequence
  mRNA product Design g-5 comprising derived and/or modified sequence from HRSV(Memphis-37)__AIY60640.1__F-del_DSCav1_mut4 (opt6)
gggagacccgugacccggaaguuguacggcuacgcgacuuucccucccacaaacccucgcgcccuuccuuuccuacuugggcccggcagaaagcuuaccauggaacuaccaauacucaaaacaaacgcaauaacaacuauacuagccgcaguuacacucugcuucgcuucaucacaaaauaucacagaagaauuuuaccaaucuacauguucagcuguauccaaagguuaccuuucagcacuacgaacaggaugguauaccucaguaaucaccaucgaacucucgaacauaaaagaaaacaaauguaacggaaccgaugcuaaagucaagcucauaaaacaagaacuagacaaauacaaaaacgcaguaaccgaacuacaacuacuuaugcaaucaacaccagcugcaggcucaggcucagcaaucugcucaggcauagcuguaugcaaaguacuacaucuagaaggagaaguaaacaaaauaaaaaacgcauuauuaucaacaaauaaagcaguaguaucacuaucaaauggaguaucaguacucacauucaaaguacuagaucuaaaaaacuacauugacaaacaauuacuaccaauccucaacaaacaaucaugcucaauauccaacauagaaacaguaauagaauuucaacaaaaaaacaaucgacuacuagaaauaacaagagaauuuucagucaaugccggaguuacaacacccguaagcacuuacaugcuaaccaacucagaacuacuaucacuaauaaacgacaugccaauuacaaacgaccaaaaaaaacuaaugucaaauaacguacaaauaguacgucaacaaucauacucaauaaugugcauaauaaaagaagaaguccuagcauacguaguacaauuacccuuauauggcguaauagacacaccaugcuggaaacuacacacauccccacucugcaccaccaacaccaaagaaggcuccaacauaugucuaacccgaaccgacagagguugguauugugauaacgcuggcuccguaucauucuucccacaagcagaaacauguaaaguacaaucaaacagaguauucugcgauacaaugaauagcagaacacuaccaucagaaguaaacuuaugcaacaucgacaucuucaaucccaaauacgacugcaaaauaaugacauccaaaacugacguuucuucaagcguaauaacaucuuuaggagcaauaguauccugcuacggaaaaacuaaaugcacagcauccaauaaaaaccguggaauaauaaaaacauucucaaauggcugcgacuacgucucaaacaaaggcguagacaccguuagugucggaaacacacuauauugcguaaauaaacaagaaggaaaauccuuauacguaaaaggcgaaccaauaauuaacuucuaugacccccucguauuuccauccgaugaauuugacgcaucaaucucgcaaguaaacgaaaaaauaaaccaaagccuagcauucauaagaaaauccgacgaacuacuccacaauguaaauguaggaaaaucaacuaccaacauaaugauuacuacuauaauaauaguaauuauagucaucuuacuacuauuaauagcagucggauuauuccuauacugcaaagcaagauagggacuaguaauaaggaaacuguaugaaugucugugggcaggaagugaagagauccuucuguaaagguuuuuggaauuaugucugcugaauaauaaacuuuuuugaaauaauaaaucugguagaaaaaugagaucuaaaaaaaaaaaaaaaaaaaaaaaaaaaaaaaaaaaaaaaaaaaaaaaaaaaaaaaaaaaaaaaaugcaucccccccccccccccccccccccccccccccaaaggcucuuuucagagccaccagaauu

SEQ ID NO: 16819 - RNA, 1907 nt, Artificial Sequence
  mRNA product Design g-5 comprising derived and/or modified sequence from HRSV(Memphis-37)__AIY60640.1__F-del_DSCav1_mut4 (opt11)
gggagacccgugacccggaaguuguacggcuacgcgacuuucccucccacaaacccucgcgcccuuccuuuccuacuugggcccggcagaaagcuuaccauggagcuccccauccuaaaaaccaacgccaucaccaccauccucgccgccgucacccuaugcuucgcuucaucacaaaacaucaccgaagaauuuuaccaaucuaccugcuccgccgucuccaaaggauaucucagcgcccuacggaccggcugguacaccuccgucauaaccaucgaacucaguaacaucaaagaaaacaaaugcaacggcaccgacgccaaagucaaacuaaucaaacaagaacuagauaaauacaaaaacgcggucaccgaacuacaacuccuaaugcaaagcacccccgccgccggauccggcuccgccauaugcuccggcauugcugucugcaaaguacuacaccucgagggcgaggucaacaaaaucaaaaacgcacuacucagcacuaauaaagccguaguaucccuaucaaacggugucucagucuuaacauucaaaguacucgaccuaaagaacuacaucgacaaacaacuccuacccauccucaacaagcaguccuguucuaucucaaacaucgaaaccgucaucgaauuucaacaaaagaacaaccgccuccucgaaaucacacgcgaguucuccgucaacgcaggaguaaccacccccgucuccaccuacaugcucacaaacucggaacuccucucacuaaucaacgacaugcccaucaccaacgaccaaaagaaacucaugagcaacaacguucaaaucguccgccaacaaucauacuccaucaugugcauaaucaaagaagaaguccuagcuuacgucguccagcugccccucuacggagucaucgacacgcccugcuggaaacuacacacaagcccccucugcaccaccaacaccaaagaaggcuccaacauaugccucacacggaccgaccgcgguugguacugcgacaacgccggcuccgucuccuucuucccccaagcagaaacuugcaaaguccaauccaaccgcguauucugcgacacaaugaacagcagaacacucccuagcgaagucaaccucugcaacaucgacauauucaaccccaaauacgacugcaaaaucaugacgucaaaaaccgacgucuccagcuccguuaucaccucacucggcgccaucgucagcugcuacggcaaaacuaaaugcaccgccuccaacaaaaaccgcggcaucauuaaaaccuucagcaacggcugcgacuacgucuccaacaaaggugucgauacgguauccgucggaaacacccuauacugcgucaacaaacaagaaggcaaaucucucuacgucaaaggcgaacccauaaucaauuucuacgacccccuagucuuccccuccgaugaauuugacgccuccaucagccaagucaacgagaaaaucaaccaaucacuagccuucauccggaaauccgacgaacuccuacacaacguaaacgucggcaaauccaccaccaauauaaugaucacaaccaucaucaucguaaucaucgucauccuccuccuacucaucgccgucggauuauucuuauacugcaaagcccgcuaaggacuaguaauaaggaaacuguaugaaugucugugggcaggaagugaagagauccuucuguaaagguuuuuggaauuaugucugcugaauaauaaacuuuuuugaaauaauaaaucugguagaaaaaugagaucuaaaaaaaaaaaaaaaaaaaaaaaaaaaaaaaaaaaaaaaaaaaaaaaaaaaaaaaaaaaaaaaaugcaucccccccccccccccccccccccccccccccaaaggcucuuuucagagccaccagaauu

SEQ ID NO: 16820 - RNA, 1923 nt, Artificial Sequence
  mRNA product Design h-1 comprising derived and/or modified sequence from HRSV(Memphis-37)__AIY60640.1__F-del_DSCav1_mut4 (opt1)
gggagacccgugacccggaaguuguacggcuacgcgacuuucccucccacaaacccucgcgcccuuccuuuccuacuugggcccggcagaaagcuuaccauggagcugcccauccucaagaccaacgccaucaccacgauccuggccgcggugacccugugcuucgccagcucccagaacaucaccgaggaguucuaccagagcacgugcuccgccgucagcaagggcuaccucuccgcccugcgcaccgggugguacaccagcgugaucaccaucgagcuguccaacaucaaggagaacaagugcaacggcaccgacgccaaggugaagcucaucaagcaggagcuggacaaguacaagaacgcggucacggagcugcagcuccugaugcagagcaccccggccgccggcuccgggagcgcgaucugcuccggcaucgccgucugcaaggugcugcaccucgagggcgaggugaacaagaucaagaacgcccugcuguccaccaacaaggccgucgugagccucuccaacggggugagcguccugaccuucaaggugcuggaccucaagaacuacaucgacaagcagcugcugcccauccugaacaagcagagcugcuccaucagcaacaucgagaccgucaucgaguuccagcagaagaacaaccgccuccuggagaucacgcgggaguucagcgugaacgcgggcgugaccacccccgucuccaccuacaugcugacgaacagcgagcuccugucccugaucaacgacaugccgaucaccaacgaccagaagaagcucaugagcaacaacgugcagaucgugcgccagcaguccuacagcaucaugugcaucaucaaggaggagguccuggccuacguggugcagcugccccucuacggggucaucgacacccccugcuggaagcugcacaccagcccccugugcacgaccaacaccaaggagggcuccaacaucugccucacccggacggaccgcgggugguacugcgacaacgccggcagcguguccuucuucccgcaggccgagaccugcaagguccagagcaaccggguguucugcgacaccaugaacucccggacccugcccagcgaggugaaccucugcaacaucgacaucuucaaccccaaguacgacugcaagaucaugacguccaagaccgacgucagcuccagcgugaucaccucccugggcgccaucgugagcugcuacgggaagaccaagugcacggcgagcaacaagaaccgcggcaucaucaagaccuucuccaacgggugcgacuacgucagcaacaagggcguggacaccguguccgucggcaacacccuguacugcgugaacaagcaggagggcaagagccucuacgugaagggggagcccaucaucaacuucuacgacccgcuggucuuccccuccgacgaguucgacgccagcaucucccaggugaacgagaagaucaaccagagccuggccuucauccggaaguccgacgagcuccugcacaacgugaacgucggcaagagcaccacgaacaucaugaucaccaccaucaucaucgugaucaucgugauccugcugcuccugaucgccgucgggcuguuccucuacugcaaggcccgcugaggacuaguacuggcugcaucucccuuuccucuguccuccauccuucucccaggauggugaagggggaccugguacccagugauccccaccccaggauccuaaaucaugacuuaccugcuaauaaaaacucauuggaaaagugagaagaucuaaaaaaaaaaaaaaaaaaaaaaaaaaaaaaaaaaaaaaaaaaaaaaaaaaaaaaaaaaaaaaaaugcaucccccccccccccccccccccccccccccccaaaggcucuuuucagagccaccagaauu

SEQ ID NO: 16821 - RNA, 1923 nt, Artificial Sequence
  mRNA product Design h-1 comprising derived and/or modified sequence from HRSV(Memphis-37)__AIY60640.1__F-del_DSCav1_mut4 (opt1)
gggagacccgugacccggaaguuguacggcuacgcgacuuucccucccacaaacccucgcgcccuuccuuuccuacuugggcccggcagaaagcuuaccauggagcugcccauccucaagaccaacgccaucaccacgauccuggccgcggugacccugugcuucgccagcucccagaacaucaccgaggaguucuaccagagcacgugcuccgccgucagcaagggcuaccucuccgcccugcgcaccgggugguacaccagcgugaucaccaucgagcuguccaacaucaaggagaacaagugcaacggcaccgacgccaaggugaagcucaucaagcaggagcuggacaaguacaagaacgcggucacggagcugcagcuccugaugcagagcaccccggccgccggguccggcagcgccaucugcuccgggaucgcggugugcaaggugcugcaccucgagggcgaggucaacaagaucaagaacgcccugcugagcaccaacaaggccguggugucccucagcaacggcgucuccgugcugaccuucaaggugcuggaccucaagaacuacaucgacaagcagcugcugcccauccucaacaagcagagcugcuccaucagcaacaucgagacggucaucgaguuccagcagaagaacaaccggcugcuggagaucacccgcgaguucuccgugaacgccggggugaccacccccgucagcacguacaugcucaccaacagcgagcugcugucccucaucaacgacaugcccaucaccaacgaccagaagaagcugaugagcaacaacgugcagaucgugcggcagcaguccuacagcaucaugugcaucaucaaggaggagguccuggccuacguggugcagcucccgcuguacggcgucaucgacacccccugcuggaagcugcacacgagcccccucugcaccaccaacaccaaggagggguccaacaucugccugacgcgcaccgaccggggcugguacugcgacaacgcgggguccgugagcuucuucccccaggccgagaccugcaaggugcaguccaaccgcgucuucugcgacaccaugaacagccggacgcucccguccgaggugaaccugugcaacaucgacaucuucaaccccaaguacgacugcaagaucaugaccagcaagaccgacgucuccagcuccgugaucaccagccugggcgccaucguguccugcuacggcaagacgaagugcaccgccagcaacaagaaccgggggaucaucaagaccuucuccaacggcugcgacuacgucagcaacaaggggguggacaccgugagcgucggcaacacgcucuacugcgugaacaagcaggagggcaagucccuguacgugaagggggagcccaucaucaacuucuacgacccccuggucuucccgagcgacgaguucgacgccuccaucagccaggugaacgagaagaucaaccagucccucgcguucauccgcaagagcgacgagcugcugcacaacgugaacgucggcaaguccaccaccaacaucaugaucaccaccaucaucaucgugaucaucgugauccuccugcugcucaucgccgucgggcuguuccuguacugcaaggcccggugaggacuaguacuggcugcaucucccuuuccucuguccuccauccuucucccaggauggugaagggggaccugguacccagugauccccaccccaggauccuaaaucaugacuuaccugcuaauaaaaacucauuggaaaagugagaagaucuaaaaaaaaaaaaaaaaaaaaaaaaaaaaaaaaaaaaaaaaaaaaaaaaaaaaaaaaaaaaaaaaugcaucccccccccccccccccccccccccccccccaaaggcucuuuucagagccaccagaauu

SEQ ID NO: 16822 - RNA, 1923 nt, Artificial Sequence
  mRNA product Design h-1 comprising derived and/or modified sequence from HRSV(Memphis-37)__AIY60640.1__F-del_DSCav1_mut4 (opt2)
gggagacccgugacccggaaguuguacggcuacgcgacuuucccucccacaaacccucgcgcccuuccuuuccuacuugggcccggcagaaagcuuaccauggagcuccccauccucaagaccaacgccaucaccaccauccucgccgccgucacccucugcuucgccuccucccagaacaucaccgaggaguucuaccaguccaccugcuccgccgucuccaagggcuaccucuccgcccuccgcaccggcugguacaccuccgucaucaccaucgagcucuccaacaucaaggagaacaagugcaacggcaccgacgccaaggucaagcucaucaagcaggagcucgacaaguacaagaacgccgucaccgagcuccagcuccucaugcaguccacccccgccgccggcuccggcuccgccaucugcuccggcaucgccgucugcaagguccuccaccucgagggcgaggucaacaagaucaagaacgcccuccucuccaccaacaaggccgucgucucccucuccaacggcgucuccguccucaccuucaagguccucgaccucaagaacuacaucgacaagcagcuccuccccauccucaacaagcaguccugcuccaucuccaacaucgagaccgucaucgaguuccagcagaagaacaaccgccuccucgagaucacccgcgaguucuccgucaacgccggcgucaccacccccgucuccaccuacaugcucaccaacuccgagcuccucucccucaucaacgacaugcccaucaccaacgaccagaagaagcucauguccaacaacguccagaucguccgccagcaguccuacuccaucaugugcaucaucaaggaggagguccucgccuacgucguccagcucccccucuacggcgucaucgacacccccugcuggaagcuccacaccuccccccucugcaccaccaacaccaaggagggcuccaacaucugccucacccgcaccgaccgcggcugguacugcgacaacgccggcuccgucuccuucuucccccaggccgagaccugcaagguccaguccaaccgcgucuucugcgacaccaugaacucccgcacccuccccuccgaggucaaccucugcaacaucgacaucuucaaccccaaguacgacugcaagaucaugaccuccaagaccgacgucuccuccuccgucaucaccucccucggcgccaucgucuccugcuacggcaagaccaagugcaccgccuccaacaagaaccgcggcaucaucaagaccuucuccaacggcugcgacuacgucuccaacaagggcgucgacaccgucuccgucggcaacacccucuacugcgucaacaagcaggagggcaagucccucuacgucaagggcgagcccaucaucaacuucuacgacccccucgucuuccccuccgacgaguucgacgccuccaucucccaggucaacgagaagaucaaccagucccucgccuucauccgcaaguccgacgagcuccuccacaacgucaacgucggcaaguccaccaccaacaucaugaucaccaccaucaucaucgucaucaucgucauccuccuccuccucaucgccgucggccucuuccucuacugcaaggcccgcugaggacuaguacuggcugcaucucccuuuccucuguccuccauccuucucccaggauggugaagggggaccugguacccagugauccccaccccaggauccuaaaucaugacuuaccugcuaauaaaaacucauuggaaaagugagaagaucuaaaaaaaaaaaaaaaaaaaaaaaaaaaaaaaaaaaaaaaaaaaaaaaaaaaaaaaaaaaaaaaaugcaucccccccccccccccccccccccccccccccaaaggcucuuuucagagccaccagaauu

SEQ ID NO: 16823 - RNA, 1923 nt, Artificial Sequence
  mRNA product Design h-1 comprising derived and/or modified sequence from HRSV(Memphis-37)__AIY60640.1__F-del_DSCav1_mut4 (opt3)
gggagacccgugacccggaaguuguacggcuacgcgacuuucccucccacaaacccucgcgcccuuccuuuccuacuugggcccggcagaaagcuuaccauggagcugcccauccucaagaccaacgccauuacaacuauacuugcugcagugacgcugugcuucgccagcucccagaauaucaccgaagaguuuuaccaaucuacauguucagcggucaguaaaggcuauuugagcgcuuuaagaacugggugguacaccuccguuauuacaaucgaacugucuaacauuaaggagaauaaaugcaacggaaccgacgccaaggugaaacuaaucaagcaggaacucgauaaguauaaaaaugcaguaacugagcugcagcuucugaugcagucgaccccugccgcugguucaggcagcgcaauauguagugggaucgccgugugcaaggucuugcaccucgagggagaagugaacaaaauuaagaaugcucugcuguccacaaacaaagccguugugucucucagcaauggcgucuccguguuaacguucaagguacuggaccuuaagaacuacaucgauaaacaauugcugccaauucuaaauaagcagucauguaguaucagcaacauagagacuguuauugaauuucagcagaaaaauaacaggcuccuggagaucacccgggaguucucugugaaugcgggugucacaacuccgguguccaccuauaugcuuacaaacucagaacuguugagccucauuaacgacaugcccaucaccaaugaucaaaagaaacugaugaguaacaaugugcagaucguccgccagcagucuuacuccauuaugugcauaaucaaggaggaaguuuuagcauaugugguacaacugccucucuacggggugauugacacgccauguuggaaacuucauacuagcccccugugcacaaccaacacuaaggagggaucgaauaucuguuugacacgaaccgaucguggcugguacugcgacaacgccggcucugucuccuuuuucccucaggcugaaacguguaaggugcagucaaauagaguguuuugcgauaccaugaacaguagaacacugccaagcgaggugaaucucugcaacauagacauuuucaaucccaaauaugauuguaagaucaugacuuccaaaaccgacgucucuagcucagugaucacaagucugggggccauuguauccugcuacggaaagacuaaauguaccgcaagcaacaagaauagggguaucauuaagacauuuucuaacggcugcgauuauguuucaaauaaagggguggacaccgucagugugggaaacacucuuuacugugucaacaagcaagagggcaaaagccuguaugugaagggugaaccuauaaucaauuucuacgacccauugguuuuuccguccgaugaguucgacgcuucuauuucgcagguuaacgagaaaaucaaucagagccucgccuuuauccggaaguccgaugaacuguuacacaacguaaaugucgggaagucaacgacaaacauuaugauaaccacuaucauuaucgugauuaucguuauacugcuacuccugaucgcggugggacuuuucuuguauugcaaagcccgcugaggacuaguacuggcugcaucucccuuuccucuguccuccauccuucucccaggauggugaagggggaccugguacccagugauccccaccccaggauccuaaaucaugacuuaccugcuaauaaaaacucauuggaaaagugagaagaucuaaaaaaaaaaaaaaaaaaaaaaaaaaaaaaaaaaaaaaaaaaaaaaaaaaaaaaaaaaaaaaaaugcaucccccccccccccccccccccccccccccccaaaggcucuuuucagagccaccagaauu

SEQ ID NO: 16824 - RNA, 1923 nt, Artificial Sequence
  mRNA product Design h-1 comprising derived and/or modified sequence from HRSV(Memphis-37)__AIY60640.1__F-del_DSCav1_mut4 (opt4)
gggagacccgugacccggaaguuguacggcuacgcgacuuucccucccacaaacccucgcgcccuuccuuuccuacuugggcccggcagaaagcuuaccauggagcugcccauccugaagaccaacgccaucaccaccauccuggccgccgugacccugugcuucgccagcagccagaacaucaccgaggaguucuaccagagcaccugcagcgccgugagcaagggcuaccugagcgcccugagaaccggcugguacaccagcgugaucaccaucgagcugagcaacaucaaggagaacaagugcaacggcaccgacgccaaggugaagcugaucaagcaggagcuggacaaguacaagaacgccgugaccgagcugcagcugcugaugcagagcacccccgccgccggcagcggcagcgccaucugcagcggcaucgccgugugcaaggugcugcaccuggagggcgaggugaacaagaucaagaacgcccugcugagcaccaacaaggccguggugagccugagcaacggcgugagcgugcugaccuucaaggugcuggaccugaagaacuacaucgacaagcagcugcugcccauccugaacaagcagagcugcagcaucagcaacaucgagaccgugaucgaguuccagcagaagaacaacagacugcuggagaucaccagagaguucagcgugaacgccggcgugaccacccccgugagcaccuacaugcugaccaacagcgagcugcugagccugaucaacgacaugcccaucaccaacgaccagaagaagcugaugagcaacaacgugcagaucgugagacagcagagcuacagcaucaugugcaucaucaaggaggaggugcuggccuacguggugcagcugccccuguacggcgugaucgacacccccugcuggaagcugcacaccagcccccugugcaccaccaacaccaaggagggcagcaacaucugccugaccagaaccgacagaggcugguacugcgacaacgccggcagcgugagcuucuucccccaggccgagaccugcaaggugcagagcaacagaguguucugcgacaccaugaacagcagaacccugcccagcgaggugaaccugugcaacaucgacaucuucaaccccaaguacgacugcaagaucaugaccagcaagaccgacgugagcagcagcgugaucaccagccugggcgccaucgugagcugcuacggcaagaccaagugcaccgccagcaacaagaacagaggcaucaucaagaccuucagcaacggcugcgacuacgugagcaacaagggcguggacaccgugagcgugggcaacacccuguacugcgugaacaagcaggagggcaagagccuguacgugaagggcgagcccaucaucaacuucuacgacccccugguguuccccagcgacgaguucgacgccagcaucagccaggugaacgagaagaucaaccagagccuggccuucaucagaaagagcgacgagcugcugcacaacgugaacgugggcaagagcaccaccaacaucaugaucaccaccaucaucaucgugaucaucgugauccugcugcugcugaucgccgugggccuguuccuguacugcaaggccagaugaggacuaguacuggcugcaucucccuuuccucuguccuccauccuucucccaggauggugaagggggaccugguacccagugauccccaccccaggauccuaaaucaugacuuaccugcuaauaaaaacucauuggaaaagugagaagaucuaaaaaaaaaaaaaaaaaaaaaaaaaaaaaaaaaaaaaaaaaaaaaaaaaaaaaaaaaaaaaaaaugcaucccccccccccccccccccccccccccccccaaaggcucuuuucagagccaccagaauu

SEQ ID NO: 16825 - RNA, 1923 nt, Artificial Sequence
  mRNA product Design h-1 comprising derived and/or modified sequence from HRSV(Memphis-37)__AIY60640.1__F-del_DSCav1_mut4 (opt5)
gggagacccgugacccggaaguuguacggcuacgcgacuuucccucccacaaacccucgcgcccuuccuuuccuacuugggcccggcagaaagcuuaccauggagcugcccauccucaagaccaacgccauuacaacgauccuggcugccgugacccuuugcuucgcgagcucccagaauauuacagaagaguuuuaccaaucuaccuguagcgcugucuccaaaggcuaucugucugcccucagaacagggugguacaccagcguuaucacaauugaacuguccaacaucaaggagaauaaaugcaacggaaccgacgccaaggugaaacuuaucaagcaggaacuggauaaguauaaaaaugcugugacggagcuccagcugcugaugcagucuaccccugccgcuggcagcggguccgccauuuguagcggaaucgcggucugcaaggugcuccaccuggagggcgaaguuaacaaaauuaagaaugcccuucugucuacaaacaaagcuguggucucccucagcaauggggugucuguucugaccuucaaggugcuugaccugaagaacuacaucgauaaacaacuccugccgauucugaauaagcaguccuguagcaucucuaacauugagacagucaucgaauuucagcagaaaaauaaccggcuccuggagaucacccgcgaguucuccgugaaugccggagugacgacacccgucagcaccuauaugcuuacaaacuccgaacugcucucucugauuaacgacaugccuaucaccaaugaucaaaagaaacuuaugagcaacaauguucagauugugagacagcaguccuacagcaucaugugcauuaucaaggaggaagugcuggcuuaugucgugcaacucccccuguacggcguuaucgacaccccuuguuggaaacugcauacaucuccccucugcacgaccaacacaaaggagggcuccaauauuugucugacccggacagaucgcgggugguacugcgacaacgccggaagcgugagcuuuuucccucaggcggaaaccuguaagguccagucuaauagaguguuuugcgauacgaugaacuccagaacacugccgucugagguuaaucucugcaacaucgacauuuucaaucccaaauaugauuguaagaucaugaccagcaaaaccgacguguccagcucugucauuacaucccugggcgccaucgugagcugcuacgggaagaccaaauguacagcuucuaacaagaaucggggaaucauuaagacguuuuccaacggcugcgauuaugucagcaauaaagggguggacaccguuuccgugggaaacacacuuuacugugucaacaagcaagagggcaaaucucuguaugugaagggcgaaccuaucauuaauuucuacgacccccucguuuuuccuagcgaugaguucgacgccuccaucucucaggugaacgaaaagauuaaucagagccuggcuuuuauccgcaaguccgaugagcugcuccacaacgucaauguggggaaaagcaccacaaacauuaugaucaccacgaucauuaucgugauuaucguuauucugcuucugcucaucgccgucggacuguuccuguauugcaaagccagaugaggacuaguacuggcugcaucucccuuuccucuguccuccauccuucucccaggauggugaagggggaccugguacccagugauccccaccccaggauccuaaaucaugacuuaccugcuaauaaaaacucauuggaaaagugagaagaucuaaaaaaaaaaaaaaaaaaaaaaaaaaaaaaaaaaaaaaaaaaaaaaaaaaaaaaaaaaaaaaaaugcaucccccccccccccccccccccccccccccccaaaggcucuuuucagagccaccagaauu

SEQ ID NO: 16826 - RNA, 1923 nt, Artificial Sequence
  mRNA product Design h-1 comprising derived and/or modified sequence from HRSV(Memphis-37)__AIY60640.1__F-del_DSCav1_mut4 (opt6)
gggagacccgugacccggaaguuguacggcuacgcgacuuucccucccacaaacccucgcgcccuuccuuuccuacuugggcccggcagaaagcuuaccauggaacuaccaauacucaaaacaaacgcaauaacaacuauacuagccgcaguuacacucugcuucgcuucaucacaaaauaucacagaagaauuuuaccaaucuacauguucagcuguauccaaagguuaccuuucagcacuacgaacaggaugguauaccucaguaaucaccaucgaacucucgaacauaaaagaaaacaaauguaacggaaccgaugcuaaagucaagcucauaaaacaagaacuagacaaauacaaaaacgcaguaaccgaacuacaacuacuuaugcaaucaacaccagcugcaggcucaggcucagcaaucugcucaggcauagcuguaugcaaaguacuacaucuagaaggagaaguaaacaaaauaaaaaacgcauuauuaucaacaaauaaagcaguaguaucacuaucaaauggaguaucaguacucacauucaaaguacuagaucuaaaaaacuacauugacaaacaauuacuaccaauccucaacaaacaaucaugcucaauauccaacauagaaacaguaauagaauuucaacaaaaaaacaaucgacuacuagaaauaacaagagaauuuucagucaaugccggaguuacaacacccguaagcacuuacaugcuaaccaacucagaacuacuaucacuaauaaacgacaugccaauuacaaacgaccaaaaaaaacuaaugucaaauaacguacaaauaguacgucaacaaucauacucaauaaugugcauaauaaaagaagaaguccuagcauacguaguacaauuacccuuauauggcguaauagacacaccaugcuggaaacuacacacauccccacucugcaccaccaacaccaaagaaggcuccaacauaugucuaacccgaaccgacagagguugguauugugauaacgcuggcuccguaucauucuucccacaagcagaaacauguaaaguacaaucaaacagaguauucugcgauacaaugaauagcagaacacuaccaucagaaguaaacuuaugcaacaucgacaucuucaaucccaaauacgacugcaaaauaaugacauccaaaacugacguuucuucaagcguaauaacaucuuuaggagcaauaguauccugcuacggaaaaacuaaaugcacagcauccaauaaaaaccguggaauaauaaaaacauucucaaauggcugcgacuacgucucaaacaaaggcguagacaccguuagugucggaaacacacuauauugcguaaauaaacaagaaggaaaauccuuauacguaaaaggcgaaccaauaauuaacuucuaugacccccucguauuuccauccgaugaauuugacgcaucaaucucgcaaguaaacgaaaaaauaaaccaaagccuagcauucauaagaaaauccgacgaacuacuccacaauguaaauguaggaaaaucaacuaccaacauaaugauuacuacuauaauaauaguaauuauagucaucuuacuacuauuaauagcagucggauuauuccuauacugcaaagcaagauagggacuaguacuggcugcaucucccuuuccucuguccuccauccuucucccaggauggugaagggggaccugguacccagugauccccaccccaggauccuaaaucaugacuuaccugcuaauaaaaacucauuggaaaagugagaagaucuaaaaaaaaaaaaaaaaaaaaaaaaaaaaaaaaaaaaaaaaaaaaaaaaaaaaaaaaaaaaaaaaugcaucccccccccccccccccccccccccccccccaaaggcucuuuucagagccaccagaauu

SEQ ID NO: 16827 - RNA, 1923 nt, Artificial Sequence
  mRNA product Design h-1 comprising derived and/or modified sequence from HRSV(Memphis-37)__AIY60640.1__F-del_DSCav1_mut4 (opt11)
gggagacccgugacccggaaguuguacggcuacgcgacuuucccucccacaaacccucgcgcccuuccuuuccuacuugggcccggcagaaagcuuaccauggagcuccccauccuaaaaaccaacgccaucaccaccauccucgccgccgucacccuaugcuucgcuucaucacaaaacaucaccgaagaauuuuaccaaucuaccugcuccgccgucuccaaaggauaucucagcgcccuacggaccggcugguacaccuccgucauaaccaucgaacucaguaacaucaaagaaaacaaaugcaacggcaccgacgccaaagucaaacuaaucaaacaagaacuagauaaauacaaaaacgcggucaccgaacuacaacuccuaaugcaaagcacccccgccgccggauccggcuccgccauaugcuccggcauugcugucugcaaaguacuacaccucgagggcgaggucaacaaaaucaaaaacgcacuacucagcacuaauaaagccguaguaucccuaucaaacggugucucagucuuaacauucaaaguacucgaccuaaagaacuacaucgacaaacaacuccuacccauccucaacaagcaguccuguucuaucucaaacaucgaaaccgucaucgaauuucaacaaaagaacaaccgccuccucgaaaucacacgcgaguucuccgucaacgcaggaguaaccacccccgucuccaccuacaugcucacaaacucggaacuccucucacuaaucaacgacaugcccaucaccaacgaccaaaagaaacucaugagcaacaacguucaaaucguccgccaacaaucauacuccaucaugugcauaaucaaagaagaaguccuagcuuacgucguccagcugccccucuacggagucaucgacacgcccugcuggaaacuacacacaagcccccucugcaccaccaacaccaaagaaggcuccaacauaugccucacacggaccgaccgcgguugguacugcgacaacgccggcuccgucuccuucuucccccaagcagaaacuugcaaaguccaauccaaccgcguauucugcgacacaaugaacagcagaacacucccuagcgaagucaaccucugcaacaucgacauauucaaccccaaauacgacugcaaaaucaugacgucaaaaaccgacgucuccagcuccguuaucaccucacucggcgccaucgucagcugcuacggcaaaacuaaaugcaccgccuccaacaaaaaccgcggcaucauuaaaaccuucagcaacggcugcgacuacgucuccaacaaaggugucgauacgguauccgucggaaacacccuauacugcgucaacaaacaagaaggcaaaucucucuacgucaaaggcgaacccauaaucaauuucuacgacccccuagucuuccccuccgaugaauuugacgccuccaucagccaagucaacgagaaaaucaaccaaucacuagccuucauccggaaauccgacgaacuccuacacaacguaaacgucggcaaauccaccaccaauauaaugaucacaaccaucaucaucguaaucaucgucauccuccuccuacucaucgccgucggauuauucuuauacugcaaagcccgcuaaggacuaguacuggcugcaucucccuuuccucuguccuccauccuucucccaggauggugaagggggaccugguacccagugauccccaccccaggauccuaaaucaugacuuaccugcuaauaaaaacucauuggaaaagugagaagaucuaaaaaaaaaaaaaaaaaaaaaaaaaaaaaaaaaaaaaaaaaaaaaaaaaaaaaaaaaaaaaaaaugcaucccccccccccccccccccccccccccccccaaaggcucuuuucagagccaccagaauu

SEQ ID NO: 16828 - RNA, 2139 nt, Artificial Sequence
  mRNA product Design h-2 comprising derived and/or modified sequence from HRSV(Memphis-37)__AIY60640.1__F-del_DSCav1_mut4 (opt1)
gggagacccgugacccggaaguuguacggcuacgcgacuuucccucccacaaacccucgcgcccuuccuuuccuacuugggcccggcagaaagcuuaccauggagcugcccauccucaagaccaacgccaucaccacgauccuggccgcggugacccugugcuucgccagcucccagaacaucaccgaggaguucuaccagagcacgugcuccgccgucagcaagggcuaccucuccgcccugcgcaccgggugguacaccagcgugaucaccaucgagcuguccaacaucaaggagaacaagugcaacggcaccgacgccaaggugaagcucaucaagcaggagcuggacaaguacaagaacgcggucacggagcugcagcuccugaugcagagcaccccggccgccggcuccgggagcgcgaucugcuccggcaucgccgucugcaaggugcugcaccucgagggcgaggugaacaagaucaagaacgcccugcuguccaccaacaaggccgucgugagccucuccaacggggugagcguccugaccuucaaggugcuggaccucaagaacuacaucgacaagcagcugcugcccauccugaacaagcagagcugcuccaucagcaacaucgagaccgucaucgaguuccagcagaagaacaaccgccuccuggagaucacgcgggaguucagcgugaacgcgggcgugaccacccccgucuccaccuacaugcugacgaacagcgagcuccugucccugaucaacgacaugccgaucaccaacgaccagaagaagcucaugagcaacaacgugcagaucgugcgccagcaguccuacagcaucaugugcaucaucaaggaggagguccuggccuacguggugcagcugccccucuacggggucaucgacacccccugcuggaagcugcacaccagcccccugugcacgaccaacaccaaggagggcuccaacaucugccucacccggacggaccgcgggugguacugcgacaacgccggcagcguguccuucuucccgcaggccgagaccugcaagguccagagcaaccggguguucugcgacaccaugaacucccggacccugcccagcgaggugaaccucugcaacaucgacaucuucaaccccaaguacgacugcaagaucaugacguccaagaccgacgucagcuccagcgugaucaccucccugggcgccaucgugagcugcuacgggaagaccaagugcacggcgagcaacaagaaccgcggcaucaucaagaccuucuccaacgggugcgacuacgucagcaacaagggcguggacaccguguccgucggcaacacccuguacugcgugaacaagcaggagggcaagagccucuacgugaagggggagcccaucaucaacuucuacgacccgcuggucuuccccuccgacgaguucgacgccagcaucucccaggugaacgagaagaucaaccagagccuggccuucauccggaaguccgacgagcuccugcacaacgugaacgucggcaagagcaccacgaacaucaugaucaccaccaucaucaucgugaucaucgugauccugcugcuccugaucgccgucgggcuguuccucuacugcaaggcccgcugaggacuagugaagggaacacccaaauuuaauucagccuuaagcacaauuaauuaagagugaaacguaauuguacaagcaguuggucacccaccauagggcaugaucaacaccgcaaccuuuccuuuuucccccagugauucugaaaaaccccucuucccuucagcuugcuuagauguuccaaauuuaguaagcuuaaggcggccuacagaagaaaaagaaaaaaaaggccacaaaaguucccucucacuuucaguaaauaaaauaaaagcagcaacagaaauaaagaaauaaaugaaauucaaaaugaaauaaauauuguguugugcagcauuaaaaaaucaauaaaaauuaaaaaugagcaagaucuaaaaaaaaaaaaaaaaaaaaaaaaaaaaaaaaaaaaaaaaaaaaaaaaaaaaaaaaaaaaaaaaugcaucccccccccccccccccccccccccccccccaaaggcucuuuucagagccaccagaauu

SEQ ID NO: 16829 - RNA, 2139 nt, Artificial Sequence
  mRNA product Design h-2 comprising derived and/or modified sequence from HRSV(Memphis-37)__AIY60640.1__F-del_DSCav1_mut4 (opt1)
gggagacccgugacccggaaguuguacggcuacgcgacuuucccucccacaaacccucgcgcccuuccuuuccuacuugggcccggcagaaagcuuaccauggagcugcccauccucaagaccaacgccaucaccacgauccuggccgcggugacccugugcuucgccagcucccagaacaucaccgaggaguucuaccagagcacgugcuccgccgucagcaagggcuaccucuccgcccugcgcaccgggugguacaccagcgugaucaccaucgagcuguccaacaucaaggagaacaagugcaacggcaccgacgccaaggugaagcucaucaagcaggagcuggacaaguacaagaacgcggucacggagcugcagcuccugaugcagagcaccccggccgccggguccggcagcgccaucugcuccgggaucgcggugugcaaggugcugcaccucgagggcgaggucaacaagaucaagaacgcccugcugagcaccaacaaggccguggugucccucagcaacggcgucuccgugcugaccuucaaggugcuggaccucaagaacuacaucgacaagcagcugcugcccauccucaacaagcagagcugcuccaucagcaacaucgagacggucaucgaguuccagcagaagaacaaccggcugcuggagaucacccgcgaguucuccgugaacgccggggugaccacccccgucagcacguacaugcucaccaacagcgagcugcugucccucaucaacgacaugcccaucaccaacgaccagaagaagcugaugagcaacaacgugcagaucgugcggcagcaguccuacagcaucaugugcaucaucaaggaggagguccuggccuacguggugcagcucccgcuguacggcgucaucgacacccccugcuggaagcugcacacgagcccccucugcaccaccaacaccaaggagggguccaacaucugccugacgcgcaccgaccggggcugguacugcgacaacgcgggguccgugagcuucuucccccaggccgagaccugcaaggugcaguccaaccgcgucuucugcgacaccaugaacagccggacgcucccguccgaggugaaccugugcaacaucgacaucuucaaccccaaguacgacugcaagaucaugaccagcaagaccgacgucuccagcuccgugaucaccagccugggcgccaucguguccugcuacggcaagacgaagugcaccgccagcaacaagaaccgggggaucaucaagaccuucuccaacggcugcgacuacgucagcaacaaggggguggacaccgugagcgucggcaacacgcucuacugcgugaacaagcaggagggcaagucccuguacgugaagggggagcccaucaucaacuucuacgacccccuggucuucccgagcgacgaguucgacgccuccaucagccaggugaacgagaagaucaaccagucccucgcguucauccgcaagagcgacgagcugcugcacaacgugaacgucggcaaguccaccaccaacaucaugaucaccaccaucaucaucgugaucaucgugauccuccugcugcucaucgccgucgggcuguuccuguacugcaaggcccggugaggacuagugaagggaacacccaaauuuaauucagccuuaagcacaauuaauuaagagugaaacguaauuguacaagcaguuggucacccaccauagggcaugaucaacaccgcaaccuuuccuuuuucccccagugauucugaaaaaccccucuucccuucagcuugcuuagauguuccaaauuuaguaagcuuaaggcggccuacagaagaaaaagaaaaaaaaggccacaaaaguucccucucacuuucaguaaauaaaauaaaagcagcaacagaaauaaagaaauaaaugaaauucaaaaugaaauaaauauuguguugugcagcauuaaaaaaucaauaaaaauuaaaaaugagcaagaucuaaaaaaaaaaaaaaaaaaaaaaaaaaaaaaaaaaaaaaaaaaaaaaaaaaaaaaaaaaaaaaaaugcaucccccccccccccccccccccccccccccccaaaggcucuuuucagagccaccagaauu

SEQ ID NO: 16830 - RNA, 2139 nt, Artificial Sequence
  mRNA product Design h-2 comprising derived and/or modified sequence from HRSV(Memphis-37)__AIY60640.1__F-del_DSCav1_mut4 (opt2)
gggagacccgugacccggaaguuguacggcuacgcgacuuucccucccacaaacccucgcgcccuuccuuuccuacuugggcccggcagaaagcuuaccauggagcuccccauccucaagaccaacgccaucaccaccauccucgccgccgucacccucugcuucgccuccucccagaacaucaccgaggaguucuaccaguccaccugcuccgccgucuccaagggcuaccucuccgcccuccgcaccggcugguacaccuccgucaucaccaucgagcucuccaacaucaaggagaacaagugcaacggcaccgacgccaaggucaagcucaucaagcaggagcucgacaaguacaagaacgccgucaccgagcuccagcuccucaugcaguccacccccgccgccggcuccggcuccgccaucugcuccggcaucgccgucugcaagguccuccaccucgagggcgaggucaacaagaucaagaacgcccuccucuccaccaacaaggccgucgucucccucuccaacggcgucuccguccucaccuucaagguccucgaccucaagaacuacaucgacaagcagcuccuccccauccucaacaagcaguccugcuccaucuccaacaucgagaccgucaucgaguuccagcagaagaacaaccgccuccucgagaucacccgcgaguucuccgucaacgccggcgucaccacccccgucuccaccuacaugcucaccaacuccgagcuccucucccucaucaacgacaugcccaucaccaacgaccagaagaagcucauguccaacaacguccagaucguccgccagcaguccuacuccaucaugugcaucaucaaggaggagguccucgccuacgucguccagcucccccucuacggcgucaucgacacccccugcuggaagcuccacaccuccccccucugcaccaccaacaccaaggagggcuccaacaucugccucacccgcaccgaccgcggcugguacugcgacaacgccggcuccgucuccuucuucccccaggccgagaccugcaagguccaguccaaccgcgucuucugcgacaccaugaacucccgcacccuccccuccgaggucaaccucugcaacaucgacaucuucaaccccaaguacgacugcaagaucaugaccuccaagaccgacgucuccuccuccgucaucaccucccucggcgccaucgucuccugcuacggcaagaccaagugcaccgccuccaacaagaaccgcggcaucaucaagaccuucuccaacggcugcgacuacgucuccaacaagggcgucgacaccgucuccgucggcaacacccucuacugcgucaacaagcaggagggcaagucccucuacgucaagggcgagcccaucaucaacuucuacgacccccucgucuuccccuccgacgaguucgacgccuccaucucccaggucaacgagaagaucaaccagucccucgccuucauccgcaaguccgacgagcuccuccacaacgucaacgucggcaaguccaccaccaacaucaugaucaccaccaucaucaucgucaucaucgucauccuccuccuccucaucgccgucggccucuuccucuacugcaaggcccgcugaggacuagugaagggaacacccaaauuuaauucagccuuaagcacaauuaauuaagagugaaacguaauuguacaagcaguuggucacccaccauagggcaugaucaacaccgcaaccuuuccuuuuucccccagugauucugaaaaaccccucuucccuucagcuugcuuagauguuccaaauuuaguaagcuuaaggcggccuacagaagaaaaagaaaaaaaaggccacaaaaguucccucucacuuucaguaaauaaaauaaaagcagcaacagaaauaaagaaauaaaugaaauucaaaaugaaauaaauauuguguugugcagcauuaaaaaaucaauaaaaauuaaaaaugagcaagaucuaaaaaaaaaaaaaaaaaaaaaaaaaaaaaaaaaaaaaaaaaaaaaaaaaaaaaaaaaaaaaaaaugcaucccccccccccccccccccccccccccccccaaaggcucuuuucagagccaccagaauu

SEQ ID NO: 16831 - RNA, 2139 nt, Artificial Sequence
  mRNA product Design h-2 comprising derived and/or modified sequence from HRSV(Memphis-37)__AIY60640.1__F-del_DSCav1_mut4 (opt3)
gggagacccgugacccggaaguuguacggcuacgcgacuuucccucccacaaacccucgcgcccuuccuuuccuacuugggcccggcagaaagcuuaccauggagcugcccauccucaagaccaacgccauuacaacuauacuugcugcagugacgcugugcuucgccagcucccagaauaucaccgaagaguuuuaccaaucuacauguucagcggucaguaaaggcuauuugagcgcuuuaagaacugggugguacaccuccguuauuacaaucgaacugucuaacauuaaggagaauaaaugcaacggaaccgacgccaaggugaaacuaaucaagcaggaacucgauaaguauaaaaaugcaguaacugagcugcagcuucugaugcagucgaccccugccgcugguucaggcagcgcaauauguagugggaucgccgugugcaaggucuugcaccucgagggagaagugaacaaaauuaagaaugcucugcuguccacaaacaaagccguugugucucucagcaauggcgucuccguguuaacguucaagguacuggaccuuaagaacuacaucgauaaacaauugcugccaauucuaaauaagcagucauguaguaucagcaacauagagacuguuauugaauuucagcagaaaaauaacaggcuccuggagaucacccgggaguucucugugaaugcgggugucacaacuccgguguccaccuauaugcuuacaaacucagaacuguugagccucauuaacgacaugcccaucaccaaugaucaaaagaaacugaugaguaacaaugugcagaucguccgccagcagucuuacuccauuaugugcauaaucaaggaggaaguuuuagcauaugugguacaacugccucucuacggggugauugacacgccauguuggaaacuucauacuagcccccugugcacaaccaacacuaaggagggaucgaauaucuguuugacacgaaccgaucguggcugguacugcgacaacgccggcucugucuccuuuuucccucaggcugaaacguguaaggugcagucaaauagaguguuuugcgauaccaugaacaguagaacacugccaagcgaggugaaucucugcaacauagacauuuucaaucccaaauaugauuguaagaucaugacuuccaaaaccgacgucucuagcucagugaucacaagucugggggccauuguauccugcuacggaaagacuaaauguaccgcaagcaacaagaauagggguaucauuaagacauuuucuaacggcugcgauuauguuucaaauaaagggguggacaccgucagugugggaaacacucuuuacugugucaacaagcaagagggcaaaagccuguaugugaagggugaaccuauaaucaauuucuacgacccauugguuuuuccguccgaugaguucgacgcuucuauuucgcagguuaacgagaaaaucaaucagagccucgccuuuauccggaaguccgaugaacuguuacacaacguaaaugucgggaagucaacgacaaacauuaugauaaccacuaucauuaucgugauuaucguuauacugcuacuccugaucgcggugggacuuuucuuguauugcaaagcccgcugaggacuagugaagggaacacccaaauuuaauucagccuuaagcacaauuaauuaagagugaaacguaauuguacaagcaguuggucacccaccauagggcaugaucaacaccgcaaccuuuccuuuuucccccagugauucugaaaaaccccucuucccuucagcuugcuuagauguuccaaauuuaguaagcuuaaggcggccuacagaagaaaaagaaaaaaaaggccacaaaaguucccucucacuuucaguaaauaaaauaaaagcagcaacagaaauaaagaaauaaaugaaauucaaaaugaaauaaauauuguguugugcagcauuaaaaaaucaauaaaaauuaaaaaugagcaagaucuaaaaaaaaaaaaaaaaaaaaaaaaaaaaaaaaaaaaaaaaaaaaaaaaaaaaaaaaaaaaaaaaugcaucccccccccccccccccccccccccccccccaaaggcucuuuucagagccaccagaauu

SEQ ID NO: 16832 - RNA, 2139 nt, Artificial Sequence
  mRNA product Design h-2 comprising derived and/or modified sequence from HRSV(Memphis-37)__AIY60640.1__F-del_DSCav1_mut4 (opt4)
gggagacccgugacccggaaguuguacggcuacgcgacuuucccucccacaaacccucgcgcccuuccuuuccuacuugggcccggcagaaagcuuaccauggagcugcccauccugaagaccaacgccaucaccaccauccuggccgccgugacccugugcuucgccagcagccagaacaucaccgaggaguucuaccagagcaccugcagcgccgugagcaagggcuaccugagcgcccugagaaccggcugguacaccagcgugaucaccaucgagcugagcaacaucaaggagaacaagugcaacggcaccgacgccaaggugaagcugaucaagcaggagcuggacaaguacaagaacgccgugaccgagcugcagcugcugaugcagagcacccccgccgccggcagcggcagcgccaucugcagcggcaucgccgugugcaaggugcugcaccuggagggcgaggugaacaagaucaagaacgcccugcugagcaccaacaaggccguggugagccugagcaacggcgugagcgugcugaccuucaaggugcuggaccugaagaacuacaucgacaagcagcugcugcccauccugaacaagcagagcugcagcaucagcaacaucgagaccgugaucgaguuccagcagaagaacaacagacugcuggagaucaccagagaguucagcgugaacgccggcgugaccacccccgugagcaccuacaugcugaccaacagcgagcugcugagccugaucaacgacaugcccaucaccaacgaccagaagaagcugaugagcaacaacgugcagaucgugagacagcagagcuacagcaucaugugcaucaucaaggaggaggugcuggccuacguggugcagcugccccuguacggcgugaucgacacccccugcuggaagcugcacaccagcccccugugcaccaccaacaccaaggagggcagcaacaucugccugaccagaaccgacagaggcugguacugcgacaacgccggcagcgugagcuucuucccccaggccgagaccugcaaggugcagagcaacagaguguucugcgacaccaugaacagcagaacccugcccagcgaggugaaccugugcaacaucgacaucuucaaccccaaguacgacugcaagaucaugaccagcaagaccgacgugagcagcagcgugaucaccagccugggcgccaucgugagcugcuacggcaagaccaagugcaccgccagcaacaagaacagaggcaucaucaagaccuucagcaacggcugcgacuacgugagcaacaagggcguggacaccgugagcgugggcaacacccuguacugcgugaacaagcaggagggcaagagccuguacgugaagggcgagcccaucaucaacuucuacgacccccugguguuccccagcgacgaguucgacgccagcaucagccaggugaacgagaagaucaaccagagccuggccuucaucagaaagagcgacgagcugcugcacaacgugaacgugggcaagagcaccaccaacaucaugaucaccaccaucaucaucgugaucaucgugauccugcugcugcugaucgccgugggccuguuccuguacugcaaggccagaugaggacuagugaagggaacacccaaauuuaauucagccuuaagcacaauuaauuaagagugaaacguaauuguacaagcaguuggucacccaccauagggcaugaucaacaccgcaaccuuuccuuuuucccccagugauucugaaaaaccccucuucccuucagcuugcuuagauguuccaaauuuaguaagcuuaaggcggccuacagaagaaaaagaaaaaaaaggccacaaaaguucccucucacuuucaguaaauaaaauaaaagcagcaacagaaauaaagaaauaaaugaaauucaaaaugaaauaaauauuguguugugcagcauuaaaaaaucaauaaaaauuaaaaaugagcaagaucuaaaaaaaaaaaaaaaaaaaaaaaaaaaaaaaaaaaaaaaaaaaaaaaaaaaaaaaaaaaaaaaaugcaucccccccccccccccccccccccccccccccaaaggcucuuuucagagccaccagaauu

SEQ ID NO: 16833 - RNA, 2139 nt, Artificial Sequence
  mRNA product Design h-2 comprising derived and/or modified sequence from HRSV(Memphis-37)__AIY60640.1__F-del_DSCav1_mut4 (opt5)
gggagacccgugacccggaaguuguacggcuacgcgacuuucccucccacaaacccucgcgcccuuccuuuccuacuugggcccggcagaaagcuuaccauggagcugcccauccucaagaccaacgccauuacaacgauccuggcugccgugacccuuugcuucgcgagcucccagaauauuacagaagaguuuuaccaaucuaccuguagcgcugucuccaaaggcuaucugucugcccucagaacagggugguacaccagcguuaucacaauugaacuguccaacaucaaggagaauaaaugcaacggaaccgacgccaaggugaaacuuaucaagcaggaacuggauaaguauaaaaaugcugugacggagcuccagcugcugaugcagucuaccccugccgcuggcagcggguccgccauuuguagcggaaucgcggucugcaaggugcuccaccuggagggcgaaguuaacaaaauuaagaaugcccuucugucuacaaacaaagcuguggucucccucagcaauggggugucuguucugaccuucaaggugcuugaccugaagaacuacaucgauaaacaacuccugccgauucugaauaagcaguccuguagcaucucuaacauugagacagucaucgaauuucagcagaaaaauaaccggcuccuggagaucacccgcgaguucuccgugaaugccggagugacgacacccgucagcaccuauaugcuuacaaacuccgaacugcucucucugauuaacgacaugccuaucaccaaugaucaaaagaaacuuaugagcaacaauguucagauugugagacagcaguccuacagcaucaugugcauuaucaaggaggaagugcuggcuuaugucgugcaacucccccuguacggcguuaucgacaccccuuguuggaaacugcauacaucuccccucugcacgaccaacacaaaggagggcuccaauauuugucugacccggacagaucgcgggugguacugcgacaacgccggaagcgugagcuuuuucccucaggcggaaaccuguaagguccagucuaauagaguguuuugcgauacgaugaacuccagaacacugccgucugagguuaaucucugcaacaucgacauuuucaaucccaaauaugauuguaagaucaugaccagcaaaaccgacguguccagcucugucauuacaucccugggcgccaucgugagcugcuacgggaagaccaaauguacagcuucuaacaagaaucggggaaucauuaagacguuuuccaacggcugcgauuaugucagcaauaaagggguggacaccguuuccgugggaaacacacuuuacugugucaacaagcaagagggcaaaucucuguaugugaagggcgaaccuaucauuaauuucuacgacccccucguuuuuccuagcgaugaguucgacgccuccaucucucaggugaacgaaaagauuaaucagagccuggcuuuuauccgcaaguccgaugagcugcuccacaacgucaauguggggaaaagcaccacaaacauuaugaucaccacgaucauuaucgugauuaucguuauucugcuucugcucaucgccgucggacuguuccuguauugcaaagccagaugaggacuagugaagggaacacccaaauuuaauucagccuuaagcacaauuaauuaagagugaaacguaauuguacaagcaguuggucacccaccauagggcaugaucaacaccgcaaccuuuccuuuuucccccagugauucugaaaaaccccucuucccuucagcuugcuuagauguuccaaauuuaguaagcuuaaggcggccuacagaagaaaaagaaaaaaaaggccacaaaaguucccucucacuuucaguaaauaaaauaaaagcagcaacagaaauaaagaaauaaaugaaauucaaaaugaaauaaauauuguguugugcagcauuaaaaaaucaauaaaaauuaaaaaugagcaagaucuaaaaaaaaaaaaaaaaaaaaaaaaaaaaaaaaaaaaaaaaaaaaaaaaaaaaaaaaaaaaaaaaugcaucccccccccccccccccccccccccccccccaaaggcucuuuucagagccaccagaauu

SEQ ID NO: 16834 - RNA, 2139 nt, Artificial Sequence
  mRNA product Design h-2 comprising derived and/or modified sequence from HRSV(Memphis-37)__AIY60640.1__F-del_DSCav1_mut4 (opt6)
gggagacccgugacccggaaguuguacggcuacgcgacuuucccucccacaaacccucgcgcccuuccuuuccuacuugggcccggcagaaagcuuaccauggaacuaccaauacucaaaacaaacgcaauaacaacuauacuagccgcaguuacacucugcuucgcuucaucacaaaauaucacagaagaauuuuaccaaucuacauguucagcuguauccaaagguuaccuuucagcacuacgaacaggaugguauaccucaguaaucaccaucgaacucucgaacauaaaagaaaacaaauguaacggaaccgaugcuaaagucaagcucauaaaacaagaacuagacaaauacaaaaacgcaguaaccgaacuacaacuacuuaugcaaucaacaccagcugcaggcucaggcucagcaaucugcucaggcauagcuguaugcaaaguacuacaucuagaaggagaaguaaacaaaauaaaaaacgcauuauuaucaacaaauaaagcaguaguaucacuaucaaauggaguaucaguacucacauucaaaguacuagaucuaaaaaacuacauugacaaacaauuacuaccaauccucaacaaacaaucaugcucaauauccaacauagaaacaguaauagaauuucaacaaaaaaacaaucgacuacuagaaauaacaagagaauuuucagucaaugccggaguuacaacacccguaagcacuuacaugcuaaccaacucagaacuacuaucacuaauaaacgacaugccaauuacaaacgaccaaaaaaaacuaaugucaaauaacguacaaauaguacgucaacaaucauacucaauaaugugcauaauaaaagaagaaguccuagcauacguaguacaauuacccuuauauggcguaauagacacaccaugcuggaaacuacacacauccccacucugcaccaccaacaccaaagaaggcuccaacauaugucuaacccgaaccgacagagguugguauugugauaacgcuggcuccguaucauucuucccacaagcagaaacauguaaaguacaaucaaacagaguauucugcgauacaaugaauagcagaacacuaccaucagaaguaaacuuaugcaacaucgacaucuucaaucccaaauacgacugcaaaauaaugacauccaaaacugacguuucuucaagcguaauaacaucuuuaggagcaauaguauccugcuacggaaaaacuaaaugcacagcauccaauaaaaaccguggaauaauaaaaacauucucaaauggcugcgacuacgucucaaacaaaggcguagacaccguuagugucggaaacacacuauauugcguaaauaaacaagaaggaaaauccuuauacguaaaaggcgaaccaauaauuaacuucuaugacccccucguauuuccauccgaugaauuugacgcaucaaucucgcaaguaaacgaaaaaauaaaccaaagccuagcauucauaagaaaauccgacgaacuacuccacaauguaaauguaggaaaaucaacuaccaacauaaugauuacuacuauaauaauaguaauuauagucaucuuacuacuauuaauagcagucggauuauuccuauacugcaaagcaagauagggacuagugaagggaacacccaaauuuaauucagccuuaagcacaauuaauuaagagugaaacguaauuguacaagcaguuggucacccaccauagggcaugaucaacaccgcaaccuuuccuuuuucccccagugauucugaaaaaccccucuucccuucagcuugcuuagauguuccaaauuuaguaagcuuaaggcggccuacagaagaaaaagaaaaaaaaggccacaaaaguucccucucacuuucaguaaauaaaauaaaagcagcaacagaaauaaagaaauaaaugaaauucaaaaugaaauaaauauuguguugugcagcauuaaaaaaucaauaaaaauuaaaaaugagcaagaucuaaaaaaaaaaaaaaaaaaaaaaaaaaaaaaaaaaaaaaaaaaaaaaaaaaaaaaaaaaaaaaaaugcaucccccccccccccccccccccccccccccccaaaggcucuuuucagagccaccagaauu

SEQ ID NO: 16835 - RNA, 2139 nt, Artificial Sequence
  mRNA product Design h-2 comprising derived and/or modified sequence from HRSV(Memphis-37)__AIY60640.1__F-del_DSCav1_mut4 (opt11)
gggagacccgugacccggaaguuguacggcuacgcgacuuucccucccacaaacccucgcgcccuuccuuuccuacuugggcccggcagaaagcuuaccauggagcuccccauccuaaaaaccaacgccaucaccaccauccucgccgccgucacccuaugcuucgcuucaucacaaaacaucaccgaagaauuuuaccaaucuaccugcuccgccgucuccaaaggauaucucagcgcccuacggaccggcugguacaccuccgucauaaccaucgaacucaguaacaucaaagaaaacaaaugcaacggcaccgacgccaaagucaaacuaaucaaacaagaacuagauaaauacaaaaacgcggucaccgaacuacaacuccuaaugcaaagcacccccgccgccggauccggcuccgccauaugcuccggcauugcugucugcaaaguacuacaccucgagggcgaggucaacaaaaucaaaaacgcacuacucagcacuaauaaagccguaguaucccuaucaaacggugucucagucuuaacauucaaaguacucgaccuaaagaacuacaucgacaaacaacuccuacccauccucaacaagcaguccuguucuaucucaaacaucgaaaccgucaucgaauuucaacaaaagaacaaccgccuccucgaaaucacacgcgaguucuccgucaacgcaggaguaaccacccccgucuccaccuacaugcucacaaacucggaacuccucucacuaaucaacgacaugcccaucaccaacgaccaaaagaaacucaugagcaacaacguucaaaucguccgccaacaaucauacuccaucaugugcauaaucaaagaagaaguccuagcuuacgucguccagcugccccucuacggagucaucgacacgcccugcuggaaacuacacacaagcccccucugcaccaccaacaccaaagaaggcuccaacauaugccucacacggaccgaccgcgguugguacugcgacaacgccggcuccgucuccuucuucccccaagcagaaacuugcaaaguccaauccaaccgcguauucugcgacacaaugaacagcagaacacucccuagcgaagucaaccucugcaacaucgacauauucaaccccaaauacgacugcaaaaucaugacgucaaaaaccgacgucuccagcuccguuaucaccucacucggcgccaucgucagcugcuacggcaaaacuaaaugcaccgccuccaacaaaaaccgcggcaucauuaaaaccuucagcaacggcugcgacuacgucuccaacaaaggugucgauacgguauccgucggaaacacccuauacugcgucaacaaacaagaaggcaaaucucucuacgucaaaggcgaacccauaaucaauuucuacgacccccuagucuuccccuccgaugaauuugacgccuccaucagccaagucaacgagaaaaucaaccaaucacuagccuucauccggaaauccgacgaacuccuacacaacguaaacgucggcaaauccaccaccaauauaaugaucacaaccaucaucaucguaaucaucgucauccuccuccuacucaucgccgucggauuauucuuauacugcaaagcccgcuaaggacuagugaagggaacacccaaauuuaauucagccuuaagcacaauuaauuaagagugaaacguaauuguacaagcaguuggucacccaccauagggcaugaucaacaccgcaaccuuuccuuuuucccccagugauucugaaaaaccccucuucccuucagcuugcuuagauguuccaaauuuaguaagcuuaaggcggccuacagaagaaaaagaaaaaaaaggccacaaaaguucccucucacuuucaguaaauaaaauaaaagcagcaacagaaauaaagaaauaaaugaaauucaaaaugaaauaaauauuguguugugcagcauuaaaaaaucaauaaaaauuaaaaaugagcaagaucuaaaaaaaaaaaaaaaaaaaaaaaaaaaaaaaaaaaaaaaaaaaaaaaaaaaaaaaaaaaaaaaaugcaucccccccccccccccccccccccccccccccaaaggcucuuuucagagccaccagaauu

SEQ ID NO: 16836 - RNA, 1919 nt, Artificial Sequence
  mRNA product Design h-3 comprising derived and/or modified sequence from HRSV(Memphis-37)__AIY60640.1__F-del_DSCav1_mut4 (opt1)
gggagacccgugacccggaaguuguacggcuacgcgacuuucccucccacaaacccucgcgcccuuccuuuccuacuugggcccggcagaaagcuuaccauggagcugcccauccucaagaccaacgccaucaccacgauccuggccgcggugacccugugcuucgccagcucccagaacaucaccgaggaguucuaccagagcacgugcuccgccgucagcaagggcuaccucuccgcccugcgcaccgggugguacaccagcgugaucaccaucgagcuguccaacaucaaggagaacaagugcaacggcaccgacgccaaggugaagcucaucaagcaggagcuggacaaguacaagaacgcggucacggagcugcagcuccugaugcagagcaccccggccgccggcuccgggagcgcgaucugcuccggcaucgccgucugcaaggugcugcaccucgagggcgaggugaacaagaucaagaacgcccugcuguccaccaacaaggccgucgugagccucuccaacggggugagcguccugaccuucaaggugcuggaccucaagaacuacaucgacaagcagcugcugcccauccugaacaagcagagcugcuccaucagcaacaucgagaccgucaucgaguuccagcagaagaacaaccgccuccuggagaucacgcgggaguucagcgugaacgcgggcgugaccacccccgucuccaccuacaugcugacgaacagcgagcuccugucccugaucaacgacaugccgaucaccaacgaccagaagaagcucaugagcaacaacgugcagaucgugcgccagcaguccuacagcaucaugugcaucaucaaggaggagguccuggccuacguggugcagcugccccucuacggggucaucgacacccccugcuggaagcugcacaccagcccccugugcacgaccaacaccaaggagggcuccaacaucugccucacccggacggaccgcgggugguacugcgacaacgccggcagcguguccuucuucccgcaggccgagaccugcaagguccagagcaaccggguguucugcgacaccaugaacucccggacccugcccagcgaggugaaccucugcaacaucgacaucuucaaccccaaguacgacugcaagaucaugacguccaagaccgacgucagcuccagcgugaucaccucccugggcgccaucgugagcugcuacgggaagaccaagugcacggcgagcaacaagaaccgcggcaucaucaagaccuucuccaacgggugcgacuacgucagcaacaagggcguggacaccguguccgucggcaacacccuguacugcgugaacaagcaggagggcaagagccucuacgugaagggggagcccaucaucaacuucuacgacccgcuggucuuccccuccgacgaguucgacgccagcaucucccaggugaacgagaagaucaaccagagccuggccuucauccggaaguccgacgagcuccugcacaacgugaacgucggcaagagcaccacgaacaucaugaucaccaccaucaucaucgugaucaucgugauccugcugcuccugaucgccgucgggcuguuccucuacugcaaggcccgcugaggacuaguggaagcauuuuccuggcugauuaaaagaaauuacucagcuauggucaucuguuccuguuagaaggcuaugcagcauauuauauacuaugcgcauguuaugaaaugcauaauaaaaaauuuuaaaaaaucuaaaagaucuaaaaaaaaaaaaaaaaaaaaaaaaaaaaaaaaaaaaaaaaaaaaaaaaaaaaaaaaaaaaaaaaugcaucccccccccccccccccccccccccccccccaaaggcucuuuucagagccaccagaauu

SEQ ID NO: 16837 - RNA, 1919 nt, Artificial Sequence
  mRNA product Design h-3 comprising derived and/or modified sequence from HRSV(Memphis-37)__AIY60640.1__F-del_DSCav1_mut4 (opt1)
gggagacccgugacccggaaguuguacggcuacgcgacuuucccucccacaaacccucgcgcccuuccuuuccuacuugggcccggcagaaagcuuaccauggagcugcccauccucaagaccaacgccaucaccacgauccuggccgcggugacccugugcuucgccagcucccagaacaucaccgaggaguucuaccagagcacgugcuccgccgucagcaagggcuaccucuccgcccugcgcaccgggugguacaccagcgugaucaccaucgagcuguccaacaucaaggagaacaagugcaacggcaccgacgccaaggugaagcucaucaagcaggagcuggacaaguacaagaacgcggucacggagcugcagcuccugaugcagagcaccccggccgccggguccggcagcgccaucugcuccgggaucgcggugugcaaggugcugcaccucgagggcgaggucaacaagaucaagaacgcccugcugagcaccaacaaggccguggugucccucagcaacggcgucuccgugcugaccuucaaggugcuggaccucaagaacuacaucgacaagcagcugcugcccauccucaacaagcagagcugcuccaucagcaacaucgagacggucaucgaguuccagcagaagaacaaccggcugcuggagaucacccgcgaguucuccgugaacgccggggugaccacccccgucagcacguacaugcucaccaacagcgagcugcugucccucaucaacgacaugcccaucaccaacgaccagaagaagcugaugagcaacaacgugcagaucgugcggcagcaguccuacagcaucaugugcaucaucaaggaggagguccuggccuacguggugcagcucccgcuguacggcgucaucgacacccccugcuggaagcugcacacgagcccccucugcaccaccaacaccaaggagggguccaacaucugccugacgcgcaccgaccggggcugguacugcgacaacgcgggguccgugagcuucuucccccaggccgagaccugcaaggugcaguccaaccgcgucuucugcgacaccaugaacagccggacgcucccguccgaggugaaccugugcaacaucgacaucuucaaccccaaguacgacugcaagaucaugaccagcaagaccgacgucuccagcuccgugaucaccagccugggcgccaucguguccugcuacggcaagacgaagugcaccgccagcaacaagaaccgggggaucaucaagaccuucuccaacggcugcgacuacgucagcaacaaggggguggacaccgugagcgucggcaacacgcucuacugcgugaacaagcaggagggcaagucccuguacgugaagggggagcccaucaucaacuucuacgacccccuggucuucccgagcgacgaguucgacgccuccaucagccaggugaacgagaagaucaaccagucccucgcguucauccgcaagagcgacgagcugcugcacaacgugaacgucggcaaguccaccaccaacaucaugaucaccaccaucaucaucgugaucaucgugauccuccugcugcucaucgccgucgggcuguuccuguacugcaaggcccggugaggacuaguggaagcauuuuccuggcugauuaaaagaaauuacucagcuauggucaucuguuccuguuagaaggcuaugcagcauauuauauacuaugcgcauguuaugaaaugcauaauaaaaaauuuuaaaaaaucuaaaagaucuaaaaaaaaaaaaaaaaaaaaaaaaaaaaaaaaaaaaaaaaaaaaaaaaaaaaaaaaaaaaaaaaugcaucccccccccccccccccccccccccccccccaaaggcucuuuucagagccaccagaauu

SEQ ID NO: 16838 - RNA, 1919 nt, Artificial Sequence
  mRNA product Design h-3 comprising derived and/or modified sequence from HRSV(Memphis-37)__AIY60640.1__F-del_DSCav1_mut4 (opt2)
gggagacccgugacccggaaguuguacggcuacgcgacuuucccucccacaaacccucgcgcccuuccuuuccuacuugggcccggcagaaagcuuaccauggagcuccccauccucaagaccaacgccaucaccaccauccucgccgccgucacccucugcuucgccuccucccagaacaucaccgaggaguucuaccaguccaccugcuccgccgucuccaagggcuaccucuccgcccuccgcaccggcugguacaccuccgucaucaccaucgagcucuccaacaucaaggagaacaagugcaacggcaccgacgccaaggucaagcucaucaagcaggagcucgacaaguacaagaacgccgucaccgagcuccagcuccucaugcaguccacccccgccgccggcuccggcuccgccaucugcuccggcaucgccgucugcaagguccuccaccucgagggcgaggucaacaagaucaagaacgcccuccucuccaccaacaaggccgucgucucccucuccaacggcgucuccguccucaccuucaagguccucgaccucaagaacuacaucgacaagcagcuccuccccauccucaacaagcaguccugcuccaucuccaacaucgagaccgucaucgaguuccagcagaagaacaaccgccuccucgagaucacccgcgaguucuccgucaacgccggcgucaccacccccgucuccaccuacaugcucaccaacuccgagcuccucucccucaucaacgacaugcccaucaccaacgaccagaagaagcucauguccaacaacguccagaucguccgccagcaguccuacuccaucaugugcaucaucaaggaggagguccucgccuacgucguccagcucccccucuacggcgucaucgacacccccugcuggaagcuccacaccuccccccucugcaccaccaacaccaaggagggcuccaacaucugccucacccgcaccgaccgcggcugguacugcgacaacgccggcuccgucuccuucuucccccaggccgagaccugcaagguccaguccaaccgcgucuucugcgacaccaugaacucccgcacccuccccuccgaggucaaccucugcaacaucgacaucuucaaccccaaguacgacugcaagaucaugaccuccaagaccgacgucuccuccuccgucaucaccucccucggcgccaucgucuccugcuacggcaagaccaagugcaccgccuccaacaagaaccgcggcaucaucaagaccuucuccaacggcugcgacuacgucuccaacaagggcgucgacaccgucuccgucggcaacacccucuacugcgucaacaagcaggagggcaagucccucuacgucaagggcgagcccaucaucaacuucuacgacccccucgucuuccccuccgacgaguucgacgccuccaucucccaggucaacgagaagaucaaccagucccucgccuucauccgcaaguccgacgagcuccuccacaacgucaacgucggcaaguccaccaccaacaucaugaucaccaccaucaucaucgucaucaucgucauccuccuccuccucaucgccgucggccucuuccucuacugcaaggcccgcugaggacuaguggaagcauuuuccuggcugauuaaaagaaauuacucagcuauggucaucuguuccuguuagaaggcuaugcagcauauuauauacuaugcgcauguuaugaaaugcauaauaaaaaauuuuaaaaaaucuaaaagaucuaaaaaaaaaaaaaaaaaaaaaaaaaaaaaaaaaaaaaaaaaaaaaaaaaaaaaaaaaaaaaaaaugcaucccccccccccccccccccccccccccccccaaaggcucuuuucagagccaccagaauu

SEQ ID NO: 16839 - RNA, 1919 nt, Artificial Sequence
  mRNA product Design h-3 comprising derived and/or modified sequence from HRSV(Memphis-37)__AIY60640.1__F-del_DSCav1_mut4 (opt3)
gggagacccgugacccggaaguuguacggcuacgcgacuuucccucccacaaacccucgcgcccuuccuuuccuacuugggcccggcagaaagcuuaccauggagcugcccauccucaagaccaacgccauuacaacuauacuugcugcagugacgcugugcuucgccagcucccagaauaucaccgaagaguuuuaccaaucuacauguucagcggucaguaaaggcuauuugagcgcuuuaagaacugggugguacaccuccguuauuacaaucgaacugucuaacauuaaggagaauaaaugcaacggaaccgacgccaaggugaaacuaaucaagcaggaacucgauaaguauaaaaaugcaguaacugagcugcagcuucugaugcagucgaccccugccgcugguucaggcagcgcaauauguagugggaucgccgugugcaaggucuugcaccucgagggagaagugaacaaaauuaagaaugcucugcuguccacaaacaaagccguugugucucucagcaauggcgucuccguguuaacguucaagguacuggaccuuaagaacuacaucgauaaacaauugcugccaauucuaaauaagcagucauguaguaucagcaacauagagacuguuauugaauuucagcagaaaaauaacaggcuccuggagaucacccgggaguucucugugaaugcgggugucacaacuccgguguccaccuauaugcuuacaaacucagaacuguugagccucauuaacgacaugcccaucaccaaugaucaaaagaaacugaugaguaacaaugugcagaucguccgccagcagucuuacuccauuaugugcauaaucaaggaggaaguuuuagcauaugugguacaacugccucucuacggggugauugacacgccauguuggaaacuucauacuagcccccugugcacaaccaacacuaaggagggaucgaauaucuguuugacacgaaccgaucguggcugguacugcgacaacgccggcucugucuccuuuuucccucaggcugaaacguguaaggugcagucaaauagaguguuuugcgauaccaugaacaguagaacacugccaagcgaggugaaucucugcaacauagacauuuucaaucccaaauaugauuguaagaucaugacuuccaaaaccgacgucucuagcucagugaucacaagucugggggccauuguauccugcuacggaaagacuaaauguaccgcaagcaacaagaauagggguaucauuaagacauuuucuaacggcugcgauuauguuucaaauaaagggguggacaccgucagugugggaaacacucuuuacugugucaacaagcaagagggcaaaagccuguaugugaagggugaaccuauaaucaauuucuacgacccauugguuuuuccguccgaugaguucgacgcuucuauuucgcagguuaacgagaaaaucaaucagagccucgccuuuauccggaaguccgaugaacuguuacacaacguaaaugucgggaagucaacgacaaacauuaugauaaccacuaucauuaucgugauuaucguuauacugcuacuccugaucgcggugggacuuuucuuguauugcaaagcccgcugaggacuaguggaagcauuuuccuggcugauuaaaagaaauuacucagcuauggucaucuguuccuguuagaaggcuaugcagcauauuauauacuaugcgcauguuaugaaaugcauaauaaaaaauuuuaaaaaaucuaaaagaucuaaaaaaaaaaaaaaaaaaaaaaaaaaaaaaaaaaaaaaaaaaaaaaaaaaaaaaaaaaaaaaaaugcaucccccccccccccccccccccccccccccccaaaggcucuuuucagagccaccagaauu

SEQ ID NO: 16840 - RNA, 1919 nt, Artificial Sequence
  mRNA product Design h-3 comprising derived and/or modified sequence from HRSV(Memphis-37)__AIY60640.1__F-del_DSCav1_mut4 (opt4)
gggagacccgugacccggaaguuguacggcuacgcgacuuucccucccacaaacccucgcgcccuuccuuuccuacuugggcccggcagaaagcuuaccauggagcugcccauccugaagaccaacgccaucaccaccauccuggccgccgugacccugugcuucgccagcagccagaacaucaccgaggaguucuaccagagcaccugcagcgccgugagcaagggcuaccugagcgcccugagaaccggcugguacaccagcgugaucaccaucgagcugagcaacaucaaggagaacaagugcaacggcaccgacgccaaggugaagcugaucaagcaggagcuggacaaguacaagaacgccgugaccgagcugcagcugcugaugcagagcacccccgccgccggcagcggcagcgccaucugcagcggcaucgccgugugcaaggugcugcaccuggagggcgaggugaacaagaucaagaacgcccugcugagcaccaacaaggccguggugagccugagcaacggcgugagcgugcugaccuucaaggugcuggaccugaagaacuacaucgacaagcagcugcugcccauccugaacaagcagagcugcagcaucagcaacaucgagaccgugaucgaguuccagcagaagaacaacagacugcuggagaucaccagagaguucagcgugaacgccggcgugaccacccccgugagcaccuacaugcugaccaacagcgagcugcugagccugaucaacgacaugcccaucaccaacgaccagaagaagcugaugagcaacaacgugcagaucgugagacagcagagcuacagcaucaugugcaucaucaaggaggaggugcuggccuacguggugcagcugccccuguacggcgugaucgacacccccugcuggaagcugcacaccagcccccugugcaccaccaacaccaaggagggcagcaacaucugccugaccagaaccgacagaggcugguacugcgacaacgccggcagcgugagcuucuucccccaggccgagaccugcaaggugcagagcaacagaguguucugcgacaccaugaacagcagaacccugcccagcgaggugaaccugugcaacaucgacaucuucaaccccaaguacgacugcaagaucaugaccagcaagaccgacgugagcagcagcgugaucaccagccugggcgccaucgugagcugcuacggcaagaccaagugcaccgccagcaacaagaacagaggcaucaucaagaccuucagcaacggcugcgacuacgugagcaacaagggcguggacaccgugagcgugggcaacacccuguacugcgugaacaagcaggagggcaagagccuguacgugaagggcgagcccaucaucaacuucuacgacccccugguguuccccagcgacgaguucgacgccagcaucagccaggugaacgagaagaucaaccagagccuggccuucaucagaaagagcgacgagcugcugcacaacgugaacgugggcaagagcaccaccaacaucaugaucaccaccaucaucaucgugaucaucgugauccugcugcugcugaucgccgugggccuguuccuguacugcaaggccagaugaggacuaguggaagcauuuuccuggcugauuaaaagaaauuacucagcuauggucaucuguuccuguuagaaggcuaugcagcauauuauauacuaugcgcauguuaugaaaugcauaauaaaaaauuuuaaaaaaucuaaaagaucuaaaaaaaaaaaaaaaaaaaaaaaaaaaaaaaaaaaaaaaaaaaaaaaaaaaaaaaaaaaaaaaaugcaucccccccccccccccccccccccccccccccaaaggcucuuuucagagccaccagaauu

SEQ ID NO: 16841 - RNA, 1919 nt, Artificial Sequence
  mRNA product Design h-3 comprising derived and/or modified sequence from HRSV(Memphis-37)__AIY60640.1__F-del_DSCav1_mut4 (opt5)
gggagacccgugacccggaaguuguacggcuacgcgacuuucccucccacaaacccucgcgcccuuccuuuccuacuugggcccggcagaaagcuuaccauggagcugcccauccucaagaccaacgccauuacaacgauccuggcugccgugacccuuugcuucgcgagcucccagaauauuacagaagaguuuuaccaaucuaccuguagcgcugucuccaaaggcuaucugucugcccucagaacagggugguacaccagcguuaucacaauugaacuguccaacaucaaggagaauaaaugcaacggaaccgacgccaaggugaaacuuaucaagcaggaacuggauaaguauaaaaaugcugugacggagcuccagcugcugaugcagucuaccccugccgcuggcagcggguccgccauuuguagcggaaucgcggucugcaaggugcuccaccuggagggcgaaguuaacaaaauuaagaaugcccuucugucuacaaacaaagcuguggucucccucagcaauggggugucuguucugaccuucaaggugcuugaccugaagaacuacaucgauaaacaacuccugccgauucugaauaagcaguccuguagcaucucuaacauugagacagucaucgaauuucagcagaaaaauaaccggcuccuggagaucacccgcgaguucuccgugaaugccggagugacgacacccgucagcaccuauaugcuuacaaacuccgaacugcucucucugauuaacgacaugccuaucaccaaugaucaaaagaaacuuaugagcaacaauguucagauugugagacagcaguccuacagcaucaugugcauuaucaaggaggaagugcuggcuuaugucgugcaacucccccuguacggcguuaucgacaccccuuguuggaaacugcauacaucuccccucugcacgaccaacacaaaggagggcuccaauauuugucugacccggacagaucgcgggugguacugcgacaacgccggaagcgugagcuuuuucccucaggcggaaaccuguaagguccagucuaauagaguguuuugcgauacgaugaacuccagaacacugccgucugagguuaaucucugcaacaucgacauuuucaaucccaaauaugauuguaagaucaugaccagcaaaaccgacguguccagcucugucauuacaucccugggcgccaucgugagcugcuacgggaagaccaaauguacagcuucuaacaagaaucggggaaucauuaagacguuuuccaacggcugcgauuaugucagcaauaaagggguggacaccguuuccgugggaaacacacuuuacugugucaacaagcaagagggcaaaucucuguaugugaagggcgaaccuaucauuaauuucuacgacccccucguuuuuccuagcgaugaguucgacgccuccaucucucaggugaacgaaaagauuaaucagagccuggcuuuuauccgcaaguccgaugagcugcuccacaacgucaauguggggaaaagcaccacaaacauuaugaucaccacgaucauuaucgugauuaucguuauucugcuucugcucaucgccgucggacuguuccuguauugcaaagccagaugaggacuaguggaagcauuuuccuggcugauuaaaagaaauuacucagcuauggucaucuguuccuguuagaaggcuaugcagcauauuauauacuaugcgcauguuaugaaaugcauaauaaaaaauuuuaaaaaaucuaaaagaucuaaaaaaaaaaaaaaaaaaaaaaaaaaaaaaaaaaaaaaaaaaaaaaaaaaaaaaaaaaaaaaaaugcaucccccccccccccccccccccccccccccccaaaggcucuuuucagagccaccagaauu

SEQ ID NO: 16842 - RNA, 1919 nt, Artificial Sequence
  mRNA product Design h-3 comprising derived and/or modified sequence from HRSV(Memphis-37)__AIY60640.1__F-del_DSCav1_mut4 (opt6)
gggagacccgugacccggaaguuguacggcuacgcgacuuucccucccacaaacccucgcgcccuuccuuuccuacuugggcccggcagaaagcuuaccauggaacuaccaauacucaaaacaaacgcaauaacaacuauacuagccgcaguuacacucugcuucgcuucaucacaaaauaucacagaagaauuuuaccaaucuacauguucagcuguauccaaagguuaccuuucagcacuacgaacaggaugguauaccucaguaaucaccaucgaacucucgaacauaaaagaaaacaaauguaacggaaccgaugcuaaagucaagcucauaaaacaagaacuagacaaauacaaaaacgcaguaaccgaacuacaacuacuuaugcaaucaacaccagcugcaggcucaggcucagcaaucugcucaggcauagcuguaugcaaaguacuacaucuagaaggagaaguaaacaaaauaaaaaacgcauuauuaucaacaaauaaagcaguaguaucacuaucaaauggaguaucaguacucacauucaaaguacuagaucuaaaaaacuacauugacaaacaauuacuaccaauccucaacaaacaaucaugcucaauauccaacauagaaacaguaauagaauuucaacaaaaaaacaaucgacuacuagaaauaacaagagaauuuucagucaaugccggaguuacaacacccguaagcacuuacaugcuaaccaacucagaacuacuaucacuaauaaacgacaugccaauuacaaacgaccaaaaaaaacuaaugucaaauaacguacaaauaguacgucaacaaucauacucaauaaugugcauaauaaaagaagaaguccuagcauacguaguacaauuacccuuauauggcguaauagacacaccaugcuggaaacuacacacauccccacucugcaccaccaacaccaaagaaggcuccaacauaugucuaacccgaaccgacagagguugguauugugauaacgcuggcuccguaucauucuucccacaagcagaaacauguaaaguacaaucaaacagaguauucugcgauacaaugaauagcagaacacuaccaucagaaguaaacuuaugcaacaucgacaucuucaaucccaaauacgacugcaaaauaaugacauccaaaacugacguuucuucaagcguaauaacaucuuuaggagcaauaguauccugcuacggaaaaacuaaaugcacagcauccaauaaaaaccguggaauaauaaaaacauucucaaauggcugcgacuacgucucaaacaaaggcguagacaccguuagugucggaaacacacuauauugcguaaauaaacaagaaggaaaauccuuauacguaaaaggcgaaccaauaauuaacuucuaugacccccucguauuuccauccgaugaauuugacgcaucaaucucgcaaguaaacgaaaaaauaaaccaaagccuagcauucauaagaaaauccgacgaacuacuccacaauguaaauguaggaaaaucaacuaccaacauaaugauuacuacuauaauaauaguaauuauagucaucuuacuacuauuaauagcagucggauuauuccuauacugcaaagcaagauagggacuaguggaagcauuuuccuggcugauuaaaagaaauuacucagcuauggucaucuguuccuguuagaaggcuaugcagcauauuauauacuaugcgcauguuaugaaaugcauaauaaaaaauuuuaaaaaaucuaaaagaucuaaaaaaaaaaaaaaaaaaaaaaaaaaaaaaaaaaaaaaaaaaaaaaaaaaaaaaaaaaaaaaaaugcaucccccccccccccccccccccccccccccccaaaggcucuuuucagagccaccagaauu

SEQ ID NO: 16843 - RNA, 1919 nt, Artificial Sequence
  mRNA product Design h-3 comprising derived and/or modified sequence from HRSV(Memphis-37)__AIY60640.1__F-del_DSCav1_mut4 (opt11)
gggagacccgugacccggaaguuguacggcuacgcgacuuucccucccacaaacccucgcgcccuuccuuuccuacuugggcccggcagaaagcuuaccauggagcuccccauccuaaaaaccaacgccaucaccaccauccucgccgccgucacccuaugcuucgcuucaucacaaaacaucaccgaagaauuuuaccaaucuaccugcuccgccgucuccaaaggauaucucagcgcccuacggaccggcugguacaccuccgucauaaccaucgaacucaguaacaucaaagaaaacaaaugcaacggcaccgacgccaaagucaaacuaaucaaacaagaacuagauaaauacaaaaacgcggucaccgaacuacaacuccuaaugcaaagcacccccgccgccggauccggcuccgccauaugcuccggcauugcugucugcaaaguacuacaccucgagggcgaggucaacaaaaucaaaaacgcacuacucagcacuaauaaagccguaguaucccuaucaaacggugucucagucuuaacauucaaaguacucgaccuaaagaacuacaucgacaaacaacuccuacccauccucaacaagcaguccuguucuaucucaaacaucgaaaccgucaucgaauuucaacaaaagaacaaccgccuccucgaaaucacacgcgaguucuccgucaacgcaggaguaaccacccccgucuccaccuacaugcucacaaacucggaacuccucucacuaaucaacgacaugcccaucaccaacgaccaaaagaaacucaugagcaacaacguucaaaucguccgccaacaaucauacuccaucaugugcauaaucaaagaagaaguccuagcuuacgucguccagcugccccucuacggagucaucgacacgcccugcuggaaacuacacacaagcccccucugcaccaccaacaccaaagaaggcuccaacauaugccucacacggaccgaccgcgguugguacugcgacaacgccggcuccgucuccuucuucccccaagcagaaacuugcaaaguccaauccaaccgcguauucugcgacacaaugaacagcagaacacucccuagcgaagucaaccucugcaacaucgacauauucaaccccaaauacgacugcaaaaucaugacgucaaaaaccgacgucuccagcuccguuaucaccucacucggcgccaucgucagcugcuacggcaaaacuaaaugcaccgccuccaacaaaaaccgcggcaucauuaaaaccuucagcaacggcugcgacuacgucuccaacaaaggugucgauacgguauccgucggaaacacccuauacugcgucaacaaacaagaaggcaaaucucucuacgucaaaggcgaacccauaaucaauuucuacgacccccuagucuuccccuccgaugaauuugacgccuccaucagccaagucaacgagaaaaucaaccaaucacuagccuucauccggaaauccgacgaacuccuacacaacguaaacgucggcaaauccaccaccaauauaaugaucacaaccaucaucaucguaaucaucgucauccuccuccuacucaucgccgucggauuauucuuauacugcaaagcccgcuaaggacuaguggaagcauuuuccuggcugauuaaaagaaauuacucagcuauggucaucuguuccuguuagaaggcuaugcagcauauuauauacuaugcgcauguuaugaaaugcauaauaaaaaauuuuaaaaaaucuaaaagaucuaaaaaaaaaaaaaaaaaaaaaaaaaaaaaaaaaaaaaaaaaaaaaaaaaaaaaaaaaaaaaaaaugcaucccccccccccccccccccccccccccccccaaaggcucuuuucagagccaccagaauu

SEQ ID NO: 16844 - RNA, 1982 nt, Artificial Sequence
  mRNA product Design h-4 comprising derived and/or modified sequence from HRSV(Memphis-37)__AIY60640.1__F-del_DSCav1_mut4 (opt1)
gggagagggcgcuuggcuugcaaggacccugagcugcggcauugaagcacacccaacccaacucgacugaagucagccucacugaaccggaucugagaaucuucucucucugggcuugccagggcucuccgaaccuagcuagcauccucuucaauuccaacuagaaagcuuaccauggagcugcccauccucaagaccaacgccaucaccacgauccuggccgcggugacccugugcuucgccagcucccagaacaucaccgaggaguucuaccagagcacgugcuccgccgucagcaagggcuaccucuccgcccugcgcaccgggugguacaccagcgugaucaccaucgagcuguccaacaucaaggagaacaagugcaacggcaccgacgccaaggugaagcucaucaagcaggagcuggacaaguacaagaacgcggucacggagcugcagcuccugaugcagagcaccccggccgccggcuccgggagcgcgaucugcuccggcaucgccgucugcaaggugcugcaccucgagggcgaggugaacaagaucaagaacgcccugcuguccaccaacaaggccgucgugagccucuccaacggggugagcguccugaccuucaaggugcuggaccucaagaacuacaucgacaagcagcugcugcccauccugaacaagcagagcugcuccaucagcaacaucgagaccgucaucgaguuccagcagaagaacaaccgccuccuggagaucacgcgggaguucagcgugaacgcgggcgugaccacccccgucuccaccuacaugcugacgaacagcgagcuccugucccugaucaacgacaugccgaucaccaacgaccagaagaagcucaugagcaacaacgugcagaucgugcgccagcaguccuacagcaucaugugcaucaucaaggaggagguccuggccuacguggugcagcugccccucuacggggucaucgacacccccugcuggaagcugcacaccagcccccugugcacgaccaacaccaaggagggcuccaacaucugccucacccggacggaccgcgggugguacugcgacaacgccggcagcguguccuucuucccgcaggccgagaccugcaagguccagagcaaccggguguucugcgacaccaugaacucccggacccugcccagcgaggugaaccucugcaacaucgacaucuucaaccccaaguacgacugcaagaucaugacguccaagaccgacgucagcuccagcgugaucaccucccugggcgccaucgugagcugcuacgggaagaccaagugcacggcgagcaacaagaaccgcggcaucaucaagaccuucuccaacgggugcgacuacgucagcaacaagggcguggacaccguguccgucggcaacacccuguacugcgugaacaagcaggagggcaagagccucuacgugaagggggagcccaucaucaacuucuacgacccgcuggucuuccccuccgacgaguucgacgccagcaucucccaggugaacgagaagaucaaccagagccuggccuucauccggaaguccgacgagcuccugcacaacgugaacgucggcaagagcaccacgaacaucaugaucaccaccaucaucaucgugaucaucgugauccugcugcuccugaucgccgucgggcuguuccucuacugcaaggcccgcugaggacuaguaauaaggaaacuguaugaaugucugugggcaggaagugaagagauccuucuguaaagguuuuuggaauuaugucugcugaauaauaaacuuuuuugaaauaauaaaucugguagaaaaaugagaucuaaaaaaaaaaaaaaaaaaaaaaaaaaaaaaaaaaaaaaaaaaaaaaaaaaaaaaaaaaaaaaaaugcaucccccccccccccccccccccccccccccccaaaggcucuuuucagagccaccagaauu

SEQ ID NO: 16845 - RNA, 1982 nt, Artificial Sequence
  mRNA product Design h-4 comprising derived and/or modified sequence from HRSV(Memphis-37)__AIY60640.1__F-del_DSCav1_mut4 (opt1)
gggagagggcgcuuggcuugcaaggacccugagcugcggcauugaagcacacccaacccaacucgacugaagucagccucacugaaccggaucugagaaucuucucucucugggcuugccagggcucuccgaaccuagcuagcauccucuucaauuccaacuagaaagcuuaccauggagcugcccauccucaagaccaacgccaucaccacgauccuggccgcggugacccugugcuucgccagcucccagaacaucaccgaggaguucuaccagagcacgugcuccgccgucagcaagggcuaccucuccgcccugcgcaccgggugguacaccagcgugaucaccaucgagcuguccaacaucaaggagaacaagugcaacggcaccgacgccaaggugaagcucaucaagcaggagcuggacaaguacaagaacgcggucacggagcugcagcuccugaugcagagcaccccggccgccggguccggcagcgccaucugcuccgggaucgcggugugcaaggugcugcaccucgagggcgaggucaacaagaucaagaacgcccugcugagcaccaacaaggccguggugucccucagcaacggcgucuccgugcugaccuucaaggugcuggaccucaagaacuacaucgacaagcagcugcugcccauccucaacaagcagagcugcuccaucagcaacaucgagacggucaucgaguuccagcagaagaacaaccggcugcuggagaucacccgcgaguucuccgugaacgccggggugaccacccccgucagcacguacaugcucaccaacagcgagcugcugucccucaucaacgacaugcccaucaccaacgaccagaagaagcugaugagcaacaacgugcagaucgugcggcagcaguccuacagcaucaugugcaucaucaaggaggagguccuggccuacguggugcagcucccgcuguacggcgucaucgacacccccugcuggaagcugcacacgagcccccucugcaccaccaacaccaaggagggguccaacaucugccugacgcgcaccgaccggggcugguacugcgacaacgcgggguccgugagcuucuucccccaggccgagaccugcaaggugcaguccaaccgcgucuucugcgacaccaugaacagccggacgcucccguccgaggugaaccugugcaacaucgacaucuucaaccccaaguacgacugcaagaucaugaccagcaagaccgacgucuccagcuccgugaucaccagccugggcgccaucguguccugcuacggcaagacgaagugcaccgccagcaacaagaaccgggggaucaucaagaccuucuccaacggcugcgacuacgucagcaacaaggggguggacaccgugagcgucggcaacacgcucuacugcgugaacaagcaggagggcaagucccuguacgugaagggggagcccaucaucaacuucuacgacccccuggucuucccgagcgacgaguucgacgccuccaucagccaggugaacgagaagaucaaccagucccucgcguucauccgcaagagcgacgagcugcugcacaacgugaacgucggcaaguccaccaccaacaucaugaucaccaccaucaucaucgugaucaucgugauccuccugcugcucaucgccgucgggcuguuccuguacugcaaggcccggugaggacuaguaauaaggaaacuguaugaaugucugugggcaggaagugaagagauccuucuguaaagguuuuuggaauuaugucugcugaauaauaaacuuuuuugaaauaauaaaucugguagaaaaaugagaucuaaaaaaaaaaaaaaaaaaaaaaaaaaaaaaaaaaaaaaaaaaaaaaaaaaaaaaaaaaaaaaaaugcaucccccccccccccccccccccccccccccccaaaggcucuuuucagagccaccagaauu

SEQ ID NO: 16846 - RNA, 1982 nt, Artificial Sequence
  mRNA product Design h-4 comprising derived and/or modified sequence from HRSV(Memphis-37)__AIY60640.1__F-del_DSCav1_mut4 (opt2)
gggagagggcgcuuggcuugcaaggacccugagcugcggcauugaagcacacccaacccaacucgacugaagucagccucacugaaccggaucugagaaucuucucucucugggcuugccagggcucuccgaaccuagcuagcauccucuucaauuccaacuagaaagcuuaccauggagcuccccauccucaagaccaacgccaucaccaccauccucgccgccgucacccucugcuucgccuccucccagaacaucaccgaggaguucuaccaguccaccugcuccgccgucuccaagggcuaccucuccgcccuccgcaccggcugguacaccuccgucaucaccaucgagcucuccaacaucaaggagaacaagugcaacggcaccgacgccaaggucaagcucaucaagcaggagcucgacaaguacaagaacgccgucaccgagcuccagcuccucaugcaguccacccccgccgccggcuccggcuccgccaucugcuccggcaucgccgucugcaagguccuccaccucgagggcgaggucaacaagaucaagaacgcccuccucuccaccaacaaggccgucgucucccucuccaacggcgucuccguccucaccuucaagguccucgaccucaagaacuacaucgacaagcagcuccuccccauccucaacaagcaguccugcuccaucuccaacaucgagaccgucaucgaguuccagcagaagaacaaccgccuccucgagaucacccgcgaguucuccgucaacgccggcgucaccacccccgucuccaccuacaugcucaccaacuccgagcuccucucccucaucaacgacaugcccaucaccaacgaccagaagaagcucauguccaacaacguccagaucguccgccagcaguccuacuccaucaugugcaucaucaaggaggagguccucgccuacgucguccagcucccccucuacggcgucaucgacacccccugcuggaagcuccacaccuccccccucugcaccaccaacaccaaggagggcuccaacaucugccucacccgcaccgaccgcggcugguacugcgacaacgccggcuccgucuccuucuucccccaggccgagaccugcaagguccaguccaaccgcgucuucugcgacaccaugaacucccgcacccuccccuccgaggucaaccucugcaacaucgacaucuucaaccccaaguacgacugcaagaucaugaccuccaagaccgacgucuccuccuccgucaucaccucccucggcgccaucgucuccugcuacggcaagaccaagugcaccgccuccaacaagaaccgcggcaucaucaagaccuucuccaacggcugcgacuacgucuccaacaagggcgucgacaccgucuccgucggcaacacccucuacugcgucaacaagcaggagggcaagucccucuacgucaagggcgagcccaucaucaacuucuacgacccccucgucuuccccuccgacgaguucgacgccuccaucucccaggucaacgagaagaucaaccagucccucgccuucauccgcaaguccgacgagcuccuccacaacgucaacgucggcaaguccaccaccaacaucaugaucaccaccaucaucaucgucaucaucgucauccuccuccuccucaucgccgucggccucuuccucuacugcaaggcccgcugaggacuaguaauaaggaaacuguaugaaugucugugggcaggaagugaagagauccuucuguaaagguuuuuggaauuaugucugcugaauaauaaacuuuuuugaaauaauaaaucugguagaaaaaugagaucuaaaaaaaaaaaaaaaaaaaaaaaaaaaaaaaaaaaaaaaaaaaaaaaaaaaaaaaaaaaaaaaaugcaucccccccccccccccccccccccccccccccaaaggcucuuuucagagccaccagaauu

SEQ ID NO: 16847 - RNA, 1982 nt, Artificial Sequence
  mRNA product Design h-4 comprising derived and/or modified sequence from HRSV(Memphis-37)__AIY60640.1__F-del_DSCav1_mut4 (opt3)
gggagagggcgcuuggcuugcaaggacccugagcugcggcauugaagcacacccaacccaacucgacugaagucagccucacugaaccggaucugagaaucuucucucucugggcuugccagggcucuccgaaccuagcuagcauccucuucaauuccaacuagaaagcuuaccauggagcugcccauccucaagaccaacgccauuacaacuauacuugcugcagugacgcugugcuucgccagcucccagaauaucaccgaagaguuuuaccaaucuacauguucagcggucaguaaaggcuauuugagcgcuuuaagaacugggugguacaccuccguuauuacaaucgaacugucuaacauuaaggagaauaaaugcaacggaaccgacgccaaggugaaacuaaucaagcaggaacucgauaaguauaaaaaugcaguaacugagcugcagcuucugaugcagucgaccccugccgcugguucaggcagcgcaauauguagugggaucgccgugugcaaggucuugcaccucgagggagaagugaacaaaauuaagaaugcucugcuguccacaaacaaagccguugugucucucagcaauggcgucuccguguuaacguucaagguacuggaccuuaagaacuacaucgauaaacaauugcugccaauucuaaauaagcagucauguaguaucagcaacauagagacuguuauugaauuucagcagaaaaauaacaggcuccuggagaucacccgggaguucucugugaaugcgggugucacaacuccgguguccaccuauaugcuuacaaacucagaacuguugagccucauuaacgacaugcccaucaccaaugaucaaaagaaacugaugaguaacaaugugcagaucguccgccagcagucuuacuccauuaugugcauaaucaaggaggaaguuuuagcauaugugguacaacugccucucuacggggugauugacacgccauguuggaaacuucauacuagcccccugugcacaaccaacacuaaggagggaucgaauaucuguuugacacgaaccgaucguggcugguacugcgacaacgccggcucugucuccuuuuucccucaggcugaaacguguaaggugcagucaaauagaguguuuugcgauaccaugaacaguagaacacugccaagcgaggugaaucucugcaacauagacauuuucaaucccaaauaugauuguaagaucaugacuuccaaaaccgacgucucuagcucagugaucacaagucugggggccauuguauccugcuacggaaagacuaaauguaccgcaagcaacaagaauagggguaucauuaagacauuuucuaacggcugcgauuauguuucaaauaaagggguggacaccgucagugugggaaacacucuuuacugugucaacaagcaagagggcaaaagccuguaugugaagggugaaccuauaaucaauuucuacgacccauugguuuuuccguccgaugaguucgacgcuucuauuucgcagguuaacgagaaaaucaaucagagccucgccuuuauccggaaguccgaugaacuguuacacaacguaaaugucgggaagucaacgacaaacauuaugauaaccacuaucauuaucgugauuaucguuauacugcuacuccugaucgcggugggacuuuucuuguauugcaaagcccgcugaggacuaguaauaaggaaacuguaugaaugucugugggcaggaagugaagagauccuucuguaaagguuuuuggaauuaugucugcugaauaauaaacuuuuuugaaauaauaaaucugguagaaaaaugagaucuaaaaaaaaaaaaaaaaaaaaaaaaaaaaaaaaaaaaaaaaaaaaaaaaaaaaaaaaaaaaaaaaugcaucccccccccccccccccccccccccccccccaaaggcucuuuucagagccaccagaauu

SEQ ID NO: 16848 - RNA, 1982 nt, Artificial Sequence
  mRNA product Design h-4 comprising derived and/or modified sequence from HRSV(Memphis-37)__AIY60640.1__F-del_DSCav1_mut4 (opt4)
gggagagggcgcuuggcuugcaaggacccugagcugcggcauugaagcacacccaacccaacucgacugaagucagccucacugaaccggaucugagaaucuucucucucugggcuugccagggcucuccgaaccuagcuagcauccucuucaauuccaacuagaaagcuuaccauggagcugcccauccugaagaccaacgccaucaccaccauccuggccgccgugacccugugcuucgccagcagccagaacaucaccgaggaguucuaccagagcaccugcagcgccgugagcaagggcuaccugagcgcccugagaaccggcugguacaccagcgugaucaccaucgagcugagcaacaucaaggagaacaagugcaacggcaccgacgccaaggugaagcugaucaagcaggagcuggacaaguacaagaacgccgugaccgagcugcagcugcugaugcagagcacccccgccgccggcagcggcagcgccaucugcagcggcaucgccgugugcaaggugcugcaccuggagggcgaggugaacaagaucaagaacgcccugcugagcaccaacaaggccguggugagccugagcaacggcgugagcgugcugaccuucaaggugcuggaccugaagaacuacaucgacaagcagcugcugcccauccugaacaagcagagcugcagcaucagcaacaucgagaccgugaucgaguuccagcagaagaacaacagacugcuggagaucaccagagaguucagcgugaacgccggcgugaccacccccgugagcaccuacaugcugaccaacagcgagcugcugagccugaucaacgacaugcccaucaccaacgaccagaagaagcugaugagcaacaacgugcagaucgugagacagcagagcuacagcaucaugugcaucaucaaggaggaggugcuggccuacguggugcagcugccccuguacggcgugaucgacacccccugcuggaagcugcacaccagcccccugugcaccaccaacaccaaggagggcagcaacaucugccugaccagaaccgacagaggcugguacugcgacaacgccggcagcgugagcuucuucccccaggccgagaccugcaaggugcagagcaacagaguguucugcgacaccaugaacagcagaacccugcccagcgaggugaaccugugcaacaucgacaucuucaaccccaaguacgacugcaagaucaugaccagcaagaccgacgugagcagcagcgugaucaccagccugggcgccaucgugagcugcuacggcaagaccaagugcaccgccagcaacaagaacagaggcaucaucaagaccuucagcaacggcugcgacuacgugagcaacaagggcguggacaccgugagcgugggcaacacccuguacugcgugaacaagcaggagggcaagagccuguacgugaagggcgagcccaucaucaacuucuacgacccccugguguuccccagcgacgaguucgacgccagcaucagccaggugaacgagaagaucaaccagagccuggccuucaucagaaagagcgacgagcugcugcacaacgugaacgugggcaagagcaccaccaacaucaugaucaccaccaucaucaucgugaucaucgugauccugcugcugcugaucgccgugggccuguuccuguacugcaaggccagaugaggacuaguaauaaggaaacuguaugaaugucugugggcaggaagugaagagauccuucuguaaagguuuuuggaauuaugucugcugaauaauaaacuuuuuugaaauaauaaaucugguagaaaaaugagaucuaaaaaaaaaaaaaaaaaaaaaaaaaaaaaaaaaaaaaaaaaaaaaaaaaaaaaaaaaaaaaaaaugcaucccccccccccccccccccccccccccccccaaaggcucuuuucagagccaccagaauu

SEQ ID NO: 16849 - RNA, 1982 nt, Artificial Sequence
  mRNA product Design h-4 comprising derived and/or modified sequence from HRSV(Memphis-37)__AIY60640.1__F-del_DSCav1_mut4 (opt5)
gggagagggcgcuuggcuugcaaggacccugagcugcggcauugaagcacacccaacccaacucgacugaagucagccucacugaaccggaucugagaaucuucucucucugggcuugccagggcucuccgaaccuagcuagcauccucuucaauuccaacuagaaagcuuaccauggagcugcccauccucaagaccaacgccauuacaacgauccuggcugccgugacccuuugcuucgcgagcucccagaauauuacagaagaguuuuaccaaucuaccuguagcgcugucuccaaaggcuaucugucugcccucagaacagggugguacaccagcguuaucacaauugaacuguccaacaucaaggagaauaaaugcaacggaaccgacgccaaggugaaacuuaucaagcaggaacuggauaaguauaaaaaugcugugacggagcuccagcugcugaugcagucuaccccugccgcuggcagcggguccgccauuuguagcggaaucgcggucugcaaggugcuccaccuggagggcgaaguuaacaaaauuaagaaugcccuucugucuacaaacaaagcuguggucucccucagcaauggggugucuguucugaccuucaaggugcuugaccugaagaacuacaucgauaaacaacuccugccgauucugaauaagcaguccuguagcaucucuaacauugagacagucaucgaauuucagcagaaaaauaaccggcuccuggagaucacccgcgaguucuccgugaaugccggagugacgacacccgucagcaccuauaugcuuacaaacuccgaacugcucucucugauuaacgacaugccuaucaccaaugaucaaaagaaacuuaugagcaacaauguucagauugugagacagcaguccuacagcaucaugugcauuaucaaggaggaagugcuggcuuaugucgugcaacucccccuguacggcguuaucgacaccccuuguuggaaacugcauacaucuccccucugcacgaccaacacaaaggagggcuccaauauuugucugacccggacagaucgcgggugguacugcgacaacgccggaagcgugagcuuuuucccucaggcggaaaccuguaagguccagucuaauagaguguuuugcgauacgaugaacuccagaacacugccgucugagguuaaucucugcaacaucgacauuuucaaucccaaauaugauuguaagaucaugaccagcaaaaccgacguguccagcucugucauuacaucccugggcgccaucgugagcugcuacgggaagaccaaauguacagcuucuaacaagaaucggggaaucauuaagacguuuuccaacggcugcgauuaugucagcaauaaagggguggacaccguuuccgugggaaacacacuuuacugugucaacaagcaagagggcaaaucucuguaugugaagggcgaaccuaucauuaauuucuacgacccccucguuuuuccuagcgaugaguucgacgccuccaucucucaggugaacgaaaagauuaaucagagccuggcuuuuauccgcaaguccgaugagcugcuccacaacgucaauguggggaaaagcaccacaaacauuaugaucaccacgaucauuaucgugauuaucguuauucugcuucugcucaucgccgucggacuguuccuguauugcaaagccagaugaggacuaguaauaaggaaacuguaugaaugucugugggcaggaagugaagagauccuucuguaaagguuuuuggaauuaugucugcugaauaauaaacuuuuuugaaauaauaaaucugguagaaaaaugagaucuaaaaaaaaaaaaaaaaaaaaaaaaaaaaaaaaaaaaaaaaaaaaaaaaaaaaaaaaaaaaaaaaugcaucccccccccccccccccccccccccccccccaaaggcucuuuucagagccaccagaauu

SEQ ID NO: 16850 - RNA, 1982 nt, Artificial Sequence
  mRNA product Design h-4 comprising derived and/or modified sequence from HRSV(Memphis-37)__AIY60640.1__F-del_DSCav1_mut4 (opt6)
gggagagggcgcuuggcuugcaaggacccugagcugcggcauugaagcacacccaacccaacucgacugaagucagccucacugaaccggaucugagaaucuucucucucugggcuugccagggcucuccgaaccuagcuagcauccucuucaauuccaacuagaaagcuuaccauggaacuaccaauacucaaaacaaacgcaauaacaacuauacuagccgcaguuacacucugcuucgcuucaucacaaaauaucacagaagaauuuuaccaaucuacauguucagcuguauccaaagguuaccuuucagcacuacgaacaggaugguauaccucaguaaucaccaucgaacucucgaacauaaaagaaaacaaauguaacggaaccgaugcuaaagucaagcucauaaaacaagaacuagacaaauacaaaaacgcaguaaccgaacuacaacuacuuaugcaaucaacaccagcugcaggcucaggcucagcaaucugcucaggcauagcuguaugcaaaguacuacaucuagaaggagaaguaaacaaaauaaaaaacgcauuauuaucaacaaauaaagcaguaguaucacuaucaaauggaguaucaguacucacauucaaaguacuagaucuaaaaaacuacauugacaaacaauuacuaccaauccucaacaaacaaucaugcucaauauccaacauagaaacaguaauagaauuucaacaaaaaaacaaucgacuacuagaaauaacaagagaauuuucagucaaugccggaguuacaacacccguaagcacuuacaugcuaaccaacucagaacuacuaucacuaauaaacgacaugccaauuacaaacgaccaaaaaaaacuaaugucaaauaacguacaaauaguacgucaacaaucauacucaauaaugugcauaauaaaagaagaaguccuagcauacguaguacaauuacccuuauauggcguaauagacacaccaugcuggaaacuacacacauccccacucugcaccaccaacaccaaagaaggcuccaacauaugucuaacccgaaccgacagagguugguauugugauaacgcuggcuccguaucauucuucccacaagcagaaacauguaaaguacaaucaaacagaguauucugcgauacaaugaauagcagaacacuaccaucagaaguaaacuuaugcaacaucgacaucuucaaucccaaauacgacugcaaaauaaugacauccaaaacugacguuucuucaagcguaauaacaucuuuaggagcaauaguauccugcuacggaaaaacuaaaugcacagcauccaauaaaaaccguggaauaauaaaaacauucucaaauggcugcgacuacgucucaaacaaaggcguagacaccguuagugucggaaacacacuauauugcguaaauaaacaagaaggaaaauccuuauacguaaaaggcgaaccaauaauuaacuucuaugacccccucguauuuccauccgaugaauuugacgcaucaaucucgcaaguaaacgaaaaaauaaaccaaagccuagcauucauaagaaaauccgacgaacuacuccacaauguaaauguaggaaaaucaacuaccaacauaaugauuacuacuauaauaauaguaauuauagucaucuuacuacuauuaauagcagucggauuauuccuauacugcaaagcaagauagggacuaguaauaaggaaacuguaugaaugucugugggcaggaagugaagagauccuucuguaaagguuuuuggaauuaugucugcugaauaauaaacuuuuuugaaauaauaaaucugguagaaaaaugagaucuaaaaaaaaaaaaaaaaaaaaaaaaaaaaaaaaaaaaaaaaaaaaaaaaaaaaaaaaaaaaaaaaugcaucccccccccccccccccccccccccccccccaaaggcucuuuucagagccaccagaauu

SEQ ID NO: 16851 - RNA, 1982 nt, Artificial Sequence
  mRNA product Design h-4 comprising derived and/or modified sequence from HRSV(Memphis-37)__AIY60640.1__F-del_DSCav1_mut4 (opt11)
gggagagggcgcuuggcuugcaaggacccugagcugcggcauugaagcacacccaacccaacucgacugaagucagccucacugaaccggaucugagaaucuucucucucugggcuugccagggcucuccgaaccuagcuagcauccucuucaauuccaacuagaaagcuuaccauggagcuccccauccuaaaaaccaacgccaucaccaccauccucgccgccgucacccuaugcuucgcuucaucacaaaacaucaccgaagaauuuuaccaaucuaccugcuccgccgucuccaaaggauaucucagcgcccuacggaccggcugguacaccuccgucauaaccaucgaacucaguaacaucaaagaaaacaaaugcaacggcaccgacgccaaagucaaacuaaucaaacaagaacuagauaaauacaaaaacgcggucaccgaacuacaacuccuaaugcaaagcacccccgccgccggauccggcuccgccauaugcuccggcauugcugucugcaaaguacuacaccucgagggcgaggucaacaaaaucaaaaacgcacuacucagcacuaauaaagccguaguaucccuaucaaacggugucucagucuuaacauucaaaguacucgaccuaaagaacuacaucgacaaacaacuccuacccauccucaacaagcaguccuguucuaucucaaacaucgaaaccgucaucgaauuucaacaaaagaacaaccgccuccucgaaaucacacgcgaguucuccgucaacgcaggaguaaccacccccgucuccaccuacaugcucacaaacucggaacuccucucacuaaucaacgacaugcccaucaccaacgaccaaaagaaacucaugagcaacaacguucaaaucguccgccaacaaucauacuccaucaugugcauaaucaaagaagaaguccuagcuuacgucguccagcugccccucuacggagucaucgacacgcccugcuggaaacuacacacaagcccccucugcaccaccaacaccaaagaaggcuccaacauaugccucacacggaccgaccgcgguugguacugcgacaacgccggcuccgucuccuucuucccccaagcagaaacuugcaaaguccaauccaaccgcguauucugcgacacaaugaacagcagaacacucccuagcgaagucaaccucugcaacaucgacauauucaaccccaaauacgacugcaaaaucaugacgucaaaaaccgacgucuccagcuccguuaucaccucacucggcgccaucgucagcugcuacggcaaaacuaaaugcaccgccuccaacaaaaaccgcggcaucauuaaaaccuucagcaacggcugcgacuacgucuccaacaaaggugucgauacgguauccgucggaaacacccuauacugcgucaacaaacaagaaggcaaaucucucuacgucaaaggcgaacccauaaucaauuucuacgacccccuagucuuccccuccgaugaauuugacgccuccaucagccaagucaacgagaaaaucaaccaaucacuagccuucauccggaaauccgacgaacuccuacacaacguaaacgucggcaaauccaccaccaauauaaugaucacaaccaucaucaucguaaucaucgucauccuccuccuacucaucgccgucggauuauucuuauacugcaaagcccgcuaaggacuaguaauaaggaaacuguaugaaugucugugggcaggaagugaagagauccuucuguaaagguuuuuggaauuaugucugcugaauaauaaacuuuuuugaaauaauaaaucugguagaaaaaugagaucuaaaaaaaaaaaaaaaaaaaaaaaaaaaaaaaaaaaaaaaaaaaaaaaaaaaaaaaaaaaaaaaaugcaucccccccccccccccccccccccccccccccaaaggcucuuuucagagccaccagaauu

SEQ ID NO: 16852 - RNA, 1998 nt, Artificial Sequence
  mRNA product Design h-5 comprising derived and/or modified sequence from HRSV(Memphis-37)__AIY60640.1__F-del_DSCav1_mut4 (opt1)
gggagagggcgcuuggcuugcaaggacccugagcugcggcauugaagcacacccaacccaacucgacugaagucagccucacugaaccggaucugagaaucuucucucucugggcuugccagggcucuccgaaccuagcuagcauccucuucaauuccaacuagaaagcuuaccauggagcugcccauccucaagaccaacgccaucaccacgauccuggccgcggugacccugugcuucgccagcucccagaacaucaccgaggaguucuaccagagcacgugcuccgccgucagcaagggcuaccucuccgcccugcgcaccgggugguacaccagcgugaucaccaucgagcuguccaacaucaaggagaacaagugcaacggcaccgacgccaaggugaagcucaucaagcaggagcuggacaaguacaagaacgcggucacggagcugcagcuccugaugcagagcaccccggccgccggcuccgggagcgcgaucugcuccggcaucgccgucugcaaggugcugcaccucgagggcgaggugaacaagaucaagaacgcccugcuguccaccaacaaggccgucgugagccucuccaacggggugagcguccugaccuucaaggugcuggaccucaagaacuacaucgacaagcagcugcugcccauccugaacaagcagagcugcuccaucagcaacaucgagaccgucaucgaguuccagcagaagaacaaccgccuccuggagaucacgcgggaguucagcgugaacgcgggcgugaccacccccgucuccaccuacaugcugacgaacagcgagcuccugucccugaucaacgacaugccgaucaccaacgaccagaagaagcucaugagcaacaacgugcagaucgugcgccagcaguccuacagcaucaugugcaucaucaaggaggagguccuggccuacguggugcagcugccccucuacggggucaucgacacccccugcuggaagcugcacaccagcccccugugcacgaccaacaccaaggagggcuccaacaucugccucacccggacggaccgcgggugguacugcgacaacgccggcagcguguccuucuucccgcaggccgagaccugcaagguccagagcaaccggguguucugcgacaccaugaacucccggacccugcccagcgaggugaaccucugcaacaucgacaucuucaaccccaaguacgacugcaagaucaugacguccaagaccgacgucagcuccagcgugaucaccucccugggcgccaucgugagcugcuacgggaagaccaagugcacggcgagcaacaagaaccgcggcaucaucaagaccuucuccaacgggugcgacuacgucagcaacaagggcguggacaccguguccgucggcaacacccuguacugcgugaacaagcaggagggcaagagccucuacgugaagggggagcccaucaucaacuucuacgacccgcuggucuuccccuccgacgaguucgacgccagcaucucccaggugaacgagaagaucaaccagagccuggccuucauccggaaguccgacgagcuccugcacaacgugaacgucggcaagagcaccacgaacaucaugaucaccaccaucaucaucgugaucaucgugauccugcugcuccugaucgccgucgggcuguuccucuacugcaaggcccgcugaggacuaguacuggcugcaucucccuuuccucuguccuccauccuucucccaggauggugaagggggaccugguacccagugauccccaccccaggauccuaaaucaugacuuaccugcuaauaaaaacucauuggaaaagugagaagaucuaaaaaaaaaaaaaaaaaaaaaaaaaaaaaaaaaaaaaaaaaaaaaaaaaaaaaaaaaaaaaaaaugcaucccccccccccccccccccccccccccccccaaaggcucuuuucagagccaccagaauu

SEQ ID NO: 16853 - RNA, 1998 nt, Artificial Sequence
  mRNA product Design h-5 comprising derived and/or modified sequence from HRSV(Memphis-37)__AIY60640.1__F-del_DSCav1_mut4 (opt1)
gggagagggcgcuuggcuugcaaggacccugagcugcggcauugaagcacacccaacccaacucgacugaagucagccucacugaaccggaucugagaaucuucucucucugggcuugccagggcucuccgaaccuagcuagcauccucuucaauuccaacuagaaagcuuaccauggagcugcccauccucaagaccaacgccaucaccacgauccuggccgcggugacccugugcuucgccagcucccagaacaucaccgaggaguucuaccagagcacgugcuccgccgucagcaagggcuaccucuccgcccugcgcaccgggugguacaccagcgugaucaccaucgagcuguccaacaucaaggagaacaagugcaacggcaccgacgccaaggugaagcucaucaagcaggagcuggacaaguacaagaacgcggucacggagcugcagcuccugaugcagagcaccccggccgccggguccggcagcgccaucugcuccgggaucgcggugugcaaggugcugcaccucgagggcgaggucaacaagaucaagaacgcccugcugagcaccaacaaggccguggugucccucagcaacggcgucuccgugcugaccuucaaggugcuggaccucaagaacuacaucgacaagcagcugcugcccauccucaacaagcagagcugcuccaucagcaacaucgagacggucaucgaguuccagcagaagaacaaccggcugcuggagaucacccgcgaguucuccgugaacgccggggugaccacccccgucagcacguacaugcucaccaacagcgagcugcugucccucaucaacgacaugcccaucaccaacgaccagaagaagcugaugagcaacaacgugcagaucgugcggcagcaguccuacagcaucaugugcaucaucaaggaggagguccuggccuacguggugcagcucccgcuguacggcgucaucgacacccccugcuggaagcugcacacgagcccccucugcaccaccaacaccaaggagggguccaacaucugccugacgcgcaccgaccggggcugguacugcgacaacgcgggguccgugagcuucuucccccaggccgagaccugcaaggugcaguccaaccgcgucuucugcgacaccaugaacagccggacgcucccguccgaggugaaccugugcaacaucgacaucuucaaccccaaguacgacugcaagaucaugaccagcaagaccgacgucuccagcuccgugaucaccagccugggcgccaucguguccugcuacggcaagacgaagugcaccgccagcaacaagaaccgggggaucaucaagaccuucuccaacggcugcgacuacgucagcaacaaggggguggacaccgugagcgucggcaacacgcucuacugcgugaacaagcaggagggcaagucccuguacgugaagggggagcccaucaucaacuucuacgacccccuggucuucccgagcgacgaguucgacgccuccaucagccaggugaacgagaagaucaaccagucccucgcguucauccgcaagagcgacgagcugcugcacaacgugaacgucggcaaguccaccaccaacaucaugaucaccaccaucaucaucgugaucaucgugauccuccugcugcucaucgccgucgggcuguuccuguacugcaaggcccggugaggacuaguacuggcugcaucucccuuuccucuguccuccauccuucucccaggauggugaagggggaccugguacccagugauccccaccccaggauccuaaaucaugacuuaccugcuaauaaaaacucauuggaaaagugagaagaucuaaaaaaaaaaaaaaaaaaaaaaaaaaaaaaaaaaaaaaaaaaaaaaaaaaaaaaaaaaaaaaaaugcaucccccccccccccccccccccccccccccccaaaggcucuuuucagagccaccagaauu

SEQ ID NO: 16854 - RNA, 1998 nt, Artificial Sequence
  mRNA product Design h-5 comprising derived and/or modified sequence from HRSV(Memphis-37)__AIY60640.1__F-del_DSCav1_mut4 (opt2)
gggagagggcgcuuggcuugcaaggacccugagcugcggcauugaagcacacccaacccaacucgacugaagucagccucacugaaccggaucugagaaucuucucucucugggcuugccagggcucuccgaaccuagcuagcauccucuucaauuccaacuagaaagcuuaccauggagcuccccauccucaagaccaacgccaucaccaccauccucgccgccgucacccucugcuucgccuccucccagaacaucaccgaggaguucuaccaguccaccugcuccgccgucuccaagggcuaccucuccgcccuccgcaccggcugguacaccuccgucaucaccaucgagcucuccaacaucaaggagaacaagugcaacggcaccgacgccaaggucaagcucaucaagcaggagcucgacaaguacaagaacgccgucaccgagcuccagcuccucaugcaguccacccccgccgccggcuccggcuccgccaucugcuccggcaucgccgucugcaagguccuccaccucgagggcgaggucaacaagaucaagaacgcccuccucuccaccaacaaggccgucgucucccucuccaacggcgucuccguccucaccuucaagguccucgaccucaagaacuacaucgacaagcagcuccuccccauccucaacaagcaguccugcuccaucuccaacaucgagaccgucaucgaguuccagcagaagaacaaccgccuccucgagaucacccgcgaguucuccgucaacgccggcgucaccacccccgucuccaccuacaugcucaccaacuccgagcuccucucccucaucaacgacaugcccaucaccaacgaccagaagaagcucauguccaacaacguccagaucguccgccagcaguccuacuccaucaugugcaucaucaaggaggagguccucgccuacgucguccagcucccccucuacggcgucaucgacacccccugcuggaagcuccacaccuccccccucugcaccaccaacaccaaggagggcuccaacaucugccucacccgcaccgaccgcggcugguacugcgacaacgccggcuccgucuccuucuucccccaggccgagaccugcaagguccaguccaaccgcgucuucugcgacaccaugaacucccgcacccuccccuccgaggucaaccucugcaacaucgacaucuucaaccccaaguacgacugcaagaucaugaccuccaagaccgacgucuccuccuccgucaucaccucccucggcgccaucgucuccugcuacggcaagaccaagugcaccgccuccaacaagaaccgcggcaucaucaagaccuucuccaacggcugcgacuacgucuccaacaagggcgucgacaccgucuccgucggcaacacccucuacugcgucaacaagcaggagggcaagucccucuacgucaagggcgagcccaucaucaacuucuacgacccccucgucuuccccuccgacgaguucgacgccuccaucucccaggucaacgagaagaucaaccagucccucgccuucauccgcaaguccgacgagcuccuccacaacgucaacgucggcaaguccaccaccaacaucaugaucaccaccaucaucaucgucaucaucgucauccuccuccuccucaucgccgucggccucuuccucuacugcaaggcccgcugaggacuaguacuggcugcaucucccuuuccucuguccuccauccuucucccaggauggugaagggggaccugguacccagugauccccaccccaggauccuaaaucaugacuuaccugcuaauaaaaacucauuggaaaagugagaagaucuaaaaaaaaaaaaaaaaaaaaaaaaaaaaaaaaaaaaaaaaaaaaaaaaaaaaaaaaaaaaaaaaugcaucccccccccccccccccccccccccccccccaaaggcucuuuucagagccaccagaauu

SEQ ID NO: 16855 - RNA, 1998 nt, Artificial Sequence
  mRNA product Design h-5 comprising derived and/or modified sequence from HRSV(Memphis-37)__AIY60640.1__F-del_DSCav1_mut4 (opt3)
gggagagggcgcuuggcuugcaaggacccugagcugcggcauugaagcacacccaacccaacucgacugaagucagccucacugaaccggaucugagaaucuucucucucugggcuugccagggcucuccgaaccuagcuagcauccucuucaauuccaacuagaaagcuuaccauggagcugcccauccucaagaccaacgccauuacaacuauacuugcugcagugacgcugugcuucgccagcucccagaauaucaccgaagaguuuuaccaaucuacauguucagcggucaguaaaggcuauuugagcgcuuuaagaacugggugguacaccuccguuauuacaaucgaacugucuaacauuaaggagaauaaaugcaacggaaccgacgccaaggugaaacuaaucaagcaggaacucgauaaguauaaaaaugcaguaacugagcugcagcuucugaugcagucgaccccugccgcugguucaggcagcgcaauauguagugggaucgccgugugcaaggucuugcaccucgagggagaagugaacaaaauuaagaaugcucugcuguccacaaacaaagccguugugucucucagcaauggcgucuccguguuaacguucaagguacuggaccuuaagaacuacaucgauaaacaauugcugccaauucuaaauaagcagucauguaguaucagcaacauagagacuguuauugaauuucagcagaaaaauaacaggcuccuggagaucacccgggaguucucugugaaugcgggugucacaacuccgguguccaccuauaugcuuacaaacucagaacuguugagccucauuaacgacaugcccaucaccaaugaucaaaagaaacugaugaguaacaaugugcagaucguccgccagcagucuuacuccauuaugugcauaaucaaggaggaaguuuuagcauaugugguacaacugccucucuacggggugauugacacgccauguuggaaacuucauacuagcccccugugcacaaccaacacuaaggagggaucgaauaucuguuugacacgaaccgaucguggcugguacugcgacaacgccggcucugucuccuuuuucccucaggcugaaacguguaaggugcagucaaauagaguguuuugcgauaccaugaacaguagaacacugccaagcgaggugaaucucugcaacauagacauuuucaaucccaaauaugauuguaagaucaugacuuccaaaaccgacgucucuagcucagugaucacaagucugggggccauuguauccugcuacggaaagacuaaauguaccgcaagcaacaagaauagggguaucauuaagacauuuucuaacggcugcgauuauguuucaaauaaagggguggacaccgucagugugggaaacacucuuuacugugucaacaagcaagagggcaaaagccuguaugugaagggugaaccuauaaucaauuucuacgacccauugguuuuuccguccgaugaguucgacgcuucuauuucgcagguuaacgagaaaaucaaucagagccucgccuuuauccggaaguccgaugaacuguuacacaacguaaaugucgggaagucaacgacaaacauuaugauaaccacuaucauuaucgugauuaucguuauacugcuacuccugaucgcggugggacuuuucuuguauugcaaagcccgcugaggacuaguacuggcugcaucucccuuuccucuguccuccauccuucucccaggauggugaagggggaccugguacccagugauccccaccccaggauccuaaaucaugacuuaccugcuaauaaaaacucauuggaaaagugagaagaucuaaaaaaaaaaaaaaaaaaaaaaaaaaaaaaaaaaaaaaaaaaaaaaaaaaaaaaaaaaaaaaaaugcaucccccccccccccccccccccccccccccccaaaggcucuuuucagagccaccagaauu

SEQ ID NO: 16856 - RNA, 1998 nt, Artificial Sequence
  mRNA product Design h-5 comprising derived and/or modified sequence from HRSV(Memphis-37)__AIY60640.1__F-del_DSCav1_mut4 (opt4)
gggagagggcgcuuggcuugcaaggacccugagcugcggcauugaagcacacccaacccaacucgacugaagucagccucacugaaccggaucugagaaucuucucucucugggcuugccagggcucuccgaaccuagcuagcauccucuucaauuccaacuagaaagcuuaccauggagcugcccauccugaagaccaacgccaucaccaccauccuggccgccgugacccugugcuucgccagcagccagaacaucaccgaggaguucuaccagagcaccugcagcgccgugagcaagggcuaccugagcgcccugagaaccggcugguacaccagcgugaucaccaucgagcugagcaacaucaaggagaacaagugcaacggcaccgacgccaaggugaagcugaucaagcaggagcuggacaaguacaagaacgccgugaccgagcugcagcugcugaugcagagcacccccgccgccggcagcggcagcgccaucugcagcggcaucgccgugugcaaggugcugcaccuggagggcgaggugaacaagaucaagaacgcccugcugagcaccaacaaggccguggugagccugagcaacggcgugagcgugcugaccuucaaggugcuggaccugaagaacuacaucgacaagcagcugcugcccauccugaacaagcagagcugcagcaucagcaacaucgagaccgugaucgaguuccagcagaagaacaacagacugcuggagaucaccagagaguucagcgugaacgccggcgugaccacccccgugagcaccuacaugcugaccaacagcgagcugcugagccugaucaacgacaugcccaucaccaacgaccagaagaagcugaugagcaacaacgugcagaucgugagacagcagagcuacagcaucaugugcaucaucaaggaggaggugcuggccuacguggugcagcugccccuguacggcgugaucgacacccccugcuggaagcugcacaccagcccccugugcaccaccaacaccaaggagggcagcaacaucugccugaccagaaccgacagaggcugguacugcgacaacgccggcagcgugagcuucuucccccaggccgagaccugcaaggugcagagcaacagaguguucugcgacaccaugaacagcagaacccugcccagcgaggugaaccugugcaacaucgacaucuucaaccccaaguacgacugcaagaucaugaccagcaagaccgacgugagcagcagcgugaucaccagccugggcgccaucgugagcugcuacggcaagaccaagugcaccgccagcaacaagaacagaggcaucaucaagaccuucagcaacggcugcgacuacgugagcaacaagggcguggacaccgugagcgugggcaacacccuguacugcgugaacaagcaggagggcaagagccuguacgugaagggcgagcccaucaucaacuucuacgacccccugguguuccccagcgacgaguucgacgccagcaucagccaggugaacgagaagaucaaccagagccuggccuucaucagaaagagcgacgagcugcugcacaacgugaacgugggcaagagcaccaccaacaucaugaucaccaccaucaucaucgugaucaucgugauccugcugcugcugaucgccgugggccuguuccuguacugcaaggccagaugaggacuaguacuggcugcaucucccuuuccucuguccuccauccuucucccaggauggugaagggggaccugguacccagugauccccaccccaggauccuaaaucaugacuuaccugcuaauaaaaacucauuggaaaagugagaagaucuaaaaaaaaaaaaaaaaaaaaaaaaaaaaaaaaaaaaaaaaaaaaaaaaaaaaaaaaaaaaaaaaugcaucccccccccccccccccccccccccccccccaaaggcucuuuucagagccaccagaauu

SEQ ID NO: 16857 - RNA, 1998 nt, Artificial Sequence
  mRNA product Design h-5 comprising derived and/or modified sequence from HRSV(Memphis-37)__AIY60640.1__F-del_DSCav1_mut4 (opt5)
gggagagggcgcuuggcuugcaaggacccugagcugcggcauugaagcacacccaacccaacucgacugaagucagccucacugaaccggaucugagaaucuucucucucugggcuugccagggcucuccgaaccuagcuagcauccucuucaauuccaacuagaaagcuuaccauggagcugcccauccucaagaccaacgccauuacaacgauccuggcugccgugacccuuugcuucgcgagcucccagaauauuacagaagaguuuuaccaaucuaccuguagcgcugucuccaaaggcuaucugucugcccucagaacagggugguacaccagcguuaucacaauugaacuguccaacaucaaggagaauaaaugcaacggaaccgacgccaaggugaaacuuaucaagcaggaacuggauaaguauaaaaaugcugugacggagcuccagcugcugaugcagucuaccccugccgcuggcagcggguccgccauuuguagcggaaucgcggucugcaaggugcuccaccuggagggcgaaguuaacaaaauuaagaaugcccuucugucuacaaacaaagcuguggucucccucagcaauggggugucuguucugaccuucaaggugcuugaccugaagaacuacaucgauaaacaacuccugccgauucugaauaagcaguccuguagcaucucuaacauugagacagucaucgaauuucagcagaaaaauaaccggcuccuggagaucacccgcgaguucuccgugaaugccggagugacgacacccgucagcaccuauaugcuuacaaacuccgaacugcucucucugauuaacgacaugccuaucaccaaugaucaaaagaaacuuaugagcaacaauguucagauugugagacagcaguccuacagcaucaugugcauuaucaaggaggaagugcuggcuuaugucgugcaacucccccuguacggcguuaucgacaccccuuguuggaaacugcauacaucuccccucugcacgaccaacacaaaggagggcuccaauauuugucugacccggacagaucgcgggugguacugcgacaacgccggaagcgugagcuuuuucccucaggcggaaaccuguaagguccagucuaauagaguguuuugcgauacgaugaacuccagaacacugccgucugagguuaaucucugcaacaucgacauuuucaaucccaaauaugauuguaagaucaugaccagcaaaaccgacguguccagcucugucauuacaucccugggcgccaucgugagcugcuacgggaagaccaaauguacagcuucuaacaagaaucggggaaucauuaagacguuuuccaacggcugcgauuaugucagcaauaaagggguggacaccguuuccgugggaaacacacuuuacugugucaacaagcaagagggcaaaucucuguaugugaagggcgaaccuaucauuaauuucuacgacccccucguuuuuccuagcgaugaguucgacgccuccaucucucaggugaacgaaaagauuaaucagagccuggcuuuuauccgcaaguccgaugagcugcuccacaacgucaauguggggaaaagcaccacaaacauuaugaucaccacgaucauuaucgugauuaucguuauucugcuucugcucaucgccgucggacuguuccuguauugcaaagccagaugaggacuaguacuggcugcaucucccuuuccucuguccuccauccuucucccaggauggugaagggggaccugguacccagugauccccaccccaggauccuaaaucaugacuuaccugcuaauaaaaacucauuggaaaagugagaagaucuaaaaaaaaaaaaaaaaaaaaaaaaaaaaaaaaaaaaaaaaaaaaaaaaaaaaaaaaaaaaaaaaugcaucccccccccccccccccccccccccccccccaaaggcucuuuucagagccaccagaauu

SEQ ID NO: 16858 - RNA, 1998 nt, Artificial Sequence
  mRNA product Design h-5 comprising derived and/or modified sequence from HRSV(Memphis-37)__AIY60640.1__F-del_DSCav1_mut4 (opt6)
gggagagggcgcuuggcuugcaaggacccugagcugcggcauugaagcacacccaacccaacucgacugaagucagccucacugaaccggaucugagaaucuucucucucugggcuugccagggcucuccgaaccuagcuagcauccucuucaauuccaacuagaaagcuuaccauggaacuaccaauacucaaaacaaacgcaauaacaacuauacuagccgcaguuacacucugcuucgcuucaucacaaaauaucacagaagaauuuuaccaaucuacauguucagcuguauccaaagguuaccuuucagcacuacgaacaggaugguauaccucaguaaucaccaucgaacucucgaacauaaaagaaaacaaauguaacggaaccgaugcuaaagucaagcucauaaaacaagaacuagacaaauacaaaaacgcaguaaccgaacuacaacuacuuaugcaaucaacaccagcugcaggcucaggcucagcaaucugcucaggcauagcuguaugcaaaguacuacaucuagaaggagaaguaaacaaaauaaaaaacgcauuauuaucaacaaauaaagcaguaguaucacuaucaaauggaguaucaguacucacauucaaaguacuagaucuaaaaaacuacauugacaaacaauuacuaccaauccucaacaaacaaucaugcucaauauccaacauagaaacaguaauagaauuucaacaaaaaaacaaucgacuacuagaaauaacaagagaauuuucagucaaugccggaguuacaacacccguaagcacuuacaugcuaaccaacucagaacuacuaucacuaauaaacgacaugccaauuacaaacgaccaaaaaaaacuaaugucaaauaacguacaaauaguacgucaacaaucauacucaauaaugugcauaauaaaagaagaaguccuagcauacguaguacaauuacccuuauauggcguaauagacacaccaugcuggaaacuacacacauccccacucugcaccaccaacaccaaagaaggcuccaacauaugucuaacccgaaccgacagagguugguauugugauaacgcuggcuccguaucauucuucccacaagcagaaacauguaaaguacaaucaaacagaguauucugcgauacaaugaauagcagaacacuaccaucagaaguaaacuuaugcaacaucgacaucuucaaucccaaauacgacugcaaaauaaugacauccaaaacugacguuucuucaagcguaauaacaucuuuaggagcaauaguauccugcuacggaaaaacuaaaugcacagcauccaauaaaaaccguggaauaauaaaaacauucucaaauggcugcgacuacgucucaaacaaaggcguagacaccguuagugucggaaacacacuauauugcguaaauaaacaagaaggaaaauccuuauacguaaaaggcgaaccaauaauuaacuucuaugacccccucguauuuccauccgaugaauuugacgcaucaaucucgcaaguaaacgaaaaaauaaaccaaagccuagcauucauaagaaaauccgacgaacuacuccacaauguaaauguaggaaaaucaacuaccaacauaaugauuacuacuauaauaauaguaauuauagucaucuuacuacuauuaauagcagucggauuauuccuauacugcaaagcaagauagggacuaguacuggcugcaucucccuuuccucuguccuccauccuucucccaggauggugaagggggaccugguacccagugauccccaccccaggauccuaaaucaugacuuaccugcuaauaaaaacucauuggaaaagugagaagaucuaaaaaaaaaaaaaaaaaaaaaaaaaaaaaaaaaaaaaaaaaaaaaaaaaaaaaaaaaaaaaaaaugcaucccccccccccccccccccccccccccccccaaaggcucuuuucagagccaccagaauu

SEQ ID NO: 16859 - RNA, 1998 nt, Artificial Sequence
  mRNA product Design h-5 comprising derived and/or modified sequence from HRSV(Memphis-37)__AIY60640.1__F-del_DSCav1_mut4 (opt11)
gggagagggcgcuuggcuugcaaggacccugagcugcggcauugaagcacacccaacccaacucgacugaagucagccucacugaaccggaucugagaaucuucucucucugggcuugccagggcucuccgaaccuagcuagcauccucuucaauuccaacuagaaagcuuaccauggagcuccccauccuaaaaaccaacgccaucaccaccauccucgccgccgucacccuaugcuucgcuucaucacaaaacaucaccgaagaauuuuaccaaucuaccugcuccgccgucuccaaaggauaucucagcgcccuacggaccggcugguacaccuccgucauaaccaucgaacucaguaacaucaaagaaaacaaaugcaacggcaccgacgccaaagucaaacuaaucaaacaagaacuagauaaauacaaaaacgcggucaccgaacuacaacuccuaaugcaaagcacccccgccgccggauccggcuccgccauaugcuccggcauugcugucugcaaaguacuacaccucgagggcgaggucaacaaaaucaaaaacgcacuacucagcacuaauaaagccguaguaucccuaucaaacggugucucagucuuaacauucaaaguacucgaccuaaagaacuacaucgacaaacaacuccuacccauccucaacaagcaguccuguucuaucucaaacaucgaaaccgucaucgaauuucaacaaaagaacaaccgccuccucgaaaucacacgcgaguucuccgucaacgcaggaguaaccacccccgucuccaccuacaugcucacaaacucggaacuccucucacuaaucaacgacaugcccaucaccaacgaccaaaagaaacucaugagcaacaacguucaaaucguccgccaacaaucauacuccaucaugugcauaaucaaagaagaaguccuagcuuacgucguccagcugccccucuacggagucaucgacacgcccugcuggaaacuacacacaagcccccucugcaccaccaacaccaaagaaggcuccaacauaugccucacacggaccgaccgcgguugguacugcgacaacgccggcuccgucuccuucuucccccaagcagaaacuugcaaaguccaauccaaccgcguauucugcgacacaaugaacagcagaacacucccuagcgaagucaaccucugcaacaucgacauauucaaccccaaauacgacugcaaaaucaugacgucaaaaaccgacgucuccagcuccguuaucaccucacucggcgccaucgucagcugcuacggcaaaacuaaaugcaccgccuccaacaaaaaccgcggcaucauuaaaaccuucagcaacggcugcgacuacgucuccaacaaaggugucgauacgguauccgucggaaacacccuauacugcgucaacaaacaagaaggcaaaucucucuacgucaaaggcgaacccauaaucaauuucuacgacccccuagucuuccccuccgaugaauuugacgccuccaucagccaagucaacgagaaaaucaaccaaucacuagccuucauccggaaauccgacgaacuccuacacaacguaaacgucggcaaauccaccaccaauauaaugaucacaaccaucaucaucguaaucaucgucauccuccuccuacucaucgccgucggauuauucuuauacugcaaagcccgcuaaggacuaguacuggcugcaucucccuuuccucuguccuccauccuucucccaggauggugaagggggaccugguacccagugauccccaccccaggauccuaaaucaugacuuaccugcuaauaaaaacucauuggaaaagugagaagaucuaaaaaaaaaaaaaaaaaaaaaaaaaaaaaaaaaaaaaaaaaaaaaaaaaaaaaaaaaaaaaaaaugcaucccccccccccccccccccccccccccccccaaaggcucuuuucagagccaccagaauu

SEQ ID NO: 16860 - RNA, 1931 nt, Artificial Sequence
  mRNA product Design i-1 comprising derived and/or modified sequence from HRSV(Memphis-37)__AIY60640.1__F-del_DSCav1_mut4 (opt1)
gggagagggcgcuuggcuugcaaggacccugagcugcggcauugaagcacacccaacccaacucgacugaagucagccucacugaaccggaucugagaaucuucucucucugggcuugccagggcucuccgaaccuagcuagcauccucuucaauuccaacuagaaagcuuaccauggagcugcccauccucaagaccaacgccaucaccacgauccuggccgcggugacccugugcuucgccagcucccagaacaucaccgaggaguucuaccagagcacgugcuccgccgucagcaagggcuaccucuccgcccugcgcaccgggugguacaccagcgugaucaccaucgagcuguccaacaucaaggagaacaagugcaacggcaccgacgccaaggugaagcucaucaagcaggagcuggacaaguacaagaacgcggucacggagcugcagcuccugaugcagagcaccccggccgccggcuccgggagcgcgaucugcuccggcaucgccgucugcaaggugcugcaccucgagggcgaggugaacaagaucaagaacgcccugcuguccaccaacaaggccgucgugagccucuccaacggggugagcguccugaccuucaaggugcuggaccucaagaacuacaucgacaagcagcugcugcccauccugaacaagcagagcugcuccaucagcaacaucgagaccgucaucgaguuccagcagaagaacaaccgccuccuggagaucacgcgggaguucagcgugaacgcgggcgugaccacccccgucuccaccuacaugcugacgaacagcgagcuccugucccugaucaacgacaugccgaucaccaacgaccagaagaagcucaugagcaacaacgugcagaucgugcgccagcaguccuacagcaucaugugcaucaucaaggaggagguccuggccuacguggugcagcugccccucuacggggucaucgacacccccugcuggaagcugcacaccagcccccugugcacgaccaacaccaaggagggcuccaacaucugccucacccggacggaccgcgggugguacugcgacaacgccggcagcguguccuucuucccgcaggccgagaccugcaagguccagagcaaccggguguucugcgacaccaugaacucccggacccugcccagcgaggugaaccucugcaacaucgacaucuucaaccccaaguacgacugcaagaucaugacguccaagaccgacgucagcuccagcgugaucaccucccugggcgccaucgugagcugcuacgggaagaccaagugcacggcgagcaacaagaaccgcggcaucaucaagaccuucuccaacgggugcgacuacgucagcaacaagggcguggacaccguguccgucggcaacacccuguacugcgugaacaagcaggagggcaagagccucuacgugaagggggagcccaucaucaacuucuacgacccgcuggucuuccccuccgacgaguucgacgccagcaucucccaggugaacgagaagaucaaccagagccuggccuucauccggaaguccgacgagcuccugcacaacgugaacgucggcaagagcaccacgaacaucaugaucaccaccaucaucaucgugaucaucgugauccugcugcuccugaucgccgucgggcuguuccucuacugcaaggcccgcugaggacuaguguccaccugucccuccugggcugcuggauugucucguuuuccugccaaauaaacaggaucagcgcuuuacagaucuaaaaaaaaaaaaaaaaaaaaaaaaaaaaaaaaaaaaaaaaaaaaaaaaaaaaaaaaaaaaaaaaugcaucccccccccccccccccccccccccccccccaaaggcucuuuucagagccaccagaauu

SEQ ID NO: 16861 - RNA, 1931 nt, Artificial Sequence
  mRNA product Design i-1 comprising derived and/or modified sequence from HRSV(Memphis-37)__AIY60640.1__F-del_DSCav1_mut4 (opt1)
gggagagggcgcuuggcuugcaaggacccugagcugcggcauugaagcacacccaacccaacucgacugaagucagccucacugaaccggaucugagaaucuucucucucugggcuugccagggcucuccgaaccuagcuagcauccucuucaauuccaacuagaaagcuuaccauggagcugcccauccucaagaccaacgccaucaccacgauccuggccgcggugacccugugcuucgccagcucccagaacaucaccgaggaguucuaccagagcacgugcuccgccgucagcaagggcuaccucuccgcccugcgcaccgggugguacaccagcgugaucaccaucgagcuguccaacaucaaggagaacaagugcaacggcaccgacgccaaggugaagcucaucaagcaggagcuggacaaguacaagaacgcggucacggagcugcagcuccugaugcagagcaccccggccgccggguccggcagcgccaucugcuccgggaucgcggugugcaaggugcugcaccucgagggcgaggucaacaagaucaagaacgcccugcugagcaccaacaaggccguggugucccucagcaacggcgucuccgugcugaccuucaaggugcuggaccucaagaacuacaucgacaagcagcugcugcccauccucaacaagcagagcugcuccaucagcaacaucgagacggucaucgaguuccagcagaagaacaaccggcugcuggagaucacccgcgaguucuccgugaacgccggggugaccacccccgucagcacguacaugcucaccaacagcgagcugcugucccucaucaacgacaugcccaucaccaacgaccagaagaagcugaugagcaacaacgugcagaucgugcggcagcaguccuacagcaucaugugcaucaucaaggaggagguccuggccuacguggugcagcucccgcuguacggcgucaucgacacccccugcuggaagcugcacacgagcccccucugcaccaccaacaccaaggagggguccaacaucugccugacgcgcaccgaccggggcugguacugcgacaacgcgggguccgugagcuucuucccccaggccgagaccugcaaggugcaguccaaccgcgucuucugcgacaccaugaacagccggacgcucccguccgaggugaaccugugcaacaucgacaucuucaaccccaaguacgacugcaagaucaugaccagcaagaccgacgucuccagcuccgugaucaccagccugggcgccaucguguccugcuacggcaagacgaagugcaccgccagcaacaagaaccgggggaucaucaagaccuucuccaacggcugcgacuacgucagcaacaaggggguggacaccgugagcgucggcaacacgcucuacugcgugaacaagcaggagggcaagucccuguacgugaagggggagcccaucaucaacuucuacgacccccuggucuucccgagcgacgaguucgacgccuccaucagccaggugaacgagaagaucaaccagucccucgcguucauccgcaagagcgacgagcugcugcacaacgugaacgucggcaaguccaccaccaacaucaugaucaccaccaucaucaucgugaucaucgugauccuccugcugcucaucgccgucgggcuguuccuguacugcaaggcccggugaggacuaguguccaccugucccuccugggcugcuggauugucucguuuuccugccaaauaaacaggaucagcgcuuuacagaucuaaaaaaaaaaaaaaaaaaaaaaaaaaaaaaaaaaaaaaaaaaaaaaaaaaaaaaaaaaaaaaaaugcaucccccccccccccccccccccccccccccccaaaggcucuuuucagagccaccagaauu

SEQ ID NO: 16862 - RNA, 1931 nt, Artificial Sequence
  mRNA product Design i-1 comprising derived and/or modified sequence from HRSV(Memphis-37)__AIY60640.1__F-del_DSCav1_mut4 (opt2)
gggagagggcgcuuggcuugcaaggacccugagcugcggcauugaagcacacccaacccaacucgacugaagucagccucacugaaccggaucugagaaucuucucucucugggcuugccagggcucuccgaaccuagcuagcauccucuucaauuccaacuagaaagcuuaccauggagcuccccauccucaagaccaacgccaucaccaccauccucgccgccgucacccucugcuucgccuccucccagaacaucaccgaggaguucuaccaguccaccugcuccgccgucuccaagggcuaccucuccgcccuccgcaccggcugguacaccuccgucaucaccaucgagcucuccaacaucaaggagaacaagugcaacggcaccgacgccaaggucaagcucaucaagcaggagcucgacaaguacaagaacgccgucaccgagcuccagcuccucaugcaguccacccccgccgccggcuccggcuccgccaucugcuccggcaucgccgucugcaagguccuccaccucgagggcgaggucaacaagaucaagaacgcccuccucuccaccaacaaggccgucgucucccucuccaacggcgucuccguccucaccuucaagguccucgaccucaagaacuacaucgacaagcagcuccuccccauccucaacaagcaguccugcuccaucuccaacaucgagaccgucaucgaguuccagcagaagaacaaccgccuccucgagaucacccgcgaguucuccgucaacgccggcgucaccacccccgucuccaccuacaugcucaccaacuccgagcuccucucccucaucaacgacaugcccaucaccaacgaccagaagaagcucauguccaacaacguccagaucguccgccagcaguccuacuccaucaugugcaucaucaaggaggagguccucgccuacgucguccagcucccccucuacggcgucaucgacacccccugcuggaagcuccacaccuccccccucugcaccaccaacaccaaggagggcuccaacaucugccucacccgcaccgaccgcggcugguacugcgacaacgccggcuccgucuccuucuucccccaggccgagaccugcaagguccaguccaaccgcgucuucugcgacaccaugaacucccgcacccuccccuccgaggucaaccucugcaacaucgacaucuucaaccccaaguacgacugcaagaucaugaccuccaagaccgacgucuccuccuccgucaucaccucccucggcgccaucgucuccugcuacggcaagaccaagugcaccgccuccaacaagaaccgcggcaucaucaagaccuucuccaacggcugcgacuacgucuccaacaagggcgucgacaccgucuccgucggcaacacccucuacugcgucaacaagcaggagggcaagucccucuacgucaagggcgagcccaucaucaacuucuacgacccccucgucuuccccuccgacgaguucgacgccuccaucucccaggucaacgagaagaucaaccagucccucgccuucauccgcaaguccgacgagcuccuccacaacgucaacgucggcaaguccaccaccaacaucaugaucaccaccaucaucaucgucaucaucgucauccuccuccuccucaucgccgucggccucuuccucuacugcaaggcccgcugaggacuaguguccaccugucccuccugggcugcuggauugucucguuuuccugccaaauaaacaggaucagcgcuuuacagaucuaaaaaaaaaaaaaaaaaaaaaaaaaaaaaaaaaaaaaaaaaaaaaaaaaaaaaaaaaaaaaaaaugcaucccccccccccccccccccccccccccccccaaaggcucuuuucagagccaccagaauu
